United States Patent Application Publication US 2009/0018031 A1 - sequence listing, part 17

SEQ ID NO: 8810 - DNA, 6000 bp, Homo sapiens
tgtttactaaaattagcaatgaaatctaaaaccaaagttattcttctttgcctaataaaaaatagttcttaaataagaaaatattaagtggttaatttaaaagcaagtatttaggagatggttactgggtgtcaagtattaacaaaaaatgaaggatttttattatgcaaaatactttttgagtggcatgaggttttaccatatgttcagttttataatttcaatttacaagaagatgcttccagaaaaaagaatgctgttttttttctgcacatctttacacatttctagtactgagttctgtatcaaagaaagaaataattttaaaagtatttgtgttaagtggtttttggtaaaaatcggctgagaaatactgaataaaagctacaactatccaaaatgtgaatattaacaaagcaattgacttgttctttaaccatcctatgagaaaggaacaaacaatttggtcaattactatcctgtcaatgcaaatgaaatggcaaaagcaaaacaataaaaacactttcagaagtaaaaactaattttgtattttcagaaacagatttttttcaaagtgaaaatttatttcttgtatcagtaatgtgacttactgcccaatggcaacaaatgctgtgaatgagtttgtccaaatgtaatttaaaatatatatcttgtaatgctaaaaataggttctacaaagtaattttattatgaaaaatcttaaagttgcctcaactcgtaaagcataacaggtatgtctgtttcactatatctgcattgtaaggtctattctgaattcatttgggaagaatggtgaaataaatccctaaaggcctctttcctatgcattaaaatagaaaatcctatgggattacattcatgtttgctttctaaattatgccaaaagctcaattttattaagtataatctgcctagccatgcataaaataaactactttggtttagatgtgagtatatgtattatttatgttgatttttaatgaaaatatgtttacatgtaccaatatgttctgcctaatattggttaatgtcataaaagataatatagtaacattactttcctaaatgtttttctgtggtcatccaatagtgtttcttaatagtaatgctttttaatttattttagttggtttcaaaagaggataggtgcaatttttactcccactcattttaaaaactgttaagaaaatagaccttcattgtggggtaactttacacatttatacatggcaatagtttaaagttatatcggctgcgggggcctgaaaaagccattattgtcattttaattgagttataaaatactttatttgaactatttatgttcaagaatcttgaagggttacagtcatataaatgcagaatttcagtttcttttagcctaaagcatcgttttaacattttctgaaaggttgttcaattctacattttgattccatatgtgtaattaaatctctatgcacaaaagcattctcttatgtactagcaaatatacccacaggaatctccttctaaactataatttatttaacatgtaatcataggattttaaaacatgctttcatttttccaaactgtatgccaatttgaacttcttggtgataaaatgagagattttattaccagtttgattttttccttctgtgacctaacagtgagttaagcatgagcaggaggaaataaagaaaatcttttgtgaacctaatcccatgtgttaaaactgtttcccttttggagaaaatagaagagaatcaaagatttttagttatttatgaattccagcacaatatgaatatttgggcctgcagcattctctttggtttagcttaggtagtaaatagcttgtgtgtgtgtgtgtgtgtgtgtgtgtgtgtgtgtgtgtgtgtgtgtgtgagtgattctcttgaacgttgtggagtcaggccccctactgactggatcagtcaattacacacacattggcggtgctactgagacatcgtcccatcagaatctggtgaggaaaactagtctggggttttgagcgtggccttttttttttttttaaacacttctgatctatatgctgaatcctttccaacccatctcatccgggccttacagaaaccctagcctaagaagtagcttattcaaaattggtttaaacgagtttaacagtcttacatccggcgtgtcttcctaagaaacagtaaaagcttcccagaaaccagaataggactttgaagaggagagaactcttacacagatgatggaatagatgagaaaggtctcccctttctctcattttaatttatatttaattttatatttaattatattcccagttaataataattgttataataagctgctgtgaaaacgacccttcattcttggttgcattaagacttggacaaaggctgttatcaggaagccgcactcgacaggttgttattaaagaataaggcatcatattacaatgtttggcttccttggagctcactttaagaactccaggacacttttcagctctctggggaggcattttcaaattgtcccaggctcaacccaacctaaactgaatgtgtttttaatggcaatgagggagggggaagcgtgcagagtgaatgtatctacttagacgggagtatgtgtatggaggctggtggttacaaccttcaagttctcccggcccccgttttcctaggactatattaaaaaataataactgccaccccggcgtgcctgtgcttgagtttccgactgcctgaaaatagcggccgggagcctggcccaccgcggggatcaaggaaagcttcccgtggccgcgccctgctccctcgcggaaggggaagggaacccgggagggcgcctctgagctggagttgctgctattttgggcccagcctggccggtgcgtcaatgcctgcgcccctgcgtcaccgccacccccacccccttccttctccccagctctccaaactctcactttttccctttcgttcgcatggaatcgcttctgcccacggggcgctgacgctaccgagctcatgctaatatgctattcttcgccctcccctcctcatccccctactcacacaccctcacccgccaccacaacccgccccccccacccacttcctggttttattttttttctcgcgcccgctagggcatcgccgagcagcggcggcggcggcagcagcagcggcagccgcaacatctgggggaaacttaaggtggtcacgtaggtttccccgaggctgcggcgcaaaagagcccgcggcttcctggggcagccgcagggcatctgatggcaacgcctccccagccgccggcgagctgggggcagcagggagtaggcaaaggcggggctgcagattagggttgagcagcccgggatcccgaatagttccacggagccatcggccggtactgagaacacgagtaggggggcaagttgcaaaagggtcccggctgcctggaaacgagccacaccgagaaaggaggggcggctgggacgctctgcgcgagtagaaaagcgggggcggctccgaactctccctcccaaggcccagccgctggaagccccgcgggagaagccctaggaagccctcccagctccggccgggagacggggagggggcttgccctccggagctgcggcgtttcctttgctagaaagctccctgcgctctcggcgtggctaggggaaatgacttgcaaagcagaagcggcggcgacttggacggccgcgggggtgggacacgctcccagagccagctcgggcccctctcctggctgggctgtaggctcacaccttacgctttgcggagacgctgcccccaatccccacccgcttcgcttttcttgtccagtctttctgggctctaagattgaggctgtgatagaccttgtgtttcaaacgaagatcgatttattcccttaaaactcgtggaaggggtacgagttggtgggcacagaggagtatcgaaagtattagagtttgcagaaggtgggaatcagagtacctttctgcagaaggcgcacctgttgcctgctgctcggctgcattgtctgcgaaaggaaaaggggcgacgcttcactctgacttttggggtttctaaagagctgggtcacggtcactgtctaccctctccccttcctctcccccccccccgcaagcaccacgtcctccatcgaacgtgggcactgcatggaaataaggaaacatagaaaaataagccctacccccactcccattccctttcagatgggagtgtggggggtgggggtggggtagagagagtgagagagagagataattagaatgaatatatgccagaagaggaggaggcctgggacaggaaaagggagtaaaaggggatgaaccgggtagggaaatcccacccgaactgcgtgagccctctgagcgtctcgtgtcatgggacatctgtacgctcttccgctaagggggtgacgaaggtgggtgggagaggttagggcgctgcaaggcacatcccattccgtgcggctccaggtgcgtactacctggccacgccggccttgccttccgccggtgcttttgttgcaccctccccacatgtgagcggccgagccgctgcgcgggcgcaggggcttcggggaaagtgaagtgtcgcgacgctgcgggctgcgcagacctgggagaggtcacacctctttcggaaaaaaaaaaagaaaagaaaaaaaacaccaaaaaccacccaagctggctaccaaggtgaacgcagagcggttcccaccttaaaatcggccctgctcgtgacgtcaggtcggaaatataccaaagcgagcgcgggccaggagtccagggagcgcggcagcgcggcgattgggcggcgggccgctgacgcgcgctgacgcgcggagactttaggtgcatgttggcagcggcagcgcaagccacataaacaaaggcacattggcggccagggccagtccgcccggcggctcgcgcacggctccgcggtcccttttgcctgtccagccggccgcctgtccctgctccctccctccgtgaggtgtccgggttcccttcgcccagctctcccacccctacccgaccccggcgcccgggctcccagagggaactgcacttcggcagagttgaatgaatgaagacagacgcggagaactcctaagtgagtagatgcagcccatgcagttcgccttcttttatgctttttccttcttttgcacgtctcttctttccacttgtgtgggacaggttctctggaagtgggagccagaggcttctagtgagagtgggaccgaaggatggggagtgcgtgcgcgcagttaccggggggcatttgttcgaactccggctttggcactagtggggagttggctctcgacagaggtttccaggctcctcattggtggacgtggaagggagactccacagtttgggagctgaggactagcccgcggaaatgtgcgcaaagtttgctgttagtgaggaattgattgtggcctgtgaacacggagactccaagtcctatgtatacgagggaagctgcccacaaactgacagggagaggaagttcttcagtttatgcgttgcttgggaactgtgtctccgcggctggccagcgcgcgatgtttcccgggtattgttgagtaagggtggtgttggtagcgtgtcctgttactaagttgcctgaaatttctggttttgacatatgctgtccttgggtttgcgaatgtatcagagcgagaatatgaatatgtaaagagtacagttatgaaactgtggagctaccagggggttaatatccaacacaggaatatctctaagggctgtggggttcgagtctcctttctgctttttctgggtaatcttccccccacccccaccaccactatgaagcaagattgtgggggaggggaaagaataaaaagagaggatactggctttcttttttcattagtaataagattgtctgtgctctagaa

SEQ ID NO: 8811 - DNA, 6000 bp, Homo sapiens
tctatgaatatgtaatacgtacttctacttaataacacatgctggaagatagtaacctttagcagagccaagatacagtttaaatacagcagaattttgatagactcaaagtaaatcttagctgtgtgtaaaggggtcaatgtccagcctggactgcaaagtagactgagaattgtgttgttcggaaacaataaagttaagataggtatacaatgctatgtccagaaaccccccacccaaagcactgcacctgggtcgtaaattggggctgcttcatttttactgatataattgccaacaccaaagtttgtgatgtctatggttttagagaacaatgtttctgagtgagtaggaaagctgtagtcacttgaagaagggggttattatgatactttacagctgcagcacgtccttaggagacattgcatcctgttaactttgcagctgactttatctgtgcctatttttctagcctgatgaacagttgagctgattttttaccttctcagtgtgagctaatatttactttctcatgggcaatcctaaatgtcaaatactgtattgagtgctttacatacattatttcatttaatcttagcaacaatcctttgaggcaagtgctagcatcctattttacagatggggacactgagtcttggagatgttgaagtggtttggcccaggtttcatacagctagtaagtgacaaacccatttcaaacctgggtctccctaactctaaacctagtcttcttaacctctatcctttaagcagatgtagaaattaaagattattcaaagtgaaatgggtaaaatacagagctggttatgggcaagtggcaggctcatgcactatggctaggaccacagattgaaacaattttctggaggccagtttggtaaataatgtagtaaaaaaattaacatgtaccctttgagccaacaattaatcttctagaaatttaaagaaaataatttctaaactgcacggaggcatgcattagaattacagcatgatttacaaaaatatacaaacaaaaatacagacaatgtaaacatttttagtaaggaattaaatggctaaacagatacacaatgcaagagtatttaactattaggatgaaaatacattgtacagtaaaaggcaccagattactgatgagcatttatcatgtgattttattttatttattttatttttttgagatggagtctcactctgttgcccaggctggagtgcagtgaggcgatcttggctcactgcagcttctgcctcctgggttcaaatgattctcctgcctcagcctcctgagtagctgggattacaggcacccaccaccacactgagtagagacagagtttcacaatgttggccaggctggtcttgaactcctgacctcaggtgattcgcctgtctcggcctcccaaagtgctgggattacaggcgtgattttatttttatgtaaaattgactacatatagtgtatttatatgtgcaaatatatatagagaaaggtgtggaaacatgtttactatgtttctctctggcttgaaaaagtttatttttaaactttttgtgctgttctttattgactgaatattttgtgagtctgtatcaattattataaaacaaaaaactatttgaaaaaaagaatgtcaaagttaaatcaattcttgcctcagtaactggagtaatttcatgcacactagccatatattttatagaactggaaatctattatgctctggagaaaatccaacaggtatgttctagattttgcccgtagaactaggctgtttctagtccaccaaaggattatattaatttatggaaacaatagggtttggactaaaaccagttctatctgggctataagagttaaatgttgtcttacatttttatttataaatatcttcaaagcattttcatttaattggagttagtcttccttgttgattggcattgtattttgggagtaaataaattttaaatagctaaggtaaatggattttagagaggctacttgtacagtcacgaagtaaatctaatgaatcttttggccctatatttagggttgctcgggtggattagtaaaatgggcctgtttagtaaaagtagatggagtctgagagaagttgagtatgaccagagaaaagattaccaattggagacataaaagggtgttataactgctttgacaagtgattatgacttgtagaggaaggagaaaaaagtcaaagagttattatttaagaaacattaccaggcgcagtggctcatgactgtaatcccagcactttgggaggccgaggctggtggataacctgaggtcaggagttcaagaccagcctggccaacacggcgaaaccctgtctctactaaaaatacaaaaaattagccgggcgtggtggcgggtgcctgtaatcccagctactcgggaggctgaggcaggagaatcacttgaacccaggaggcagaggctgcagtgagctgagatcgcgccactgcactccagcctgggcgacaagagcgagactctgtttcaacaacaacaaaaaagaaacagtaccattctagaaaagaactctctctttagcatacatggatggttatggcaatataaattaacacctaaataatttgtcattcaacaaaatcttagcactgtgtgtcttgaggatattttaaagttaattacgaccccgggctgcagagtgggagattggaagaaggaaattcaggagttgttttgttaacagttgaagctgtggaaataaacagtcaaccgaagccagaggaaaggaaggaaaaaaataaaaccttgaggataccaacattttttatggccccgtaaaaaaggagcagcccaagaaaagtgcaaacgaaggcaagttcagaaatcaggtagagagactcatattgaagacaagggaggagagtttcaaaaaggaggagttagcagtatcacgtgctgtagaaaggccacacgacagtaggactgaagtggccactagatttggccttcagcacttactagagtctagtggagacaggagtaccttgcacaagtggctcatttgttggcaccagaggctagaacaaggcactttcacacagtctgcattggactagattgggaagtaggccctacattaggggacgaaactcatgagtgcccgggtattttcagctattattggggatagggactctgcgggtggctagaggtactgctaagccagagctcaggagatgcacctagggccccagtagtaggtctccgataagaatcaggggaatgaatatataaatgaatgaatatatgaatgcatgtgggggtgtggtctagcgattactttatgagcgtgacaaggataggaagaggatggtgaaagcatacagtagtacctgcctgtgaaagaagctgcccgtcgactcagagagctgccacggagattggtgttttcaaggctgtcaggttccccagttgggagaagggtgggaagggcttaaggatttacagagattgatttaggggagaacacacaggaagcgaaacagcaggaaacgccgggagacagcagcagcaggacaggattgaggaagggtaagagtgcgaaatggggtaagaataaaagaaaggaatggacagatgtatgctttacaaggcacttccacggcgagtgactcattcatgcttaggacaacccagggagagacataggtatatattgcattgccagcctttggaatgcgggatgcggtccagataaggccatcgcagctcagagaggctgttcagccgctgttcgattcctctggtgacaagaacactctacttttggaagtagcacttctattagagaagttaaaaaaaaaaaaaaaagaaaagggagataagaagaaaggtgtgggccccttgaggggaaagatctgtgaatgacagacattttagataattcatggaattgcagagccagaacgggtcaggcagatcttttcatctgtaaaacgaagggggcagacgatcttccttttctcttgtctaatagcctgtgaaatcatctaggcaaccacctcccaattttacagaataaaaaacgaggcccgcgggatatgtctcgctcaaagtaacagaacgcccgagtggagggacaggcccggagccgactccgccccgtccgcagggcctctcgccgctccgacaccttcccagaaagataaagaacagcgggaggcggcaggcccggcggcctagctgcgagcgccctggtgttcgaggccgcttcccggcagcagtgggaggaacgccccgaggggagggcaggagaggggcggggaggagttgagacgggcggggaagagttcgggcctcctttcccacacttcgttaggacgccggctggggcgggccggcagagggcgcggggcggttcctcgctcggcgggcccggcaggcccggcgggctgggggcgcgctgtcccgggcgcactgtcggagctcgcgggcaccgggtcgcggcggcccgggcggccggagccggcaggggaagtgcggcgggcgggcaggcgggcggccgggaacgggcggggcggggcggggcgcgaagggggcggtgccgcgagcggggggcggtggcggcggcggcggtggcggccgaggaggagaacatggcggccgcggagagcggctgaaatgcctgttcttcaggccgggcgagcgggagtctgacgcgatttgctgagctctgtcctccgacggctgcctcgcggccttgagggcctccgccgcctgttcgctgctgctccctcgagcggagcctgcgtcaggttccctctgcatccccctgcggggggacccctgctccggaggagggggccggagagccgcggcgccgggcccgaggagcggcggaggccggggcggcgccgccgccacggtcgcggacgagtgcggcgccggtgagcggggcccagaggcggcggcggcaggtgagtggcgggctgcgggtgcggagcctcccggtgggtgcagctgtcacgagccgcgcggccgcggaggccctagggggcggggagcagctggcgcccctccgccccctgctctcctttctcccgctccatcctcctcccacttccccgagttcccctcgcggcccggcgcggctggagggggcggaggtcgcagctgtcacgggcaccagctgggggctgctccccgccgggggaaatcgctgcagcagcgacttctctccgcctcttttccagttgccctagttagcgcggagagggcgagcatccgcggagggggtgcgagctgcgcggccgcctgcccggcgtggggagcgggcgccccgggccgccgccgagagggggagccggaagtcggcgcgggcgcccctcggccccgacgacgccgtgaccttggccggcccgctcacctctcggaatctcgcctgccgggaccgcgaaatgggggcgaccgcggcgtccctctccgtcggcgcagccctcgacggcgcttgggtttgaccccggcgcgcttgctcgccccttctcccgagaaggggtttcggaggtagacatgggatggatactggacatgttcctgtcgcggcccgggtttggtccccttcctgggattcagccgaaagggccgaggaagggaagcaaacatgttgacgaggcgattgggaggtggggttggttagtgggcagtgacagaattcgggccgctctctagtcccttgtaaaagacctgaaaaaatcggacacccagggtctccagtccttactacccagctgtggtggctgcttttttattttatttaaaagcagttacccccatgggtagacactgcccagtctgacgacgttagagggagacggaggggttgacaatacagcctgtgtgtgtgtgacaaggacaggccacggtgttgtgtccggagagtttcatggggaggaaaactttaagctggaggatctgttagcctctca

SEQ ID NO: 8812 - DNA, 6000 bp, Homo sapiens
gtatttcctcttcaatttcttgcctattcaagtttttttgtttatttctttactgagttgatcattttttttctttctggcttgtaagggctctttgtacatcagaaaaattctattgtcttcccaatctcctacaatgttaatttcatcctctcgctactggaattttactctcaatttattataagtttctactgcaaagctcttttttattcttaattctccatgatcacttcagcattcgggattactgaacagctctttcttaaaattttctactcacttccttttcataatactgatttatttcatttctctctgtttcttaaattaagaaaaattatcttaatttttctcctctatctttactttctattcctcttcctattaacgtacccaaagttatatccattgttctctctataccagagtttcttgctctgttacagaggctggagtgtagtggcacaatcacggctcaccacaaccttgacctcctaggctaaagcgatcctcctgcctcaacctactaagtagctggaactataggggcatgccaccatgcctggctaattacaaaaaaaaattcttttttttttttttttgagacggtctcactctgtcacccaggctggagtgcagtggcgcaatctcagctcaccgcaacctccacctccagggttgacgccattctcctgcctcagcctcctgagtagctgggactacaggtgcccgccaccacgcccagctaatttttttggttttagtagagacaggttttcactgtattagccaggatggtctcgatctcctgatctcgtgatctttccgcctcggcctcccaaagtgctgggattacaggtgtgagccaccgcacccggccaaaaaaattcttttatagagacagggtcgcactatgttgcccgggctggtctcaaactcctgggttcaagtgatcattccaccttggcctcccaaagtactgggattacaggcatgaaccaccgtggccaggtgcctttttttaaaaatttttttgagacagtctcgctctgtcacccaggctggagtgcagtggcccaatctcggctcactgcaagctccacctcctgggttcacgccattctcctgcctcagcctcccgagtagctgggattacaggcgtgtgccaccatgccccatctctactaaaaatacagccagggatggtggcacatgcttgtaatcccagctactcaggaggctgaggtagtagagtcgcctgaacctgggaggcagaggttgcaatgagccaagattgtgccactgaactctagcctgggtaacagagtgagactccatctcacaaaaaaaaaaaaaaaaaaaaaaaaaaaaaaagatatatgtagctaaatgctcattgctgctttatttataataataaatgatgaatgttatcccaatgtccacaggtagttactaattaaatgctggcatatttggacagtggaatattctgctggttaaaaattaaccagtaaagggtcgggcacggtggttcacacctgtaatcctagcactttggtaggccaaggcgggcggattgcccgagttcagaagttcaagaccagcctcggcaacatggtaaaactctctctctactaaaaatataaaaattagtcgggcatggtggcacatgcctgtagtcccagctacttgggaggctgaggcacgagaatcgcttgaacctgggaggtggaggtggcagttagccgagactgagtcaccacactccagcctgggtgacggagtgagattcctgtcttaaaaaaaaaaaaggctgggtgcagtggctcacacctgtaatcccagcactttgggaggccgaggcaggcggatcacgaggtcaggagttcaagaccagcctggccgacatggtgaaaccccatctctactaaaaatacaaaaattagctgggcatggtggtgcgtgcctgtaatcccagctactagggaggctgaggcaggagaatcgcttgaacccaggaggcggaggttgcagtgagccacgactgcgccactgcactccagcctggcgacagagcaagactccatctcaaaaacaaaacaaaacaaaacaaaaagacaacaacaaaaaaaaacccaagtaaagtaaaaaattaaagtagtggttaaaaaattaaagtagggccatgtgcattgccatagaaaaaagtgaaaaaggttatgtagtataaacttgttttcatttaaaattatatacacatatgtgaatatatacttagaaaaataaaaataaaaggtcaggcgcggtggctcatgtctgtaatcccagcactttgggaggccaaggtgggcagatcacgaggtcagaagatcgagaccatcctggctaacacggtgaaacctcgtctctactaaatatacaaaaaattagccaggcatggtggcacacgcctgtagtcccagctattcgggaggctgaggccaggagaatctcttgaacttgggaggtggaggttgcagtgagccaagatcgtgccactgcactccagcctgggcaatggagcgagactccacctcaaaaaaaaaaaaatacaccaaagtcttaattatcgggggaagtaggattataagagatttcactttctacagaaattgttaatattcatattactgttgtcagcattgttgtcataaagcaattaaaagtgcctaacacatagaagctactatataaatattacattatactaaaatagttttgggaatatttttgcgttgttttttggcaatgagcatgaattatttttataagcaggaaaaaataaatacatgaggtggtgaaaatgcaggtagtatttgatcattttaaatgtaatgaagggttaaaaatgagagctagaggatgccaaagggtcctccatgcatacttgaaaggacctagttgaaagcggaaggttgataatgataaagccccaggcagaagagaatgggaaactctaatgataacatgaactgatatttaatgaatgtttaccctgggccaggtgttccaattgcttttgagcccacaggaaggaaaggttaatcttttcctttgagattagaaccaagaaattattttatttatttatttatttattttttaggtggagtcttgctcttgtcgcccaggctggagtacagtggcctgatctcagctaacagcaacctctgcctcccgggttcaagtgattctcctgcctcagcctcctgagtagctgggattacaggcgcccacaagcacgcctgactaatttttgtatttttagtagagacgaggtttcaccatgctggccaggctggttttgaactcctgacctcaaatgatccgcccgcctcagtctcccaaagtgctggtattacaggcatgagccatcgcgcccagcccagagcaaagattcttaacctcagtttcctgaaattatatcctaaatttgttgggtaagtgcattttttaaagtacaagagaaggcccataagttacatcagattttaaaaagggtgtttgagcccccctcttccaaagatagaagaatcaaggaagaaagggtaaaacatacatacatatatatatatatatatatatatatatatatatatatatatatttttttttttttttttttttttttttttttgagacggattctcacactctgttgcccaggctggagcgtagtcgtgcagtcttggcctactgcaacctctgcctcctgggctcaagtgatcttcccgcctcagcctcccaagcagcttgagagaacagacatgtgctacctcgcccggctaatttttgtatttttagtagagacggagttttactacattgagcaggctggtctcgaactcctgacctcaagtgatccgcccacctcggcctcccaaagtgctgggcgtgagccaccgcgcccggccgaaagattggttttaaaaacgagtattttgagatgatgagaaaacgagagggtttctgccagttgtcctttctcccagtgaaacaggattagagattctctttaatgacagtaaaatttggtgattgtgacatttccaagttctgttgattgattcatcatcttccctccatcatacacgtctaagggcagagtgaacttccatcctgaaggctccgcgcttagttttcgcagattaatagctcaccaagaatttatcatcttttctttccactaactcgaaaccaatctaaattctttccaaacatcttctcaacgtagtctcctttgatgaaatttactgtttcggattctagacttggctcttaccaacttaactttcggttaatagcttaatacctctgattcaggtttttgcatttgtcaactaccattgaatgataatttcaatgagttcgttcttatgaggatcaaatgaaataacatctgtgaaaacctcttacaaagtttaagcaaatagtgctaagcaatcaccaagcgttaactactaattttcagtgttaggtaaattttaaaagctttccggagaattggcgtcctgcacaccagtctcgttccaaaataatgcaggcgggggctggggtgggggcgctcctctcggactgaggctatgtctttcgctccttttgtcttttccaggcattagaactgtcatggcgccttcaagaagaggtaggaggccctctctgcgtccagcagaaccatctggggcacctggaccgggcggtggggtggacagagagacgagccccagctgggaccgaaaacatcgacccctccgagaggtctcggccggaccggcgcaaggggaggagagcgggtggaagcccaccccagcgaacgcccgagggccgggccccgcccacccagaacgtcacccaatggaaacctgccggcggtgcggcaccgcccatcgttggtccgggcgccgcgagggcggggcccgcagttcggttgcgctgcggagcgcagctgtgagggagtcgctgtgatccggggccccggaacccgagctggagctgaagcgcaggctgcggggcgcggagtcgggaggtgagcgcccagggaaaagagggcccgggagggaggggttcgcgagaggacggaaggatcggcctccgaggcccgggacggtgggacccgccagtcgggtgctgaaggcggccctgctcactcagtagcccaggcccgatcgggccctgcctgctggagccgaggggccgcttcggccccgcagtcgctgcttagccctccctggcgtctctggcttggcggcggcgccccgggattctgcgggcgcgggtcgggaggccctggcgttcgcttggaactccggctgcgagaggcggggcccggcgggtgggggcgggggcgggggcggcggtcgcggcccggcggcctgcggaagctcggcggcctggcctggcctgctcgcggggaggtgcgcagactgcgcgggggcgtggcctgcgcccctgactgcgctgtcggtccggcctttgatgaggtggccgccgctggctccctgggccccagcctggttcccgcgcgggccgcggctgccttccagacgcagggcatgcgacctgttggagtgtgaaattctaggggccgggttcctccccagagcggttttatttccgactggactgtgctgcgggtctcagaggccctctggtccgttcagggtgaggacagctgagaggcctgggcccgtgagctcttgcagaggagttgacacgcagaggggctgctgtccaataaacgaaagtgtcggggaaaaactttgcagggcgatctgcattactccaaagtgaacacactgcatgtctcagggtggctggaggcggcgagaatccccttatgggagtatatgagcttttccatgtgttatctctttaaaacctctcagcggctccgagacaaaactcccagtgtcgcagaggtttcttcatcaataggagtagtgctggagaatcttg

SEQ ID NO: 8813 - DNA, 6000 bp, Homo sapiens
gactgttggagttcatggttaccaaggtagctagagcttgagtggcgaagacagtcacagagaagtgagcctataagtctgaatcatgtttcccttaagagttgtcacagcttagtaagcaacacaaaccaataagcaggaaagttgagcagaaagtggctgctaacaaactaagctcagcagagttttcagcagtttcatggtgctagagatagaggcgtcctggtaaacaccctaggttgaacaactgcatcctagcagtaagagtgaaccaggagtagactaggtcttaataagattgaaaacaagcttcaagttagcttgatctctgattttattagctcccgctgccaaccagaaagtaaagaaactcttcagttgaagataaatttcacatcctttatggtttttaatgatacagtgtttgacattgagtccccagattccagacatgccaagaaccagaacaagagaaaaaacagatgcaaaaatagacacagatgatcaggtgtggacgtcagtaaaaaatgttgtgccacttctttcatttctcctttgtttctgatgagatgtctgctgtcatttgaattattttctcttataggtaaattatcatttctctcttactgtttttattacactttctgtgtctttagctttcagaagtttaactatgatatgctttaatgtggattgctttgggtttatcctgtttatggttcactcggcttcttgaatctgtaaatttatgtgttttgccaaacatggaaaattgtctggtttttttcttagagcactttttcagcccagcccactttcttctctccttgttggattccatggcagaaggtagatcttttgttagagcttgatcttttgttagcgttagatcttttgttaggtcttgaggctctaattatttgttttcaggctattttttctctgttgtttagactggatagtatctattgttctatattttggttcagtgattctttcctctgtcccttccattctactgttgcatccatccattacatcttttgttttacctatttttcagttctgaaatttccatttggttcttctttatatcttttctttctttgcagtatgttctttatatcttgctttgtttttgagactctcagttattttgttgtttcaagtatgtctgtaatggctccttgagtcatttttgtgacagctgcttaaacatgtttttcagataattttaacacctccatcatcttggtattggcatctgtggattgccttttttcattctgtttgagatattcctggatcttggtatgatgagtgatttttatttgatacctggacatttttagtattacatgctgacactctgggtcttatttaaatgttctgatttagttggctttctctggccctgcccccgcatgagaaggagggaagcctcattactttcctgtggggatacaagtccaggttctctactttgcctctcttgacactcaatttagggagagattctttgttactgctggtcatggatgggagttcttgcccacattgatttctccctggctgggaggggcaggaatgtgtcattatggttccccacatatcctccacagggtgatagtctctttactgtgtgatggtgaaaggcctgactctgctaggcttctccaaaaacagcctgtggcagaaagagagaagggtaccttgttactactaggtgaaggtccaagctctccatgtggtcttcactgacactgtggaaaaggaggtctcattatcacgtggcagggactggctccctactggccttctctgacatcaccattgtggggagaattgagtgccttattacagccggaggagagcagacatctaggctccctacttcacctttgctggtgggagtgggagctacaggcacagagttgttttttacttctgtttttgtgtttttggtgatgtttggctaggtataatgtgctctgtctggattgtctctttccttattctttgcctggagagaacaggattttgttttgtttggctggttggttttggggggagtctgggcctatgggttttttcgggctgccagcttcttcagctccaaggtgataacatgtaacagaaacagaaaactacaggccaatattcctgataaacacagatgcaaaaatcctcaatgaaatactagcaaactgaatccaacagcacatcaaaaagatcacacaccatgcctaagtgggatttatcctaggaatggttcaacatatgcaaatcaataaaagtgattcatcatatcaacagaatgaagtacaaaatcatatgatcacccaaaagatgtagaaaaaatcatttgataaaatttaacatcccttcatgctaaatctctcaacaaattagacatagaaggaatatatctcaatacagttaaaggccatatatgacaaacccacagctaacattatactgaatggggaaaagttgaaagtttttcctttaaggaaaggaataaggcaaggatgcccactttcatcactcttattcaacatagtactggaagtcttagccagagcaaataggcaagagaaggaaatagaaggcatctacattggaaaagaggaagtcaaattgtctctgtttgcagatgacatgatcttatatatagaaaaacctagaaactccactttttttaatcagttttaaaattgataaacgaattcagtaaagttgtaggatacaaaatcaacatacaaaaatcagtagcatttctatatatcagtaatgaactagcctggaaaagaaagcaattctatttacaataaccacaaaaaaaccccacctaggaataaatttaaccaaggaggtgaaatatctctacaataaaaactacaaaacactgatgaaataaattgaagaggtcctacaaaaaatggaaacatatttcatgttcatggatcaacaaagagctaatattgtcaaaatgaccatactacccaaagcaatgtacagattcaacacaagccctatcaaaataccaatgacattcttcacaaagatagaaaaaaagatcctaaaatttgtatgaaaccacagacgaccccaaataggcaaagaattcctgaggggtgggagaggaccttggaggcatcacattatctgacttcaaaatatactgcaaagcagtagtaacccaaacagcatgcactggcataaaaacagacacatagaccaatggagcagaagagaacccagaaataaatctacatatttatagccaactgatttttaacagaggcaccaagaacatacattcgggaaaagacaagcctcttcaataaatggggctgggaaaactggatatgcagaagaatgaaactagaccctcatctctcatcgtatacaaaaatcaactccaaatggtttaagacttaaatgtaaaatctgaaatgcttcaggatatttatctgggcaaagatttcctggctaagacttcaaatgcacaggtgcaacaaaagcaacaatagacaaatggtattatatcaagctaaaaaacctcacagcagagaaaacaatcaacagggtaaagagacgacctgaagaatgggagaaaatatttgcaaactattcttctgataagagattaatatcaaaaataagtaagaaactcaacagcaaaaagccaataattcagttaataaataggctaatgatctgactagacatttctcaaaaggaatatgcaaaaggccaacaaatatatggaaaaaatattaaacttcagtaatcattagggaaatgaaaatcaaaaccataatgaggattatttcacctcagaatggctattatcaacaagacaaaaaataaatgctggcaaggatgtggaggaaagggcactcatacactatttgtaggaatataaattagaaccaccattatgcaaaccagtgtggatactcctcaaaactaaaaatataactgccatgtgtttcagcaatcccactactaggtatttacccaacataaaggataacagtatgtcgaagagatatctatattcccatatttattgcagcatatcacagtaaccaagatacggaatcaacctaaatatctatcaacagatgaatggataaagaaaatatgatatatatacagaatggaatactattcagccataaagaagaatgaaatcctgtcatttggagcaatgtggatgaacctggaggactgtatattaagttaaataagtcagacacagaaagacaaatatagcacattttcactcatattgtgggagctaaaaaaatttgagcacgtataagtagagagataattgtggttaataaaggcaggaaggataatcgggaggcaggtattgggagaggttggataacagatacaaaattataggttagataagaataagttctggtgttctgtagcaatgtagggtgactatcattaacaagaatttagtttgtatctttaaatatctagaagagaggattttgaatgttcctaacacaaagatgatgaatgtttaaggtgattgatatgccattaccctgatttgattattaaacattctatatatgtattgaaatatcaccgtaccccataaatatagttactaaatgtcaattttttaaaaagctattatttttcaaatgataaaaaagaagtattttgtagaatgttaattatctatattccattttattaaaatatatacaattttgtttttgtttgcttcaagagaaatgtcccagtgtagtttatatattaattatgcatatcttaatgaattcagaatagtactttaaatatattaagtttatttactgctccccccacccattttccaaagtagactgcattaatttcatgtgattgatccaagtagatccaattgattgacttactgttttcctaatttcaggttccagttacagctatatcagagaatgagttaatctcctcagaaatcactaaatactactctgaggggcttagaaattaacagggtaagttgaatatcatcttaaatactatctggatttttatagtgaattcctaatttgggcctatagtgtgtcaggcaacagttgggcactgggaagaaaattccttctcttattttccatgcctgtagtggttttcagttttcttttggatcagggcccctttgagagtctgcttaaagctgtgtagatcttttcacaaacattcacacatgttcagtcagagtttgaagatcttcgaaaacttcctaaagttcacagaccattgggcaaccctgtgctttgcagtatttcagacgtttttacaggctttgtttctcttttaaatattacaactctatgaattagtgactgatattgatattttacattgaagaaaccggtgttcaaaatggtatgtgacttttcctgtaatgcagctgtcaaatgtgaggctagaattgaagactttcccaaattttaataatactgttggctttttttaaggttctttcttcttaatatgtcaaattgctccttagtaagattgtgtcagcctttcctcattgtcagcaagtgagcatgcctgcttcaccacattatcccattgggtgttcccccaccctagtgtttgctaaattggcatgtagataattgcatttcattttaatttgtttctttgttgtatttagagttctctatccacttatccattggagtcttaccaatttttgtagcattatatatgaattttgaatatattaagaatatttgtcatgttttgtgcaaatacatttaccctttctgtttgcctttttactttgtgattttttttatgtatagaagttttgaaatgtttaagtattcagatctactttttcctctacattttttctctttttttagtgtagaaatttccaaatgcttcatacatctcaatgaatgcagacacattcacagattttttttttaacataatggcaatcta

SEQ ID NO: 8814 - DNA, 6000 bp, Homo sapiens
ggcaaagtacctgaatagacatttctcaaaagaagatatacaaatggctaacgggtatatgaaaaaagtactctaataatcagggaaatgcaaatcaaaatcacagtaagatatcacctcacacctgttagaatggctgttataaaaaaagacaaaatataacaagtattggtgaggatgtggggaaaagagaaaagagaacccttctcgtacactattggtgggaatgtaaattggtactaccattagggacaacagtatggagaatcctcaaaaataaataaataaaaaatttaaaaggctaagaacatcttaaatttgaatagatattgccaagttgcttttcaaaaatataccacccagagtatgttagggttcctcttcccctgcatccttaccaacactgagtaataccaatatttgtttatttatttatttatttatttatttatttattttgagacagactcttgctctgtcacccaggctggagggcaatggtgcgatctcagctcactgcaacctccgcctcccaggttcactgggtttaagtgattctcctgcctcagcctcccgagtagctggtactacaggcgtgtgccaccacacccaggtaatttttgtatttttagtagagacagggtttcactgtgttagccaggatggtctcaatctcctgacctcgtgatctgcctgcctcggcctcccaaagtgctgggattacagtcatgagtcaccatgcctggcccaagtaacatcaatctttttaattttgatgatacattaattaaaaaaagatatcctgttttaatttgcacttatttaattataggtgaagctaaacatcttttcctatgtttattgcccagttgtatttcctcttcaatttcttgcctattcaagtttttttgtttatttctttactgagttgatcattttttttctttctggcttgtaagggctctttgtacatcagaaaaattctattgtcttcccaatctcctacaatgttaatttcatcctctcgctactggaattttactctcaatttattataagtttctactgcaaagctcttttttattcttaattctccatgatcacttcagcattcgggattactgaacagctctttcttaaaattttctactcacttccttttcataatactgatttatttcatttctctctgtttcttaaattaagaaaaattatcttaatttttctcctctatctttactttctattcctcttcctattaacgtacccaaagttatatccattgttctctctataccagagtttcttgctctgttacagaggctggagtgtagtggcacaatcacggctcaccacaaccttgacctcctaggctaaagcgatcctcctgcctcaacctactaagtagctggaactataggggcatgccaccatgcctggctaattacaaaaaaaaattcttttttttttttttttgagacggtctcactctgtcacccaggctggagtgcagtggcgcaatctcagctcaccgcaacctccacctccagggttgacgccattctcctgcctcagcctcctgagtagctgggactacaggtgcccgccaccacgcccagctaatttttttggttttagtagagacaggttttcactgtattagccaggatggtctcgatctcctgatctcgtgatctttccgcctcggcctcccaaagtgctgggattacaggtgtgagccaccgcacccggccaaaaaaattcttttatagagacagggtcgcactatgttgcccgggctggtctcaaactcctgggttcaagtgatcattccaccttggcctcccaaagtactgggattacaggcatgaaccaccgtggccaggtgcctttttttaaaaatttttttgagacagtctcgctctgtcacccaggctggagtgcagtggcccaatctcggctcactgcaagctccacctcctgggttcacgccattctcctgcctcagcctcccgagtagctgggattacaggcgtgtgccaccatgccccatctctactaaaaatacagccagggatggtggcacatgcttgtaatcccagctactcaggaggctgaggtagtagagtcgcctgaacctgggaggcagaggttgcaatgagccaagattgtgccactgaactctagcctgggtaacagagtgagactccatctcacaaaaaaaaaaaaaaaaaaaaaaaaaaaaaaagatatatgtagctaaatgctcattgctgctttatttataataataaatgatgaatgttatcccaatgtccacaggtagttactaattaaatgctggcatatttggacagtggaatattctgctggttaaaaattaaccagtaaagggtcgggcacggtggttcacacctgtaatcctagcactttggtaggccaaggcgggcggattgcccgagttcagaagttcaagaccagcctcggcaacatggtaaaactctctctctactaaaaatataaaaattagtcgggcatggtggcacatgcctgtagtcccagctacttgggaggctgaggcacgagaatcgcttgaacctgggaggtggaggtggcagttagccgagactgagtcaccacactccagcctgggtgacggagtgagattcctgtcttaaaaaaaaaaaaggctgggtgcagtggctcacacctgtaatcccagcactttgggaggccgaggcaggcggatcacgaggtcaggagttcaagaccagcctggccgacatggtgaaaccccatctctactaaaaatacaaaaattagctgggcatggtggtgcgtgcctgtaatcccagctactagggaggctgaggcaggagaatcgcttgaacccaggaggcggaggttgcagtgagccacgactgcgccactgcactccagcctggcgacagagcaagactccatctcaaaaacaaaacaaaacaaaacaaaaagacaacaacaaaaaaaaacccaagtaaagtaaaaaattaaagtagtggttaaaaaattaaagtagggccatgtgcattgccatagaaaaaagtgaaaaaggttatgtagtataaacttgttttcatttaaaattatatacacatatgtgaatatatacttagaaaaataaaaataaaaggtcaggcgcggtggctcatgtctgtaatcccagcactttgggaggccaaggtgggcagatcacgaggtcagaagatcgagaccatcctggctaacacggtgaaacctcgtctctactaaatatacaaaaaattagccaggcatggtggcacacgcctgtagtcccagctattcgggaggctgaggccaggagaatctcttgaacttgggaggtggaggttgcagtgagccaagatcgtgccactgcactccagcctgggcaatggagcgagactccacctcaaaaaaaaaaaaatacaccaaagtcttaattatcgggggaagtaggattataagagatttcactttctacagaaattgttaatattcatattactgttgtcagcattgttgtcataaagcaattaaaagtgcctaacacatagaagctactatataaatattacattatactaaaatagttttgggaatatttttgcgttgttttttggcaatgagcatgaattatttttataagcaggaaaaaataaatacatgaggtggtgaaaatgcaggtagtatttgatcattttaaatgtaatgaagggttaaaaatgagagctagaggatgccaaagggtcctccatgcatacttgaaaggacctagttgaaagcggaaggttgataatgataaagccccaggcagaagagaatgggaaactctaatgataacatgaactgatatttaatgaatgtttaccctgggccaggtgttccaattgcttttgagcccacaggaaggaaaggttaatcttttcctttgagattagaaccaagaaattattttatttatttatttatttattttttaggtggagtcttgctcttgtcgcccaggctggagtacagtggcctgatctcagctaacagcaacctctgcctcccgggttcaagtgattctcctgcctcagcctcctgagtagctgggattacaggcgcccacaagcacgcctgactaatttttgtatttttagtagagacgaggtttcaccatgctggccaggctggttttgaactcctgacctcaaatgatccgcccgcctcagtctcccaaagtgctggtattacaggcatgagccatcgcgcccagcccagagcaaagattcttaacctcagtttcctgaaattatatcctaaatttgttgggtaagtgcattttttaaagtacaagagaaggcccataagttacatcagattttaaaaagggtgtttgagcccccctcttccaaagatagaagaatcaaggaagaaagggtaaaacatacatacatatatatatatatatatatatatatatatatatatatatatatttttttttttttttttttttttttttttttgagacggattctcacactctgttgcccaggctggagcgtagtcgtgcagtcttggcctactgcaacctctgcctcctgggctcaagtgatcttcccgcctcagcctcccaagcagcttgagagaacagacatgtgctacctcgcccggctaatttttgtatttttagtagagacggagttttactacattgagcaggctggtctcgaactcctgacctcaagtgatccgcccacctcggcctcccaaagtgctgggcgtgagccaccgcgcccggccgaaagattggttttaaaaacgagtattttgagatgatgagaaaacgagagggtttctgccagttgtcctttctcccagtgaaacaggattagagattctctttaatgacagtaaaatttggtgattgtgacatttccaagttctgttgattgattcatcatcttccctccatcatacacgtctaagggcagagtgaacttccatcctgaaggctccgcgcttagttttcgcagattaatagctcaccaagaatttatcatcttttctttccactaactcgaaaccaatctaaattctttccaaacatcttctcaacgtagtctcctttgatgaaatttactgtttcggattctagacttggctcttaccaacttaactttcggttaatagcttaatacctctgattcaggtttttgcatttgtcaactaccattgaatgataatttcaatgagttcgttcttatgaggatcaaatgaaataacatctgtgaaaacctcttacaaagtttaagcaaatagtgctaagcaatcaccaagcgttaactactaattttcagtgttaggtaaattttaaaagctttccggagaattggcgtcctgcacaccagtctcgttccaaaataatgcaggcgggggctggggtgggggcgctcctctcggactgaggctatgtctttcgctccttttgtcttttccaggcattagaactgtcatggcgccttcaagaagaggtaggaggccctctctgcgtccagcagaaccatctggggcacctggaccgggcggtggggtggacagagagacgagccccagctgggaccgaaaacatcgacccctccgagaggtctcggccggaccggcgcaaggggaggagagcgggtggaagcccaccccagcgaacgcccgagggccgggccccgcccacccagaacgtcacccaatggaaacctgccggcggtgcggcaccgcccatcgttggtccgggcgccgcgagggcggggcccgcagttcggttgcgctgcggagcgcagctgtgagggagtcgctgtgatccggggccccggaacccgagctggagctgaagcgcaggctgcggggcgcggagtcgggaggtgagcgcccagggaaaagagggcccgggagggaggggttcgcgagaggacggaagga

SEQ ID NO: 8815 - DNA, 6000 bp, Homo sapiens
cttttccgttaatatcttttccaggttttagtattagggttttgtttgcctaataaaacacattgggaaatatcctctcctattttcctgaaagtgtgtaagattgctattattacttccttaaatgttggatacaacttacctgtgatgccatctggacctggagttttgttttgtttttaattacaaatttatttaatacatacagtctgtttctttctgtggttattttaataaataaaataaaaaaattaattttttgagatttttcatgttatctcagttactgaattgatttttattacgttgttcagaacactatatttgtatgatctgtggtgacatccctcatatttctagtattagtaatttgtgtttttaactttttcttgatcaatcttgctaaagttttatcaattttttacctttcaaaataaaacaacttttagctttagtttttttcagttgtccatatttattccattgattagaatattaaatgtattatttttagtttatacctatgattttaaactttttaaaaatatataagcagagtataggctgagcgtggtggctcatgcctataatcccagcactttgggaggccgaggcaggtggatcacgaggtcaggagttcaagaccagcctgaccaacataatgaaaccccatctctactaaaaatacaaaaaattagctgggcatggtggtgggcatctgtaatctcagctactcaggaggctgaagcaggagaatctcttgaacctgggaggcggaggttgcagtgagcagagatcgtgctattgcactccagcccgggcgacagtgcgagactctgtctcaaaaaaaaaaaaaaaagtatgtgtgtgtgtatatatatatatatatatatatatatatatatatatatatatatatatatatattcagagtataaacgcaacttcagagtcattcaacagattttgatgtcttatgtttactttattgcagtttcacttattttctaatttccattgcattttcttctttcactgtaggtcattaacaggtatgttgtcaaatttctacctatttaagacttttctggatatgttaatggtttctaacttaattccatagtagtgagagaacataccctttaagatttcaatctttagaaacgtgttatataaaaaatggttcaccatttgtttcatgttgagtaatattttcatgtgcacttgaaaataaatgtacatttgccagttgttggatgtactgttctacgagtgttcatttaggacaagctagtcatcactcttcttcaaatcttctgtttccttactggtttttaaaaatctagttgttttatctattattgagagaggaatgttaaaatcttcaatgatatgtacagatttttctatttctcttttaagttctgtttatgcttcatttattttgaagctctgttattatttgcataacttatgattctggccgggcatggtggctcacatctatcatcctagcactttgggaggccacaggaggaggatcacttaagcctgggagctcaagaccagcctgggcaagaccccatctctaaaacaattaaaaatttctttaaaattctgattctgtcttcctgatgcattggctttcttaagaaacttccctttttatgtttagttacattcctagtcctgaagtctactttcgctgatatttatattgctttcttatgtttgctgttcgtgtaatatattcttttccattttttaaactttcagtctatttgtatgtttatatttaaactatacctcttattgacagcatatagtgtgggtttgctttttccctagtttccatcttttaattgtaatgtttagttattttatatttaatgtaattaatgtggttgggtttaagataccatttgctccttgttcttcttttcctactttcttgccttctttcgggttaaccaaacattttttagtagagtgctaacaattcctgttaactttttagctatactttcttatattttcaaattcctttataaccttttgaacactactcttttataatttttaagtggatgctctaggaattaaaatatatatccttaatttataaatttatttgtagttaacattgtaatactttatgtaaaatttaagagccttgcaacagtgtaattgcatttatacctttgtgctattattgtaatataattaacatttaatatattataaactccacaatattttatatattttaatatatttttgtataatcacttatcttttaaagaaaatacatacttcttttaaagaataaaaagaataaatacatcttttaaataataaaaaatacatagtccgttttatttaccctcatatttatgatttctgatgcttttgcttctgttttgtagatctgactttatctagcatcatctccctttagcctgaaaaagttcctttagtatttcttatatattaatcttaaaacagattatgtttggttatatgaaagtgtttttaattttgccttcagttttttgaaggatatttttgctggatgtagaattgtgggttgatagggctccccaccccccttcagcattttaatggaagaaattattccattatcttcttgcctctgttgttaccaatgagaaaccagttaccatttatatctttgtttccttgtatgtgacgtgctaccttgcccaagctagtttcaaaattttgtcttaatttttttttagcggtttgactggactttgccagagttggtttctctatatttattctgagtgggatttattgagacactggatctgacagtttatttttcaccaaattttgggaattttctatcattatttccccataatactatttctgccccagtgtctttcgcctctcatcaattacatgcttggtattgccagcagattacagagggcgtgtgtgtgtgtgtgtgtgtgtgtgtgtgtgcgcgcgtgcgtatgtgtgtgtgtatgtgttttccccagattatagtaggggtatgtgtggttgtgtggtttcttttctctttcttcttcagactgggtattattttcatttcaagttcactgacttgtttttctgctgtcacaaatctgttgttaagtctggccagtgaatcttagaatttgctattgaaggatctagctcttgaatttccatttatttctttctcagtttccatttgctgccagtatttctcatgtgtttacccattatatgtatataaatatatatatatatatattttttaaaatctttaaacatatttataatagctactttcacatctttgttaggtgtttccaacacctaaatcatcttgtggtgtgttactgttgactaccttttctcctgatctggagttacattttctaccttctttgcatgtttagtaattttttattgtgtactggatattgtggatgacattgtggattgttatctctttttgaagagtattgatttatcttctagtagacagctaaattactggctggtaaacatacacttaactatacaactcagcaattacagtcctgggcattgaaatgaaaacaaatgcttttacaaaagcctgtacagaaatattcatagcagcttttatttgtaatagccgaaaactaaacacaacccaaatgcactttaaaggacaaatggtgaaaaaaactgtggcacaactgtaccatggagcaataaaaaggaatgaactattgatacgtgcaccaaactggatggatctcaagggcattatgctgagtgaaaaaagccaacttgaaaagattccatgctatatgattcaatttatgtagtattctcaaagtgacaaaaattatagaaatagggaacagattgcagttgtcaagagttaaggaaaggggaaggtggatgtgattataaacagcatgaaacaattcagctgtggtgatgaagcagtgaatctcaattgtggtgtagttatatgtatctgtacatgtgctaaaatgtcatagaattgtaaaaaagacatacaaaaaatgagtgcatgcaaaaactggcaaaattcaagtaaggtctgtaatctagtctactcaatttccagctttcttttagctctgatctacattctttaatgcctcaagccaataagactgtggttttctcctttaaacctagcctctctgcacttaagtgggagtactgggaagagttccgagttcccttccaggagagtctcataagtgtgtatctcacccagtgtaattcctttctttcaatgatcagaacccctacaatttctgtctgccttggtcactttccaatttcttcaaacagttgttttttatattttgtccagagtttataactgttaactgtgggcaaattagttcgatataaggtagttcatcattactagaaccagagctcaactaacatctttttgaagttttacaaacataaaatgtttataaactttttcagttagaaatttgaagacaaaatattataggagtattacataagtaaataattatgtgataactgaaaacatgaaaaaaatcagaatttataagtaggaagaaggataaatatacaaatgcagccagaaacaacttttaaaagacatgtaaatgagtctttcagaagtttacagatagatgcaattatgtattacctaagcagcattctcaaataggagtatatacttaatcaccagaaaggacttaagctgtaaaatgagatctttattcattgtcttttggaaatatttttccatttcactctaaaagttgcatttttttttctttttctagcatatctgacctttattatttattggagaataaaatggcaatctaacgtcccttctgcttttatttttgtctttttattctagttgtttatataattggccttaaatgaggtgagagtgaagagactagagccatctctggaaaacatcattatcccattccccgggaagctaccctctggaactcaagatttgaccatatctgttttgaggattcattatgaacaaagaagtctcccaggtaggaattgtagttctatttttaaagagctttgtctctgcaaaagtatggaaggaacatgattacctgttgactgttatcttttatggaaatatgtgtttgatctgggttgcttcaaggttagtgtaaaacaggtgctcacattcctaagtgaaaatgataggaaagttctaggatacactttatgaagctattttagtgtatgtcgaaatcacttatgatgagaccctcaaagtccttactgaattgaaaatggcagcagaaactgtagtaaaccatctccagatttgcttcatatatttctaacatatatccagttaattttatacatatatgcataaaattacataatatatacctatataattataggtatacctgtataatatataggtaattgtaggtatacccatataatatatacctatgtaatttatgtgtatgtagtgtccatatgggcatttttacattgttgctgtttgagtttgtgagctagctgaatagaaccagtatatccgtgaacatactaatgggagcagtagaaaaataaacatgtaccaagccaagacagtagataaaagagttgaagagtgatcagaaactgataaatcagtaagggaaaacttccaggagaaaatttgttaattaatagacttgtaattgaattatacatagataaaaataaaaaattataagcatataactttttatttattatgtactgaacatatttgtgtaaacatcgcctgggttaagaagtagaacaataccaccaccccagaaatcctcttcatccatgtgtcccagctgcacgcccattcacttttaaaggaggcgacagttgtcactatggagagtgatacctgtcaacctagagtgtggggttttatagatcactgaagttaaaggcagtaaaatttag

SEQ ID NO: 8816 - DNA, 6000 bp, Homo sapiens
ggggaccagtgacacaaggacctaaggtctctctcttctcatcttggcacttcagaagtctccccaatcttgacaaagccctggagaaagggccgggcctcccgttgataagaatatcactgcagataaatggaggtttcaaattgaaagaaaggaggagggcctcctgttgataagattattgtcactgcaggtaaatggaggcttcaaatagaaatacatttcagttacagaaaaaaaaattatctttgttacacatttgagtttgcaggcctaaggttactcccgctacactatcatctgtaaccataacgcactcaacattttaagctaactataaggattgttgcttcactcaaagatcctgaggttttattcactaacatttttatttggtgactatagttgacaagaacaaagctgtggggaaccaacaaacactgcaatgcctggcattgtcacctcactagattgtgagttcctctgggacagggtccgtacattttcttagaatccctcacttagccattagcctgcacagtgcttgtacttagtaagtgctcagtaaatgtttgtggaatgaatgcatgatgaacaaaatatatactgaggactcttggtgttgattcttgttgataatgtaatagttaagatatgttataaatatgttataaatattgtatcaaaatattgtatcaaaaatatacttgaacaggctgggcgtggtggctcacacttgtaatcccagccctttaggaggctgaggtgggtggatcacttgaggtcaggagttcgagaccagactggccaacatggtaaaaccccatctccactaaaaaaaaacaaaagttaactgggcatggttgtgggtgactgtaatcccagctactcaggaggctgaggcaggagaatcgcttgaacccgggaggtagaggttgcagtgaaccaagatcgcaccactgcactctaggggacagagcaagacgcctcaaaaaaaaaaatgtatatatatagtatatacatacacatgagcataaaggagcttcaatgtgaaggtaataatttaagcaacatttcacattttggacctgtgttgttagctatttagaacagttaaactactagcttgcttttaaatccattgtcttagtcatttcaagttgttataacaaaataccatacactgagtagtttataaacaacagaatgcatttctctcaattctggaggctgggaagtccaagatcaaggtgctggcagattgtgtgtagtgaagatccattcatcagagatggcaccttctcgttgtgtcctcacatggtggatggggcaacaggctctcttaggcttcttttataagggcaataattcatgaagtttccacacttatgatagaattacctcctagaggccccacttccaaataccatcaccttgagggttaggtttcaacatacaaattttggaggtacacattcagatgatgacagcactcataggttacctttcatctttgggttctcagtgcctgctacaacagcacaagaacagtaagtgtgtgctgaatgaatacagatgaatgaacctttccccatcctcagatacttcccaactgagctccactatcaccaaacttctagagcacattattttttgccttatgatctcgttaggtgggtttttcttgcacataccacactaatccagtggtcctcaaaattgtgtgcccattagaatcctctggaggggttgtaaaaatagtttgctgggtcctaaccccagagtttctgatttaggaggtttgggatggggacaccaaaatttgcatttctaacaagtccagaggtgatgttgatactgctggctaccaactctaccttataaaccattgcccattaaactcttgagggtagagactgtcttcctcatttcagtatctgctgaagcctctggcatagtacctggcacataggagctgctaaagaagtagttgattgaacaatagttcaaaaaagtttattttactgaagctagattacaagtatatgaatgtgtgtgtatatgtgattaaatgagctattacatgtaaaagctcttaaaacatggcacatagtaagctgttgctttaaaaaaaataaaaaatgtaacctttctttgcttatattctaaaatgacaccaaccatcctacatgtgtgctcttaaatagcttatatattagaataatggaatcttagtactaaaggctggatgtggttgctcatgcctgtaatcccagcaccttgggaagccgaggtgggtggatcacttgaggtcaggagttcaagaccaacctgttcaatatggtaaaaccctgtctctactaaaaatacaaaaattagccctgcgtggtggtgcatgcctgtagtcgcagatacttaggaggctgaggcaggagaattgcttgaacctgggaggtagaggttgcagtgagctgagaagattgtaccactgcactccagcctgggcaaaagagactgtctaaaaaaaaaaaaaaaaagtaatctagttaatatttcaatattgagcatcaagaatttttaaaaattggttgagtgttttctacatgcagaaagatacagcagagagcatagacacaatccttgccctcccaagcgtatacccagcgagaaagtgagaagcacagagtatgtgtaagcataaaaatactaagttttgagagtagacagcaactatgaaaatattcagttatatcgatgcaactcagtcttcattaattgttctcatcggagcacatctttttcacattctgtaaagtaacgctcggtatgggcccaaggaatatttaataaatatttaaaaatgaagttaataattgttttgaaagccatatggttgatatttcttcttaaatgtaaccaatagaaacaacataaggaatttggcctgtgcatatatttgcacatttatggtacaggcatttacatggaggtgcctgtcatttgtgacacagacttctcatcaagtttcagaaggaacagatgtttctagatggaataatatggagcttgccattgtaagaatcctgtaataaatcctttcataaaataaatatatctgaattatctcttgttatacattttcactcctggatcatctaaagtagaacacaaagattgttcataaactattcattcaaaacaactttatataaaaagaattactgttgctgaattctggattcttattgttgctctttcttactagcatggggtttgggacaagtcacctttttaaatttttttatttatattttcctaagtgaattaacacaggaagtcattcacctttctttgcctcaaagaattaaatttattctttgacgctattaagtaaattaatagcgtctacttcattgctcagtcactagcagtttctgaagtcactgtctggcagtcagtagatatcacctctgtaactagtcttgtgcagctctctgtgatgtgatctggtagaggactaagatacaaaagcacaagggtgaattctaggaccacctgagccagtgattagttgatgacaagtcacatagtctctgtgagcctgggtaaaatgaagagactggatttgctcttgtaccttcccaatccctggctccactagctgttggccaccttagacttgaaggtccattcactgctgcttgcccttgaagctcaattgctggtcagagctttacactcctgggaagccagtcccctacctggaggctgagccggtgacactggttccactgggtcacagctgaagcaccactggggatggggcatttatgtggccatgagtcacactagggtaggggtagagggcaagtcacaggaagattgttgggttttttttttttttttttttttttggccagtttcttttctttctttttttatccctttgaaacagaagaccatggcgtacaatctggtatctgccttcagggttgggataatatctttgttttacaatactcagagtggctggaagaaagctgaggccacaggtcactagcaggttctaaagtctgaaaatccctgggaaaatttgactttttatatgctaataattgagtactgacaactctggagggagctttccaattcttccgtcatgaaagtggactttgtatactaaagaggggttcatggattcatggtaacctacaattcttccttgcggcctgaaccaaaggaatagcagctacagttgggttttcctaaaaggagtaagatagtcccaggcctcccttctcaaataagtgtatcaagcaggtggactctgccagtcgggggtcccggtcaatccctagggccctggggcgccatgggcctcgtgggagggctgcgcatcccaaccatgccttcgtctcctggtggggcaccggcggtacgtccgatcctccagcccgcgtggtcaggcggccgcgggcccaagcatttcccagggcccaagcatttcattcatttattcattcacgcagcaggtatttcccgggcgccctcctcctgtgtaggtgacagaaactgggtggcgagcgagccaggcaaagcccggcttccctgaagctccccgcagcggcgggggcggagaagagacctcagccccgcgggctcgcacagctggcgcggaccacgctctcgcccggggccggcggcctcagcgccccccgaatgaacaccttccgcccgctggccgccccgcgaggcgggccgtgtcgtggccccggtgcacggagggggacgccgaggcccggagcagggcccgtctcggcctgtgctcggagccaggcggcagggcccgcgggccggcgggcggcgcggagacggctgcgctcccgccctccgccagcgcctggcggccgccccacgtgacgggaagcggcggctgcggggtcgggccagcccaggagccgcgggccggagcggggcggcggggccccaggccgcggggcggcgcgggacggcgggcgccggcgccggtgagtgaggagggcggcggggcgcggggtgcggggctcagggcgcggggcgcgtggggcaggagggcggggagcaggagtggggggtaggcggcggggcggggtggagggcgagcccgtgcgtgtgcgctggggcaggtgtagtgggggctggaacgcggggtggggggagcaagtggctatacacttgggggcaggtgtgcgggtgtgcgacttggtagctgtcccttgtgggggccggctagcctgctggggtgagcaaataagtgttcacgtgtgtgtgggatgaagtgtgcacgggtgtggggtcaagtgtgtatgttgtgtgtgaggagtgcgtgtgtgtttagggcaagggaagacctgagagacctcgtccttgatttgggttttccggggagaagggccaggaaggacttgcacctccatccctggtatggaatggttttggcgctgtgattgaggtttctgggagctctttggatttgagagctcaaattcgggtcacactcaggcctgaattgtcctgatctggagagtaggcaggggtgtgttggggagtagggaaaagtgctgtgctgggcttcctggcccctgtttttagcaccaggtcaagggctggaagctgtcatccctgtggaattgttttctttccattgccttctggaggtgcaggtgcaagttagtccgcctgcctccctgtgttaagtgttgatatccttaaacacggaagctgtccggttgtctgcacctgccgtggcttctacccaaggactgttgagtgaccctcaggaagcctcctacctggctgctaaaaatgggggctcacagatcacacagcaggccttactgcacgtggactgcacgcgcagctgtggtcaaaacatgtctgagcagagtttaatcactgatgaagtgctcatgggcaagcaccttgtctatcaggaaggaaggcagctgcgggtgtgattgt

SEQ ID NO: 8817 - DNA, 6000 bp, Homo sapiens
gagcacacgcctagaagccctgcctttctttggcctctcccagagaatgaaatttcagcatttgtacagctcagacccactggctgaaacttctacctcctggctcaaacttctacctcctgcttccctgagtgaagtaactgacagaggaagtaatacttccaactggattttagagttcctgagtctagtctatgtttagtctatctctatttccctgtccctcccccacgccctaaactgacatttcgtaggtttctggtaaattaccgagtccagagttggaagccctaagtggtatttattttacttcaaatcacctttagtcatcagaatcacctggagggcgtgttaaagcaggagctggcctgagaatgtgcacttctaacaggtttgcaggggatcctgctgcactctgggacaaggctttgagacctgctagccgcaggaagtcttttcctctctttcctcccttcctagctgtgcctctccctgaagcccacctacaggagagacgggaaaacgttatgggcagtgttgtctcaagaaggaatgtcaggataattggaataaacaaaagaagaacttgaataactgatcacagtcaccgttgatcctttccccaggaaatagtactttttgtttttattttcttccatgaactagccttttatccatagcagagaggttttctctcaagaagaaacaggatctgaacaggatctgaaccttaattcttcttctggtgggagttcagtccatttccttcttattctggattaatttcccctttgccattgaataaaacagaggactttacaaagggcctacttcatgccaagtaatgtgttaatagttctaagtggtttatgtgcatctcaaaagaccttcgccacaatttcacagactatatgttattagcccattttacaaactagcaaactgagggttagggaagttttgtagttactggagatcatagtagtcatagatagaacagagattcaaatcctggcttgacttcaaagatcaagctatgctgccatagacagcattacgctttctatagtgaaagacttgtcacaaacaattctgtgatctgtcacttattcaatacacatatttattaagcacatactatgtgccatgctctataattaattaggtcctaggaatataatgatgtacaagatggatggaacttttcaaaacatattttcttagattgtctcatgaaaatttgtttttaatactttgtccttcgatggaattgctcatgaaagcatatgtcattaaacccagaaattgcattcccctcctcaatttcttgccatcctcctttgacttactattaatatcagtttaacaaatttgtttcctattttccttaaaggagtctgttgcttttatttttaaaatatatttagtttttgggccaggcatggtcgcccacgcctgtaatttcagcactttgggaggccaagtgggtggatcacaagatcaggagatcaagaccatcctggctaacatgatgaaacctcgtgtctactaaaattataaaaaattagccgggtatggtggcacatgcctgtagtcccagctactcaggaggctgaggcaggagaatcgcttgcacctgggaggcagaggtttcagtgagccaagacagtgccactgtactccagcatgggcaacagagcaagactccatctcaaatacatatatatatacacacacacacatatatatatacacacatatatatacatatatacacatatatatacatatatacatacagatacatatatacatatacatacatgtgtatatgtgtgtatatgtgtatatgtatatatgtatatatacgtgtatatatacacgtatatatacacatatatacatgtatatgtacatacatacgtatatatacgtatatatatattcgtgtatatatacgtatatatgtatatattcgtgtatatatatatttagtttttgaatgagtacattaacatagctcaaaatttacaagaaataaaaatgtgtacagtaaaaattaatctcctttccaccccatgacccctagccactcagatctccccagaagcaaccgcttataaatatacattgtcttcccccgtcctttctttgctcatgaacacaaatggttggtttctacctacaaagtgttctctacttttatttttctcagttgatttatcttggagatcatgccaaatcagtaaatatagttacctcgttcattttaacagccgcatatgtaaataattctaaaatgcaccatactgtatttaactaagcccttgttgacgaacacataacatggcccagtatttttctattacaaacaattctacaatgactactcttgtgtgtctatcgttttacacaggagcaagtatatctacaagataatttcctataaagggaaatgctgggtaaagagaaaatggtatgttcatctgtaatttaaaaatgttttcattatggaatttttcaagcattacaaaaggagacagactagtaagatgaactgctgcatatccatcatcaagcttcagcgattatccacaatccatggctgatagtatttcgtatatatataggccctatccatttccccaccccaaattattttgaaacaactccaggcataatgttatttcactaggaaatattttggcactgttcttgaaaagcaaggacttaagaaaagaaaaatatatgtgtgtgtgtaatcacattatcacccctaacataaattgttcattaatactagaaaatatcctgtcagtgtcatattttccaaggttgtctcataaaaattgattttctactagtttattctttgattagaatccaataagatccaaaaaaaaaaaaaaaaaagaatccaataagatccatacatggcagttggctaagtctttttttaatctcttggttctgtctccatctctcttgtttttctttgtgcatcgttgttgtagaaactgggtatgtttgtttccagagtccggattttactgaccctatcgaatgaccacagggtcatttaaaatgttctgctacccattaggtcaaaaattaaacacaaaattaaattgcagaatttcttaataataaaacacaacatagctgaacctatgtgacacagctaaagcagttattagaagaaaaataacagaactaaataactctatcagtaaaaaagcaaagctaaatggattacacccgtaagtcagaaagctaaaaaaaaaaaaaaaattaaaatataagacaaaaggaatcagaaagaagataaatgcagaattaatgtttcatcattttagggcttgtttttacaaactgaagcttaagactcaccatttgagaactaggagaccatttcctaatttgtaacgatatcaacaacacatctaggtagctgtcaggggctgggagccttttctacacaaactttgctctgaatttcaaaatactagcctgtcttgacacttagtggaaattcaggtagggtggccttaactcaggttcttcaggaaagcgtcctgtttcagggacacagtggggtggggtcgggggagggctgtattccgcacatctagttctggctgggcttatggcaagtctcagtcctctggagtcacctgagtgactgagggatgagaggcatttctgatcccgtaatatacttacatggctttgccatctaccacatcccagttcaaatctcagctggcacagttaccgttcacgtggcctggagcaaatctgagctgaactttcctcaccgtaaatctggtaaaaatctttaccttaaaggagtgtggatcaaatgagataccaggtagagctagtgctcaccgagtggaagctaaggtgatgaagcccctttattctcaagttctgtgattccatgatggagacccatgaggcctaccagacggagagtatcaattaaaagaaagcaatcacggagttcttcccgccttctctggaggatgtattcctatgagctgccccgaatgttaaaaataatacacctgcccccaaagtgccgaggacgcctttgtggtccacctactcatcgtccaccggtttctgcaagtggaccggttacctgctcaggagcaaatgtttccatcacgacgcaccctctcccagggatgggctcaacctgtgctctccctgcgacaatgctgaacagtgccatctgtccctacccagcgtcagcgtcacgcagagggcccgggcttggaatgtgggaggcacgctcccagctcactttggttttcccgccctggaggggaatccaagatgtctaactagtcttctggccccgagagggagaggtggggataggaccttcctttagtcccctccgtagtggaacgaaggattctttatggtcatctgtggtgttcatttcgtaaagaagcatctgcagggtaagaaggaaaaacgtccaccttgcaaatatatcccaggcacatgcctcctgagaagtgaccccctcctccctccgcctcccccggcacgtcctggggcttctccagtctcccgctcctgggaccaggcagagatcccggcgtgggcagacccctgccaccgcgcccaggcctcgtccgaaactcgcgcccgagagcccacgccggaggcgacgctcccgataactactgtgctcccaagacccggagggcacgaagaaaggagccctggcaaacaaagggtacgggccgggaccgccgcagcccggggcgggggcacggcaaccgcgaggcctgggggcgcccgccccccgcgccccacgcccggtgccagcgagccgaggcgtgcatctccttatatggtcaaatgacacggcggggtttctcgagggcgggagctgcgcagcgctccactcggccggcagcggagccgcagccaccagccgcccgcgccctccagccccgtccgggagtccccggcccgctgcggtgccgtgagtacctccaaccccctgcgccccggagggaggccgaggggcttagccaccagggctcggaagtgggggccgaatccggtgcgagacccaaggagaggggagcagagccggagttggggagactggtgagaggagagcagagctgtgggtccgggaagaccactgggagaggggacccgaaccgtgcggggagaagccgggagaaaggagttgagctgtggggtagacccgggagaggagagccgaaccctgggggttgggggtggggagaccacggggagaggggagcggagcaatgggaggggtctagaccctgggggcgctggagctcagaggagcccaccgactcatccccagagggaggactgcagcccgcgtcctcaccaggtggggcaccgccatgcgggcagggaccgggcgagcctgggtaaaggctggccgcgggtcccagccggcggctgcggggaggtgacgctgtccgcctgcttccaggcccgactcccgagcgggctgtcctggcacggtggtctgcgcgggggagtccgggccatttccctttagtagaaataagtggagtttgcagtgtgacctcgctccttgactcaggtagacatttaataactgaaccattcggttaaaacaaaaatggcttattttaaatgaaaagattctaagtttttcttaagtcgcactcgtgtgatatcttagcataccagaaatagagggaagaaaatattgagtgtttttctgattttaaatgaatcagtcatatttattttcatatcctcagtcgggttttaactggaagtaggctaatccggttagctgaaatgtgtagctggcttgcaagcagcagtgtacttagacatcactgaacttaaggcccgcactcccttccacatattttggaaggtaataaatcacaatttgggtttagaatcaggagaactgtcttcaaaacacaactcccaatacatctcacatttttg

SEQ ID NO: 8818 - DNA, 6000 bp, Homo sapiens
ttattcatattaataaaaacaacctatataccttcacaccataagataaaaacagaacttaaaaataactcataagtgagtaagaaaaagacaaacaactcatcataagaatgggcaagatatttgaattggtccatcaaaagagaaatgtcctggccaggctctggggctcacgcctataattctaacactttgggaactcaaggagggaggattgtttgagcccaggaggttgaggttgcagtgagctgagccatgattgtgtcactgctctccagcctgggcaacagaatgagactccaactcacaaaaaagaaaaacaaaaagaggatgtccaaatggcaactcatcatagaaaaaattgctcaaactcattagtcataaagaaaagttgaattccacaatgagatactgctatgcactcaccagaatgtctatctactgtgacaattctaatatactaattgtcaaggatgtgaagaactggggaagcttatgcattcctggtagtgataaaatcaatacaaacaatttgggaaactgcgatatctactaaaaccgaacatacatatatatataccatgacctcacaatgccactcctacatgtatacctcccagaagtgcatgcctatgcataccaagggaagtgtgcaaaatgtgcattgtggcagtattaataatagtcaaagctggaaacagcctagatatctttctgcagtaaaatggatcagtaaattgtggtattacatacaatagaaaaacaaaaagactacagctacttgcaactgcatggaagaatattacaaacgtaatattaagggaaccaagtcaaacataaaagggcgaaacagtatgattccatttatataaagagcaaatctagaaaacctaatctattttgtttagggatggatagttaggtgtaaactataaacaaaaagaaggatttgattattctgaacatttgaattgggctgggagtggtgtctgaagcctgtaatctcagtacttcggaaggctggagaaggaggattgcttgagcccaggagtttgagaccaacttgggcaacatgatgagacctcatctctactaaaagtaaagagctgaatgtggtggcatgtgcctgtggtctcagctatttggaaggctgaggtggctggattgcttgagcctgggatgtcaaggctgcagtgagctatgttcctgccactgcactccagcctgggcaatagagacactgcaaaataaaaggaaagaaagaaagaaaggaaggaaggaagagaggaagaaaggaagagaaagagggggagagagagagagagaaagaaaagcaagcaagcaagcaagcaagaaagaaactaacttttaattgaagggaggggcaaaagaggagtttccggaaggctgacaagaatctgtttcatggcctgacatcagtattttccttgtgataagccattatacattgttgtttatgaacttcttttctgtatgtgtgttatctttcacaatacaaagggttaagaaatttaattgatgagcagagagagagagaggaatgcaatgaggacacattttccaggaggggtaggaagactgggattcctgaggaaagacaggaaagggagggacaaagagtaaaaaaggccctcagaggaaaggggccaggggacaagctgcttctctgcaattttacaggcccaagtccaaaaggcggacagccacccaggggactgatattgctctttgatacccacatatctgctttattgtttcagaaatctgtccattatgaggatgaaaatttctcttttaaaacttctctttcatagaaaaatacctctattttcttaggctgtagcaggtctgacaggattctgtaccttttatactgcatagttctttatttagaatcatttcttgtaaaccacttggataaaaaaacctagttcctttattgacttgcttcaaaaatgtgaatgagctaattctaaaaactcttggtacagattctcaaggtactactgggagtaaatttaacatttagtgccaatctacaagaaaaaattatttagtttctcattctcagagacctgttccttttctttttgcccctggtaatctcaaggattacaatgtctacccattggggtcagaggacgagcataaagcctgcaaattgaccctccttggatttccactaaataggagaatgcttggaaaggggagacaaaatagagatatatttccagccaaggaatactctttcttgaggttaagaaattatggcaattatgctaggatgtggagcaggatgcaccattggggaatagcatttccagtgattccaaagacatatacagattccacctatccctttccccaagaaaaaaaaaaaatcaaaagtgtgctctctttctctctctctctctctctctgtcccacccccgccgtgtgtgtgtgtgtgtgtgtgtgtgtgtgtgagagagagagaggaggtgaggaggagagatagagagagagtgttgttgggagtggagacagtgtaaacttcagccactaattcatgtgctcaactatattattcttagaagaagtgactgcctgcaagagttctggataaaattgggataatgatgttaatgattaaagtttacttatttctttgtttctttagttcaagttgtctgcaactacatacctcatttgttttttgctggaataacctcagtatatctgtatgcttttaaattaaattcacttaaactcaggcatagaatctgtaattcagagaactggatgtgagtgagggctttgtctggcacatgtgtcaataaatgttagttatcaccatgattagtattattattttcttcctgagaaagagaatcaccattttgtcctagcttagccaaagtattgtataaactgcagtgtccccaacctttttggcaccagggaccggcttcatggaagaaaatttttccacggatggggtgggggtgatggtttcgggatgaaactgttgcacctcagatcatcaggcatttgttagattctcataaggagcaacctagatccctggcaggcatagttcaccaatagggttcgctctcttatgagaatctaatgcccagctgatctgacaggggacagagctcttgcggtaatgctggttcaccagccgctcacctcctgctgtgcggcctggtttctcacagtccatggactggtatggtgtggtccagggcccaggggttggggacccctggtataaaagatcccagagatcacacccgctgtgacccaggtcacttctgggccttaattttgacattaggaaaataaagaacttggattccctgaactgtgactcaaggattttctgtcttcacggagtgccccaggtttcctcacaggttgggaattagtgacccctgggttctccagtggtcggtgcctcggtgggagagaatgcactgagatgggggaggggagctgctgctttcttctggaggcagtgtttacctttccctgggcagaggttgttgaaattaagaaaacctggtaaagcagatgccagggacagatattacctaatttggtcaaagaacaaagaccctgtgaaacatttggaaatcctcaacggtgcatagggacgggcacacttactggaagagcagaaacaggatcacccagcatttcagagtagggttgctgcatctcagagggtgagcataataatgtcattactatttcgaacagtctgggtttttgagaaggaagcttctgggttggaatattgactccaccagctactagtgctatgttactagtgcaaggtactcgatggctttgagccccagtttccttttgtgtaaaatgagataaacatctaatttatggagctgttgagaggatggaataggtagcgtaaggcaacctggaattcattaatgtaagcttctctcattaccataaaactaatagtctttctaattccagacaccttcaggtttactcatgctttactgagaattctcaaaatctcagtagttttctataatgattggactccttgctccctatcaaccccccaatctttggctgcggagtggatggaagaagaggcacgtggggaaggactggggcaaaccctctggtgtcctggcctcctggcccggtggggactgtcatggcggcccagcaacagcttaggtgatctcagatggcagagcagaaagaatgcaagggtatgagggtcagggctgcgcggacccctatcccgcctgcggtcctcccggcaagcccagcgggagcgcccgctcggctgggtccccgcctccagcggcgccggggccgcccagaccctgggctcagcctcgcgccccggtgcccacctgaggaggcagcggtcccggcctcgcgtcccggatgggacggcgcgggagcaatgccagtggccccgagcgccccgggccacgcgcggggccggccagccgctctcgcgccctccccgccccctccgcgccttgcctcgccgcccgcggcccccacccaccggccgctcctcccctctccccaccctcctcctccgccccctcccctcccccgccgcctcgcagatagctcggccgcgcgtctcagccgccggggccccgagcgcaggcggcgaggccaccacacctgcagagcgctcgggctgcctagccggcacctcgcctcccgccgcgcaaaccccttctccccacgcgccgagtctcccatgacgcccgagccccccggccggcgacaatgaccacttccctgcaagatgggcagagcgccgcgagcagggcggctgcccgggattcgccgctggccgcccaggtgtgtggcgctgcccaggggaggggcgacgcccacgacctggcgccggccccctggctgcacgcgcgagcgctcctgccccttccggacgggacccgcggctgtgctgcagacaggtaggcaaccctggagggcgcgggggagtgtcctggctgggcagccggcgagggggtgaggaggcggtcctagggggtgagccatgtgcccagagctgggccaagtttgtaaaagtctctgaagacaatcccctttgagctggctcctaccggatcagcaggacattgcgatctcacagcgccttataaatagcatcaccgtttcattgagagctctcatctctctcgcctctgcccatcggtggtgaaactaggagctcaggctgcaggctgatcaccttctgttccttcgtggccatgcattttcacaaagtaaactctattttattttatatattttaaaaaaatcgtagcataaatgtattcacctcccacatagagtcttacagcgaccctgtagaagcaaagcatggattgacattcgagcagtcttgctgttcggcaggaaagaatagaggctttaaagggtttcccaatctccatagcattcagcactaagtgcctttagagttgcacatactttcggaaagaaaaagggttacagcaatacaaaaatctatagtcctttatattcatacatttaaatgttactttttttttcctgattttcaaagcgctccaacttcagtgaagttaaaattactctccagtggactatagtacatttatactagcaagttctattaacttaccgcctcaaaacactgccttgctgtttaatatctataagcgcttgaaaaatcaacagactgtgtgtgggcaacattgtgaatgaaatttgaagtgagatgaaccacagctataattaataaatcataacttccaaaagtgattagtaaaatatcataaggatgaatgcactaaatgcaacttagagactgtcaatatcatggatgcataacaatgtatgacttctcaggtgatgtttggattagtaattgtatagtctatttttctgtttcaggaaaattatcaaaagtgatggagtttctatgcctggtgatttaaaggc

SEQ ID NO: 8819 - DNA, 6000 bp, Homo sapiens
acaaactttacctataattcgaggcaaaaatgcactttctaaccccaaactcttacagatgttagacaataccatgaccagtaagtaaactgaaataataggaacaagatggttaccagtttttctctaggtatgtgtaggacatgaaatgcactaaaaccacagtttttaaggtttgctgtacctctgggaatatttcttaagggaaagactcaccagggagtggttaaaaaaaaatgtagtgccctatggtgaagaaaggggagaggcaaaaccctcaatatcatatgtttagcatagctcccttggaaacaagttactttcagcattgtgcaggttatgggggctgctgtcaaacagatgattactgcttcctctgtggggaggggataaagttgcccatgtcccagaagcagcaagggtgacctcttgaacttagagatgcacacactccagcttgtgaatgagggtaaaatggaggccagcgttttgtaagcatgtaacttgaggactaaactctgaccttttctcttctcttgcccaaattcttcaggggcctggaaagtcacaccagtctcatcagaggggttttagttaaccctatataacatggcttactttccaacctgactctggcataacatcacatgacagataaggaaagaaatcaaaatattttatccccaaatatgtttttttttttttttttttttgccatgtcttgaaacagccctgcagagttgtctcttgtggggaaaattttgcattctgtaaagaatcccctttccctcttcaggaccttttcttgatccaggagagaatcaactgagagtctggcacctttttcagtctgataagaaacatttacaatctcttctctctgaagtctgccatctggaggcttcatctacataataagaatgttggtctccacaattgcctttcttaacccagacatttcctttctattgattccaggtctctagataaactctttctaccaatcgccaatcagaaaatctttgaatacacctataacctggaagtgcccctctcccccactttcagttgtcctgcctttccagaccaaaccaacgtacatcttacacgtattgattgatgtcttatgtgcccctaaagcatataaaacctagctgtagcccaaacaccttgggcacatgttctcagggtttcctgagggctgtgtcacaggccattgtcactcatatttggctcacaataaatctcttcaaatattttacagaatttgactcttttcattgacagattgttagcaattatgggcacatggcccacagttacttgtttgaaagtatatgccttaaccgataaagacactttgtgactttccgaggggacataaagactgtccactgagactgtacatttggtctattagcccagaagtttagaacttgagacagcctgattatgaaagaaatatgaccctgtctttggccaaattaacggaaaagaactcagaaacaatggaaaccccgcaactgatatatggaaagggcacacacactaaagactctagtacttttaattcagtcaatgaagaaactgaacaaacaaaaacactttgatttaataaattattaatcaaaatgccagcaaactttgaatatattgtaatgaaaggaaatcctttatagggtacaaagcattgtcttagacttttacgcatgttttattttgtattttataggcaactccaatgaaatagacatcgtgcatcatgtagacactgaggccaatatagctacggaggtttgcctcactattctggacctgttatccctcttcacacagactcatcaggtgaatatgatgataacattttctgcaaaaaatgatgaaatatgaggtagaaaaaccatgtgaagtcaaaaacatggttttttttaattatttatgaaatcaattaaccttatataaatcaacctaagtgtgagtggaaaacatgttaaagatgagattttgattttatcacaggttgactaatgtttgtttgatatgtacacgtgtgcatttcactattgtcaaatagtctttcttcctcatttatcttgcttcactctcaggcaagctgggctgagtgatagtgtgactctgtactttttcagtagaagaggaagagataaatgggcctatatattaaatttacaactagatctaaagaaaactaataatgttgagcatctttttgtgtgcttatttgacattcagatatctttgatgaaatgattatcactacttagaatggctaaagttaaaaagactgaccatccaaagttttggcaagggtgtggagaaactagaactcctatttattgacagtgggaatgcgaaatggtaaaaacatgttggagaacagtatggcagtctctgaaaaagttaatcatacatctgtcctgtgaccagccattccaatactgtaataggtatttgcccaggagaagtgaaaacatatctccacataaaactttatacacaaatatgcatgacagctttattttaatagcaaaaaaagaaactacaaacaactcaagtatacatcaacaggtgaatagatttaaaaatctgtggtatatccatacaatagactactactcagcagttaaaagaaataaactactgatacatgctgtaacatgggtgaaacccaagaaaccaaatttaaaaagagtatataccgtattactcagtgtatattattccatttatatgaaattttagaaaatgcaaactataggaacaaaaagcagatcagtggttgcctagggatgtggaggaaggatgggaggaaggaattacaaaaaaaagtatttaaaaacttttgagagtgatagatacgttcattatcttgattgtggtgatggtttcatgggtgtatgacagtgttaaacttattaaattatacatatcacagttcaatttattgtatgtcaattatacttcaataaaactattaaaaacatttgcagctctaccaaatgagcttaaacacctaggctagtacattacggattgagccggggcaggtgtggtggctcatgcctgtaattccagcactttgggaggccaaggagggaggatcacttgagcccaggagttcaagaccaacctgggcaatatagtgaagcttcatctttacaaaaaaatttaaaaaattagtcaactatggtggcacatgcctgtagtcccagctattcggaaggctgaggtgggaggatcactggagccctggaagtggaggctgccgtgagctatgatggtgccacgacactcctgcttaggtgacagagtgagaccttgtctcaaaaaaaaaaaaaaagattgagccaggaaaacttggattctttgaataaagtctacacagaacagcataattatgccaagaaagccctatttcagatgaaatgtcagcatggtggtagagaaagtaatgactatattgattcttattgggccatgaaaatgtcactcaaatctcacaaattttaaggattttactagtgccttcaagaacctgtgacctctctcccatttctccccggccccacccaactcgccattgcatcagctacttttctttctcaaccttgaactcataagctcctttccaaatcaaggcccttttactagctgtttctcccccacaggacagtcctcccagatctctccagggcaggcccctttgagctcacatgccaattttccattagagaggtctttgctgactaccctatggaagtaatcctacccccaaagcaactactttcaatcacatcatcctagtctatttccatttgtcatgtttttttcaatcactgctatgtaagtttcacagtaaacatgaactgtgtctccttgttcaatcctttatttctagcactcaaaatagtgccttaccacatgacaggttcacaataaatattttttgatagaatgaaaattttctttcacttatcctgaataacatctgcattgaatttccagagacaactccaacaatgtgactgtcaaaattcattgatgaaaagggtctttgatacctacatgctctttttccaagtcaatcagtcagccacagcgctgaagcatgtgtttgcctccttgagactgtttgtatgcaaggtaaggatctccaggtttcaatgaagtttaggtaggatgacagtaaacccatagaatagtaaacctataggaatccttgcgtttctcagtagggagggaagaaggattgttttcttcaatttgggttttattagacattgattcctggtctcaaaatgagtgcacagccttgacaatctgtctgctcaaataccagaagatattagcatctggtgacaattagcatctggtcaccaattctttgagttatctgtgtttgcggcaccaagttaggtaaaatgcaccccttgaacttaaaggggtgcatatcaagttaaagattccacattaaagtggatacagccaccgcctttgaggacgcttgtaaataacacctgtgatcttaacaatgtcaggtgaattgaggtcatttcaaagctctcactgttattttggattgtcatcagttactgatacaaaggatacttatacaatgtagagaataattctatctaggaaaaaagacaaatgctaacataggccttaacaaattctatcctcctcacttgcaaatgaaaaaaaaaaaatagaccaagttaaaaaaaaaaaggagagggattttgttttagggaattttaaaatatgagaatgaacagagcaaaatgaaggcatgttgctcccttcacccgttcttccatttctgcagtttccttcagcgttctttcaagggcctgctgacctctgtggatcattctgttacgaagtcctaaaatgctgtaaccacaggtcacggtcaactcagacagaagcctcagcccttctgtactttttcatgaggaagaattttgaatttaacaagcagaagtcaattgtccggtcccacttacaagtaagtgctgccaattttcattaatgctgttgttaaaaccactgatctgtttcagcagtgcttaaagcctactgtcctcagggcaagccgtcactaactcctccactagcgtcctccttaaagacgcccacagcattcagttctgtttaatagtaggggcacagctgggcagaaatcagcagagccctatctccacttgtactttcctttcttctgccaggaaatagaatcatatggagtaaacaactcaggaaaccatggctagctccaacaggtcaaaccccgccaaattccaaacgtaattttttttcttctaggcatcccaagattccaagattcctgcagcctctcttaggtatttaagattataggaaacaccctagatttaataatacgttctggagctttaatacataaacacttcttttattggacctacagggagaaactaataatacatttacccagcccagtggatttctttaagaagactatttctggtcttgtttttgagagttcattttttttcttttctagctcatcaaagctgtgagccagttaatagccgatgctgggattggaggctctcggtttcaacattcgcttgcaattaccaataatttcgccaatggagataagcaaatgaaagtaagaaatgctttgtgggcttttactgcagaatttttttaaatctgaagtggattctttttgtgagatatcaaaatcataaaaatagattgggtacagtggttcacgcctgtattcccaacactttgagaagccaaggcaggaggatcgcttgaggccaggagtttgagttgaggctgcagtgagctatgatggcaccattgcactccagcatgggtaacagagcaagaccttgtctctaaaataataataataataataataataattgtttattttgtttattgagactttgagctttgagcactcctcaaagtaaa

SEQ ID NO: 8820 - DNA, 6000 bp, Homo sapiens
taaagtcgagtgataaacaaatggaagcaaagggcaaatataaaaaatataaccacaggactagaaatccaggcagaaaaatgggtcaaagacagggggctgatgagagccagggtatgggtagaatccagggccagtgacagaacagtagtgaggattgaaaagccagaggcaaagcagtatttttccaaaacatgtgctcctgaatcctactttttctggttcattacacatatgcaaggaaatttgcatacataagtttgcaaaatacagagtgcaagaaatttctaccccttccacacttctgctttctttctaccaaaggaacaaacaccaatctggttgagacaaactctagaacactgatgaggacaccttttccagtatctctctctctctcctctctctctctctctctgtcctctctctcctctgtctccctctctctccctctctctccctccctctccctccctctccctctctctccctccctctccctccctctttaaaacaagaaggaaaagtatgctgggcttctgttagacacagctgtcctctcctcccagtctccatggggctccaacaaggcctggtacagactataccgcctgctccagcatcccctctctctcttctctctgcccttaggcagtaggcagacccaggacaccaatgaactggacatttttgaaaatgtgccagcttcttttgcttataagcacaaggccattggtgttcctcagctgactggtggtaagattggtacttcaggggtactgctgctactactagaaagccctactttgcaacaccatgcattagcccaggtaaggatagcctgaaatttcagttctatttcccactatcttgtttttccctatgctcactacagaacctctcctgggtaagggattcctgggccaggcatatgtaggaccatcagaccatctctggttcccaatgtcttcctttactgccacgtgaccagtggagtcagaaggctccggcctgcctcctggctctgttcccccatccagatttaggccaagtaggtcataatccccaaaggtaaatcaatgctttcattctacctggaagatttctcttcattttgctaagcatgctagaatctgacacctggaattggggaaatgaattgtatagagtcttgatcacaatccagtgctgtaatttaatttgccaacttacccctatttgcccacaactccaaaattcctgactctgaacgctaatggggatgttcactgtttttatgtccaattatgtcagataaccaatcccagattgatcatatttccttgaatatctcttgcctataattcaacctctggtgcccaacatttttatcagtcaggatttgggagtaaaagtaatccaaactgactctggctaactcaggcaaaaagtcaatttcttagaactatattgggtagctcacagaatgtatgggaaagccagaggactaggttaagaaagtaggcagtccaggcaggttatattgactcacttgccctttgtcataatatagttgaaagatatctggatcacctggacatcccatagaatgtcagactgggctgggcatggtggctcatgcctataaccccagcacttcgggaggctgaggcaggcagatcacgaggtcaggagatcaagaccatcctggccaacatggtgaaaccccatctctactaaaaatacaaaaattagccaggtatggtgatgcgtgcctgtagtcccagctactcaggaggctgaggaaagagaatcacttgaacctgggaggcggaggttgcagtgagccaagattgcgccacagcactctagcctggagacagaccgtgactctgtctcaaaaaaaaaaaaaaaagtcagactgattgatgacatcatgctgatcagacaggatgagcaggatcttggtggctagcatacctgctaaagaagaataaattactgacccacaacaacagagatgaatctcaaaagcatgatgatgaggaaaagaaagccatacaccaaaaatgcattccatgtgccttcattgataaaaaaaaaaaaaaaaaaaactttaatacacacgaaactaatctgtggtgatagaaagcagatcagtggttgcctggtgctggccttaaggaggggattgtttgcaaaggtcacagggaactttctagggtaacagaaatggtctgtatctttttttttttttttgagacagggtctcactctgtcactgctcaccagagactggacctcctgggctcaagcaattctcccacttctgtctccctgatagcggggaccacaggtgtatgccaacatgcccaattaatttaaaaaaatgtatttttgtagagacgaggtcttgctctgttgtccaggctggtctcaaacacctgggctcaagcgatcctcctgctttgacctcccagaatgctgggattataggcacaagcgactctccaggcctagaaatggtctacatcttgactggtgtagtaactacatttggtaaaatgtacattacaatgaataaattttatacctcaataaaatggagctaaaaagaattatgtataatttatctcagtacataatcactagcatgtgaattaacaggtgacgttttcccattattaccatgttctcaagcatgcatttttttttttttttttttgaggcgggatctcactctgttgctcaggctgaactgctgtggcgcagtctcagctcactgcaacctccagctcctgagttcaagcgattctcatgcctcagcctcccgagtagctcggattacaggcatgtgccaccacgcccagctaatttttttgtgtttttagtagagacgggattttgccatgttggcaaggctggtcttgaattcctggcctcaagtgatctgcctgcctcagcctcccaaagtgctagctaagctacaggcctgagccactgtgcccagccaagcatatatggcttagaataaacatctttcatcctcattcgcagctgtctttttttcatgtaacaatttttgcctgatttgacattgactttattttcccactcctgctttacttttgtttgtttgttttgcatttgcctggtgtatctctgaatagatctaaaggaagaagttcttgctgccaggatcctcagatgcccatgaaggggctttccaggtgatggggaggggcttcaggtaagtgacatgtgacatttgcataaaataaccttaattcctttaccaccgccatcccctgcatcacagcgctgtatgttactgcatgctgaggcatcaatgcaccctctcctcagctgttagcattgaatttttcctggctgtggcttccatgcctctgtttcacccacagccattacccgcaaggccgggtctgctattctgtacatactagggtgggatatgctgtttgtgcctgcatagaagggcttgctcttatgcagttagccttggtttcaaagcttcttaaactttagatccatgtctcccatcttttatctgaggagtttgtggatgtcctggtaggggaacttgtgggtcaaatacatttgagaattattgatttaatcaaagttacatagaattctttttttttttttttttcgagatggagtcttgctctgtcacccaggctggagtgcagtggtgcgatctcggctcactgcaacctccacctcctgggttcaagcaattctcctgcctcagcctcccaagtagctgggattacaggttcccgccaccacatctggctaatttttgtatttttagtagagatggggtttcaccatgttggccaggatggtctcaaactcctgaccttgtgatccacccatctcagcctcccaaagtgctgggattacaggcgtgagccaccgagcctggcccaaagttacacagatttctatagtgcagtggtgcaatcatagctcaccgcagccttgaactcctgggctcaagcaagtctccagcctcagcctcctcactaactaggactacaaggtgcatgccaccacactcagttaattttttatttttttattttttgtagagatggggtctcactatgttgcccagactggtctcaaactcctaggctcaagcaatcctcccatcttggcctcctaaagtcctgggattataggcatgagccactgtgcctggccaatagtttaggatttttcataggccccacatgtcaatgtacattagggatctttaaaaggggcatgagaaggggtgtccctgccagcccttgagttactgctctctggaatcagcaggtcccagttctgcctcagactcctggctcccaactacctgcccagctctcagccatttttctgcctggaggtctgcctgcctctgcacaattccagttcatgtgcaggttccctttcatttcaatttcttcctgtaataatcttatcctgacaagttctaggcatttctggcacattctctttgtttttttgtgtgttgttagagtttgataacacactggataaattccagtgaattcattcagttatgtaaacatcaccacaatccagtttgagaacattttcatcaacctaaaatgtacagaatgaggacaagtcatgggaaaatagatgtggttagggaagcatttggacgctgagttcccagttcctattgccgctggggctgtacccttatgcctcctcctcccatacctccctctctgggctgatcccaactggcaacacgccctcccccaaaccccaactgccaagacgtcctgggagcctcacaagtgcccatgaggaggtggagagaggctgcaggcaccgacctgccttcagcttccggcttggcaaactccgaaaactttcacttttcttttctcggaagcccggccccttactgcgtttgtcaaagcacagacttcctgttttgcctgctagcatctccctgtaactctcccaatcttgaggagtgatccctgtcccagcccctggaaaggggcaggaacgacaaactcaaagtccaggtgagtttctgtctttgctgctttattcttcgctcttggtgactgcagctcttagagttaacttcgcggcagcagctgcagggtggagttcaactatttaaactctgaggctctctcagagctcagacatgtggtacttattaggagactgttaaaagggggcacatggagggaacactgacacctctttttttcgccagagtccagcctgttattgtgaatggagccgagatttgccctctaccctcacctaagctctgatccttcagtgcccgcaataggcggctcatctgttatccattgtgtaaatgactagaggtacttgggaagctggtggaaaagaaaaaaatgagagtacatttaatttcgtctctagtgtatcatgaactttttatatattttctctaaatacatgattatttccttgaaataaattattagaagtggaaattcaaaggagcacatgttttaggacatttgacactgattactaaatcagccttcagaacatttggacctgttgaccttcccactcacagtgtctgagattattactattattttctatcttggccaatttgatagacaaatatgttatcaaattgtcttcatttacactttttttggttgtttgttgttgttgttttctgagacggagtctcgctctgtcacccaggctggagtgcaatggcaccatctcagatcactgcaacctccacctcccaggttcaagcgattctcctgcctcagcctcctgagtaactgggactacagatgtgcaccaccacgcccagctaatttttgtatttttagtagagacagggtttcaccatgttggccaggctggtctcgaactcctgacctcagctgatccgcccacctcaacctcccaaagtgctgggattacaggcatgagccaccatgcctggccttctttatg

SEQ ID NO: 8821 - DNA, 6000 bp, Homo sapiens
tgcaactacagtcaggcaccatataacaaagttttggtcaatgagggatcacatacatgatagggtcccataaaattgtaatactatatttttactgtgccttttctatctttacatatgtttggatacacacgtaccaatgtattacagttacctgcagtattcagtacagtaacatggtgaacaggtttgtaacctaggagaaacaggctataccatatactctaggtgtgtagtaggctataccacctaggtttgtgtatactccatatgttcacagagcaatgaaattgcctatttctcagaatgtatccctatcattaagcaatacatgtcctaaactccatcattgttttgtgaaagcagccattggcaatgtataggctaaggagtatggctatgttccaataaaactttatcaacactgatatttgaatttcatataattttcatgtgtcataaatattatccttatttttatttttattttttgggacaaaatttcgctcttgttgcccaggctggagcgcaacggcgcgatctcggctcactgcaacctccgcctcccgggttacaggcatctgctaccacgcctggctaattttttttttttttttttttttgaaacggagtctcgctctgtcgcccaggctggagtgcagtggcacgatctcggctcactgcaagctccgtctcccgggttcacgccattctcctgcctcagcctcctgagtagctgggattacaggcgcccgccaccacgaccggctaattttttgtatttttagtagagacggggtttcaccgtgttgaccaggatggtcttgaatttctgacctcaggtgatccacccgcctcggcctcccaaagtgctgggattacagccgtgagccactgcgcctggcccttatgatctttttcaaccacttaaaaatgtaaaaaaagcggccgggcgacgtggctcacacctgtaaaaccagcacttgggcggatcacctgaggtcaggaattcgagaccagcctggtcaacatggagaaaccccgtctctactaaaaatacaaaattagccgggcgtggtggtgcatgcctacattcccagctactcaggaggctgaagcaggaaaattgcttgaactcgggaggtggaggttgcagtgagccgagatggcaccattgcactccagtctgggcaacaagagtgaaactccgtctcaaaaaaaaaaaaaaaaaagtaaaaaaaaaaagtcttagctgagaccattcaaaaacaggcagcaagctgtagtatgctgctctagatggttgtttttggtttggcctctatgcctggtgctacaaatcaccaaattctctgaggggatgaaacagcagtgaatacaaactcgcttgaatgaatttcccttctggtattttgactcctcacgtcctggctgacttggttgacagtgatgccttcaactcagctgggttttgttgttttattttggtattttatccagtttatagttagttgttcttgatgaaggagtcaatctgacatcaataccccattagaatgggaagtggaagtctacatgttaattttaatttgctacttttgcttaccattatgagcctccttctatattgacaaatatatctccacaatgtcataacattccattagatgaatgcaccatgatttaacttaataattccctataggggacattgaaattgtttctagattttttcactgtgatgaacacacttctacaggtttatttttgtacctagttgtttccttcagataaaatcctagaagtacgtggataagtcaaagggttcacacttttaaaggtatttcacaggtattaccaaacttctctttagaactgttacacaatggcccagcatctatgtgcttcttagtataggggccaatgctgggtgttaccattcttttcttcctttgccaatctgacagatgaaaactggttatctcaatgctgtttccgtttgcatttctggtttataggtgtggcaggctgataatggcttactcccaaagctgcatctatgacctaatccctggaaactgtgaatgtttaaggaaaagaggtctttgcagatatgaagttaaggattttgacatggacaggttatccaggtggtccttaaatgctatcacaagtatcacttttttttttttttttttttttttgagacagagtctcactctgtcgccaaggccggagtgcagtggtgccatctcagctcactgcaacctcctccctccaaattcaagcgattctcctgcctcagcctcccaagtagcggggattacaggcgcctgccaccacacctggccaattttttgtatttttggtagagacagggtttcaccatgttggccaggctggtctggaactcctgacctcgtgatccacctgccttggtttcccaaagagctgggattacaggcgtgagccactgtgcccggccacaagtatggtttcttacaagaagggggcagaggaaaatttgtcacagacaaaaaaaggagaaggcaatgtgattacagacgcaagggtgggagtgatgtggtcacaagcccccagaagctgcaagagacaagggtagattcttttcggagcctccagagggagcatggccccgtcaacacctccatttctactcagtgaaactgacagtggacttctgtcttccacaactatgagaggataaacttctgttgttttaagccaccaagttttcgtgatttgtgacagtagcagcagaaaactagtacaataggtttttcatatatttatggaccataaacatgaaaaatcgtctgacttttaaatcttataaaaataaaataacacacaataatacaaagagtatgattctatgtatgtacatcagaatatctgtaaatacgtttacatatgttcataactgcctaggaaagtgtctggaaggatatataccaaactagtgacagtggttaaccagaggcagttaactgaaagtggttaattagaagggtcctgtgtcctgagggggaaagaggaacttttacttgttactcgatactgctcaagatacatctgttatttgaaaacgctttatgagactgtactcatgtattgtgtaaaaaattagaaaaggcatatctgcttgttataaagttcatagaaaccagaaaactatctcctttcacttatcctttcccagaaatagtcattgataataatttgcatcttctcagatttttttctacgcagaaataaatgtgtataatttttttaaaaacaaaaataaaatagtgagtgtcatatatagtgtttcatttaaagatgttcctccaaaatcaatcttggtccatgtgcctgtgtgtgtgtgtgtgtgtgtgtgtgtgtgtgtgtgtgtgtgtgtgtgtatgggtggggggaggggcggggacactgcatagaactggccagctgcatggactgtcactgtaaagaaagatgaagaatgcatgtcaccaagctctctgatgctttgaacctagcatatgtggctttgcccatatgtgcgggcacctctgtagaaactcttctgccagttgggctgaaaatagttttacatagttccatactgccttccaagctgttttcaaagtttatgctctaatagttccccacggaggataacacaagatattcattttcctcaaactttcccgcacaggttggagagaaacgacatcttaatgtcattgtaacaggcatttctttattaaaaaaattttttttttggagacaaggtcttgctatgttgcccaggctggtctcaaactcctgggctccagcgatcctcctgcctaggcctcgggagtagatggaactccaggcgcgggccgtggcgctcgcaccacaggcattacttaggtatgaggctggttgagcatttttctcgtgttcactggctactcacgcagctttgtgaatggcttcggagatcactggacaggcaattttccctctcaatgaaccaaatccaaattcttttggaacccaagaccgcgatttttcgatttaggacctagtcccaaacaatgaagaaaaggtgatcttcaagatttcagcagggaaatctgtatatctgtacaaggttgaaaacctgggccgggggtcgcgttggaaccccacaggaaaaaggcgcggaaagccgccgggcattttccggggttccatagatgtccccagtgtcctagtccgtgcatcagctcgcgcactcggagggactctaggcagggggagggccccgcggccagtatgtgcgtccgaggctttcccgcagggggcagtgccgcccgcccgcgcgccgatacggtgggagggggtgggaacctgcgcggagttctggaggttctttgggagaaagttaggggatgcggaggggtgggcgcaagacttccaggactccagggaggccgtggggagggccgccgagggtgcagtgtgaggcgcaggagggggttgggggcggtgcacgttgcagggagacgcagcccctggaagatgcgagtgtgaacgtgtgagtgtgagtgcgtgtgtatgtgtgtgtgtgcgcgcgcaccgcagctctccgggttccgcgaggcgcgcgggtgtcagcttgcagccggggctcctccctccggcccccctgcccagcccggcggtccctcctccctccctccccgctcgcccctccccggcgggccaggggctgggacgccccggcggagcaggcggcggcggtggcgagttggggagccctaggctcggcgctgccggaggggcccgagccgagccgcctgcgccccggccgggcagcgccgggcccgcttcccgcggggccacgccctgtcaaactttgttgcggcggctagcgcagcgggcccgcaagcgggcgggaggggcgccgggccgggccgggcagggcgcgggcggctaggggctccgagagcggcggccccggcccgcggccccaccatgccccagctcggcggcgggggcggcggcggcggcggcggcagcgggggaggcggcggctccagcgccggggcggccggcggaggggacgacctcggggcgaacgacgagctgatccccttccaggacgaggggggcgaggagcaggagccgagcagcgatagcgcctcggcgcagcgggacctagacgaggtcaagtcgtccctggtcaacgagtcggagaaccagagcagcagctcggactcggaggtaaggaagcaccgcggccacccccgggggatcccggccctgcgtccgctcacccgctcttgcctttgtgtctcctccgcaggcggagaggcgcccgcagcccgtccgggacactttccagaagccgcgggactatttcgccgaaggtatgtgcccgctgggacagccccccactctcgattcccgctgcgctccgctgctcagcccgggcggcccaccgtcccccttgcttgggtggacgcacccttgccctccgcctttattggcggcagcccccgtggggcgcgcgtggggggcgctggggtccccagctcccgcctcgagccccctgccgcggcgctgtcagtcccgggggcctgggcctcacctcgccttggtcttgttcgcagtgagaaggcctcaggacagcgcgttctttaaaggacccccgtaccctgggtaccccttcctgatgatcccggacctgagcagcccgtacctctccaacggacccctgtctcccggaggagcgcgcaccgtgagtgcccgtcgggcgcgccggggagggtgggaggccgcggcccgcaggatgcgcccccgggcttggccatggagtgggggatggggccttctgcgccgatcccaagcagaacttgtttgcggagttgaactactctctggcggccgagcgcgaggctgcgctggccagtgcctggatgaaagtaaagttactttaacttttcccctcttgcgggttgaggt

SEQ ID NO: 8822 - DNA, 6000 bp, Homo sapiens
ctctgccatccctgagaaagaccaacccttcctcttcctcctcagcctactcagtgtgaagatgacaagtctgaagacctttatgatctacttccacttactgaacagtaaataattttctcttccttgtgattctagtaacattcttttctagtttacttttaaaaatacagtaaataatacatataacatataaaatgtgttaatcaactgtttgttatcagtaagacttcgaatcaacagtaggctattaatagttaagttttagggtagtcaaaagttacacacagatttttgactgtgtggaaggtcagtgcccctaacccctgtgttgttcaagggtcagctgtatttctaattttcttgttgacaggcagaagagtttactaagaaaattcacctctaacaatctagtttcaaggcattttccaggtggtttgtcatgtgcagctaggagctaaataggcaaagatgtagaagacaatgtagatttagaagagaatatataacacatttttattaaagtatgaagttgaacaagaactcagtactgaactcaagatattttcattattcctgcccataatcatgaatgcttctaaacagagcgcaggcagcacctgaccagtgtatgaccaactcatggagaagcaattctaaaggaagtcctgtcttccttacttccagccagcctaggatacttccctatcagaatcttccactcccaagccatctctgcagctcacctcagccctaaccacccccagcccaagttggctaggcaaaaagaagaggaagaagaaaatggtaaacatgtgcatgccacacctgtttactcttctctcctgcccgccttgccacaattcctctgaagacgaacacccaaaggaaggagagggtaggaatggcacaggacttgctaacacctccagctgccaggcctcctctcaccagttatgaggaaagccaggcttcattcttaccccacccccaccaactctcacctccctcagccttcacaaaaaaactccacccatacctccccaatcctatccagaagcatttccaaagtcccttcttccctttaaaactagtctcctgggccaggcgacatggctcacgcctgtaatctcagcactttgggaggccgagacgggcggatcacgaggtcaggagatcgagaccaacctggctaacacagtgaaaccccgtctctacccaaaatacaaaaaattagccgggcgtggtggcgggcacccatagtcccagctactcgggaggctgaggcaggagaatggcgtgaacccgggaggcggagcttgcagtgagccgagatcgcaccactacactccagcctgggcgacagagcaagactctgtctcaaaaaaaaaaaaggcaaaaaaaaaaaactagtctcctccagctctgctgaagccctgccacaggagtcacattccaagtaaccggaaagaaaatacagaatgaatgtaatccatcatttgtggataccctaaccctcgccttatagtaactctagttactagagcaactaggaagctctcctgaaatcgtagttcattttctggtgattaggttactttcagaaattagaggtttcatttatactaagaaacttaatatgaaactactattcccacctaatgagcaagaaatgctttcacttattaatatatcttgccagggcgaggcacagtggcttaggcctgtaatcccagcatcctgggaggtcgaggcagagggatcacttgagctcaggagttcaagaccaacccaggcaacatggcaaaaacccatctctacaaaaaattagccaggcatggtggcacacacctgtagtcccagctactcgggaggctgaggtgggagaatcatctgagcccaggaagtcaaggctgcagtgagccatgattgtgccactgcactccagcctgggtaatggagtgagaccctgtctcaaaaaaatagagagagagagagagacagacagacagacagacagacagagataggagaaagggggagggagagagaggtagggcagagagagagggagaggagagaggagagagaagagagaaagagagagagatcttgcccatctggctttattctgagacccaccgagtgaagcctgtggcagacaagagtggtttctatgaaaaaaatataaataaataataaataaaaagtggtattcccagatgtgaaggcaaactacaacaatgacaatggcctctctattgattggcagggtcaatttggctgacaagttggctggtcaggtttctcatctccaggtgctctgcttccaaagctgggagtggtacaaagagattacatggtccttgcaccagagttcatctactttactcaaccccatagttttacattcagttctaacaaatttagatggtttccaagttcagttaatcagacagaataaatcttcatagagagaaaaacactttattcattcaacaactatttgttgagtgcctaagaagtgccagacacttggagattcagcagtgactgatacacaatgaccccatctcctcctggcttatgtgtgtttggtgggaggcagaggcagagggttagacagtagaaaagtaaattaaaattaaaataattgtaaataaaataattacaacatgttacggtggctaacaaggacataaacagagctgaggatcttgcattctcagaattatgaaaagcaatattcaatcaaggccaggcgcagtggctcacacctgtactcccaccacgttaggaggccaaagtgggagaatcccttgagcccaggagatcaagaccaacaacatagcaagaccccatctctacaaaaaataaaaataaaaataaaaaaattagccaggcatggtggttgtgcccacatttccagctactcgggaggctaaggtgggaggatcgcttgaggcctggagttcaaggctgcagagagctgagattgtgccactgaactacagcctaggtaaaagagtgagaccacatcacacgcgaaaataattaaaaaacaaaaactaaaaaactaaaagcaactgatctttgagaagtgataactgcattctcaaagtacctaatctcaacaataccctaacttaaaacctgctgactaggagatgtatttgactgcaaatctggcccacacaagcaataatctgagtttccatcaaggaagctgtaagcaccaagtagagcaaaaacaaatccaggcctcaaatggaaaaagcagctctgaattgtgattttcgaagaaacctgcatttcttacacttcagtgtactttccccatatttaactccaagatttttgttaatttgtttggttttcctttctcaaacaaaattatgctcagactgaaaaccctagatttgttccctattgcatcttcatttcttcccaaacattccataaaacgtgacctacattaagttagcaagttaagtctgaaagcgtctaccttccctggggagggggaaggtgtaggcagggcagagatttgtagtccagccctcttgccacaaattatgaattagagaggaatgactttgcttttttaatgatctccagagaattttccatcatttccctctcttcacccagctcctttgcaaccactgccagagaagtcttcctttagcttcttaaacatcgatcctaaaacacttccagacacctgtgctgctcctttcagttcccatggagattaggctgtgtaacaatctcgcaaagacgttcccctccgtctcctcatcctcttttcaaacccttttacgatttcccatctcactcagcatgacagtcaaagtccctgtgatggccaacttctgcatcacctagccagtctgccaccgccaaaactctccagcctcatctttctactcttcccctggttccttgcccacgcctttacacttgttctctgcttggaatcttccctcccctccttgaggaactttctcaaatgtcaccttccctcaatactccccctcctccatttaaaactataaacttccaactctctaagcccctaaagtactctatatttaacttattgtataaactactgtccctacttgtaagttccaagattgcagggattcacccgctttgttcactgctgtctgccaaggtctagaacagtgcaagttacccaacaggagttcaataaacagccattcatttaacaaatatttgctgagcacttcgtcccgtccaagtttgttaaatcaagacaaataagacaccgtccctgcctttaacgcaccagatggagaaatgcaccacagacataaatgtgcaatacaggcctgacactacggccacaagcaagtcaaagaacgtgccaaaagttcagaggaagaagcctcggcttcgcctttcgggagaccagtccagctttccaccatcacgctgctcatcagggaccatctccgggggtctcctctagaccccaagggaggagcgggtcccgcccgccattcccaggtctcagagtttacttgtccagagatgcaacttccggcctcttcaggccgggcaagatttaaggaaagaaaagaaacataaggacctccgttcttcggtctccgtcccctccccttcccccgcgtgccgtccccacaacgggccaggactgaacccaactctcgaccaactcccggcagcaaaactaagcaccctacttccgttgtccccacctgttcccggcgtccccttcggctactcccggcgtttgcgcaagcggtcccacgtgggctcgggcggggctagcgccgcggcgggggctgggcacgcccctagcgcatagctggcttctgattggctttccggtgctcgcccgagcagggttggggcgagtggaccgcgcctctaaaggcgcttgccagtgcaatctgggcgatcgcttcctggtcctcgcctcctccgctgtctccctggagttcttgcaagtcggccaggatgtctcaggtacagcgcgtgcacagccaggctgcgaaggtgcagcgggcgggaggcccgttgggggctcagccggctgccagaagctctcgggctctttccttccgtgcccctcacttgctcatgggcccatgcctagccctgattcgttggacagagccttgtgagcgggattttccgtttggggatttctaaatctgctgcccaccccgcaactgccggaaagttgcccatggggtggacttcgctgtgtagcgggagaggggtgggagtcgagggtgcttgatggagagatgggggaaggggttgcacggattggaggagcgaggagactcagtccccatcccgaagcacagggcaggacgtcgcggcggagtggggaagcgaggagtccgtggccgagagcttggaggtcaggggaagtacggggccggctgctcagagtgcgggacgaggagaatcgcggcccggggagaggtgacccaggggcccctcccttctctccagtgtagacccttgtctgagaccgagctatgtggggcgacctctggctcctcccgcctgcctctgccaatccgggcactgggacagaggtcggtgttgaacgcgcgggccccagggggagggaggggaccaacgggctccggcgctgacaccgcggcactcatgccctgtcccctttcagctgtttccagcatactgtgccccgtctgtcctcaggccagggcttcgctgcagccccggccactccctagtgcctggcccggtggtggccaggcagttggccgcgctgcttctcccgcagaggggacccccactgggggcgaaggcttggcctgccctcttcactgctgtatttccagacctgatgcctgcgtttgtgagagctctggatatatggttttcgattgaatgagtgaactggaggggcttccccttcttgtgttgctgaatctttctagctgccctgttggggcagggaggggcaga

SEQ ID NO: 8823 - DNA, 6000 bp, Homo sapiens
gctccaagacctagcacaatgcttggcacatggaggaagctccatggacagttcttggaaaaaatgaatgaatagcactgatggatgaacaagaagattttatgtcccacaggcaaaatgccttagtgcattggcctgggggtgctgagattttgcaggagactctgcccacggtggggtgccctcacccaggctggtagctggggataaactggaggagctcatggccatctgtgagtctccatcctgtcgatccttgtgcctgccagtgtctggttcctagtggaggctcagtacatatttcccgaattgaataaaaaatgcttgtttcagacctatctgttttgtagttttggtctccaagtttttgaaaacatgaccaaaaagtatctgtccacctttcccctatgataccataaaagacaggcaagtgccacattcatgggcagttcctctccttggcacgcccagtcctgaccacagccccaagtcctggccacggcgctccctgtagatatggctccttcccacagtgtctgctgtaggtagtgaatgtcaggcaggcaccctccctcacatctcacccatccccaagactgtgagagtgagtcagtgtggagcaggaagaatgtcaaacagggctgcatagaggcagaagcgtacaatacctttccttgccttcagcagggtcacagccaacacttctctaacaaaagacagaccaacaagagaaaagcataataagcttggtgcgatggctcacatctataatctcagcactttgggaggctgaggcaagaggatcacttgaacacaggagttggaggccagcctgggcaacatagcaagaccactgtctctaccaaaaaataaaaaataaaaattagccaggcatggtggtgcatgcctgtggttccagctactcaggaggctaaggcaggaggactgcctgagcccaggagtttgagacagcattttgtgagttgtgataatgccattgcactccagtctgagtgacagaaacagacctttcgagaaaaaaaatttatttcatcaaagctttatgtgacatgggagccttcagaatgaagcccaaaaggcccaaggaaagctgtccattattatgcttagatttgatgagggatggacagtcacgtggaaacatgatgaaaagggaatgatctaacgctaacaggctgagtgggaaaactcagcaaggcctgtctgttcagattctttttggcctctctgtgtggcaatccttcctcccagctatagagcagagaccttctggaatgaagatcttatgatctactttcagacatggcagctcagagaatttctttacagccagctcttgcccagaaaggtaggaaaagggtagagtaatactttcaggatttaaggctggctttgcaggagagttctgatttctatgactcgccttgggaagaggattccgctttctttgaaagcttcaggggaggaaaagaggtggaagataggaaggctggaaaaggtcagagggccttgctgctgaggctgcggctgaggccttctgagtagccagtttgccaaagcatcatactaaagactattgtttcctgagtcccaacagatgctgttgttagagaccaaatacaccacccctaaatatgctggaaaagttaccctttcaaagaggatttacatctgtaaaggaaatctccattcctgcaccaggaagagaaggatgactaaatccttcgagatgtatctatggagaaggtgccaacttaacatgatccattttgttcattttctgtgctttttctgggcattcttctcccccataacagggttttcccacgccattctttctgtgtttcagaaaatgatatttcagcccaaagtttcaactccctcttggatctaccctagagatttgctcagctcactgtgtaactcccatggatatacaaggtatccacgctatttaatattcaacttgtttgtttttctcctgttgatctgtcttgtgttccagggcatcccagctaagaactcatgaagggtagagagaaaactgtttttcctctctttcattttggggggctgttcccagagatcaaagatgagccctgcaaactggtgagtcctttcagaagtcctttatttgggcaccccaattccttgtcctccagcccagcttcctccaagagaggtccttccttaggactctcagtgccatctcttcctgatcttgtccttctcttgagaaagtctaccctactccagaggctgacctaagactggaagcccccctcttccctggacacctgtaggatgcattccatggttcagctggctagtctctgaggtaggcagtcagcacttacttgagagggactttggatagtccaagcagggctttggcactgcaaattcaaataagagtccagaggatggggctcagcctgcaggctctgccctgggctgtgtctgtcatagaggctcctctggcagtaagacccaacacaaaagcattgaaactaccccgtgctatgtcttaggccaggtcctattcatgggggaggcaaccccatgctggtgtctgtagacagaagagggaattaaaggatttcggaccctctgtactgcaggagccaggtcaggagaggggtcccctcttccatcatacatatcactgaaaatgagttggaagtaaaagaagaattcctctatatcacacagtcagatcaggaggtcattacttaagttaaaaacaatttttaaaaaacaaaataatcatcagaacatgcacctcctttaaataaaaggcccattaagtgcctttctaatgtcctgattggagcataaattggggcatgttaggtcagataaaagtgacctgtgtgataaaattatacattatgattacatatattatattgtttattttctgtttccttctttttctcttagtgtttttttttcttttctttctcttttcttgccttgcctttgccttgacagggacacttagaggatttgacaggtccagctacatcagatcattggaattggcatgaaaaagagcttctgggccttacataggtttttccaaagagtggggaaaccccaaggaattctgtaaccttaaaataaactgagattcattagtgcagaaacacagaaagctgtcttctgagtctcggaaactaagattttagatgaagttaattttcttataaaagaatacaatattattgtaaataatttagagattgcatataagacaaagaagaaaataaaatgagctatatccgttcctccagccatcaacaccttccacatttgtggcacatcctttcaggatgtatgtgtgtgtgtgggaggggggtgcttacctgtgtgtagtaacttcatgttatacatatgcctttttccctcaagggtgaccactgttgttgcccaggctggagtgcaatggcgcgatcttggctcaccacaacctctgcctcctggattcaagcgattctgctgcctcagcctcccaagtagctgggattacaggtgcccactaccacacctggctaatttttttgtatttttaatagaaacagggtttcaccatgttggtcaggctggtctcgaactcctgaactcatgtgatctgcccccccctcacccgccccttggcctcccaaagtgctaggattacaggcgtgggccatgacctgctttttattatcaatctataattatatgtattgttcctatatcattaaatattctcctttgacatttctaaaggttgcagcgtgttttgctttgctttatttttgattttatttttagagacagagccttgctttgttgcccaggctggagtgcagtgacacgttcataactcactgcagccttgaactccagggctcaagtgatcctcctgcctcagcctctcaaaatgctgggattacaggcataagccactgtgattggtctgttctgcttttttatatactatttctcatttaatcagcccccttttgatagccatttaggttgtttccaacttttcctaattccaagataaaaagagcttcgagaaatgtccttgcagctgtatctctgcccacatccactattctttcctcgggataaatctgcaggcttagaattgttgtggtaatgcagacagctgtcgccaaatagtcctcagaagaagttggccctcgccatgggtgagtgccttttcagcatactcgtaagtaagacattaaggaagaatcaggagctgttggtcccccaaatcagtttctcttcctctcccagcatatggctttaaaaatgctctgggaagatttcactgttttaattctatagagaaaacagtgtatggctcaagaaacccttataatcatgcatgagcagggaggatagggagggagagaactttctgcgaatgtattccactccacggcttcacaaatgcctggcatttattaagccgattgttcgatcttcccaacatcctctcacccaagcaaatgcccttgtaagctagagagctcgttccaaaggcagcactagaaatccacatttcccagctcacagaggtgctgtgtagcctgggggaagtgtcctttcactcctgggcctccatgccagttacctaatctggggggtgcacagaggtggagctgagcagcctgttggaggctctgcctcttgtatgacaaagtgaggtccctttctggtgctggtggccttcccagtttagccaccctttggattcctggaaaatatgaggcctcgtgtgtccttgaagcaggcaggacaaacgaggacatggcagccccttcccatctgggagctgaggcttctttaatctggagaccttaaaaggcacgtgggagccaggggctgggttcttatctcctaggcctggccaatgtccagacgtgccttatttatagcgccactgacaagggcagcgcagctggctggcagctgcacagaaggttggggccatccaaccaggcagtccgcctgcacagcagctgtccctgctcatcgggctggaggacagaagacagaaccctaaaaccacaggtaagggccactggttcccctgtgcccttctctcacccttgccatccttcccagcctgtctctgcagcagctctgtaggcatcttgttgcatgcagagggagtgtccagccctgggaggaagctctcaggcactgggagctcgctgaccccagcagagatgcaggtgttgctggcagctggctcccaccaacggcagagcccaagaacagaagccaccctgcccagagctacagggggtgtcagcttgaagatagagaacccctgctcattgggaatgaggagagatttaaataaaattgaacctctgccccctttcagtgggaatctgttttgaacaacggaaaacattttttaaggggaaagcaaaagaagaaatgttataaaataaacattggaaagggagaaaaccacagtgcacttgaactttttctccctgacagaatttccggaaagcctgggatgaaaagacaaattactgatgagtctgattactctgggaaagtgtgtttatgcaacatgactcttcgcagctgatggtttgaaagcccagagagctattgcatgctttaaaaaggaaatgcatgaatattttacaatttccagagcagggcaaactccaaaatgcacagtcctgagtaatgccctggccaattgtgtaataatctcaatattgataggatgccatatatatgataatagacatcatatatataaacatcctctagccagactccatgtaagacactttatcaagtctaatctaaaaagaaaaataaagttgtcagtccagtttatttttctaaattattctgacgtccaaagatagtgttaataaacacctgccttacagattaatgctattgtagctcatatttgctatatgtaagtttactatagttgtt

SEQ ID NO: 8824 - DNA, 6000 bp, Homo sapiens
ggaggccgaggcgggcggatcacgaggtcaggagaccaagaccatcctggctaacacggtgaaaccccatctctactaaaaatagaaaaatttagctgggactacaggcaggcgcctgtagtctcagctacttgggaggctgaggcaggagaatggcatgaacctgggaggcggagcttctatgagcagagattgaaccactgcactccagcctgggcgacagagcaagactccatctaaaaaaaaaaaaaaagtcatcataactactttttaatacatagaatgatggagaaaaaccatatgatcaactctagaggcagaaaagttgatttaatagtattcattcataataaaaattcttagcaaacaaagaaaatgagggaacccttctcctctcttatctgataaaggatatctgtgataaagatatgatatcatatttaatacccatccttttgagatcagaactaagactaagatctgtgctgttgactatcttgaagaatccatcttgaagaacagaatgaaaagccctgcttcattgaatattaagacttgttataaatcataatgattacggcaatgtgatattgacataaatattggtaaataaactagaggaatagaagagggagcccagagcagacctatgggtagatcagcaattgaattatgactaaggagccactgcaaagttgtgaggataggataatcttttctatgagtgaggctgtgatatcacttattcatattaataaaaacaacctatataccttcacaccataagataaaaacagaacttaaaaataactcataagtgagtaagaaaaagacaaacaactcatcataagaatgggcaagatatttgaattggtccatcaaaagagaaatgtcctggccaggctctggggctcacgcctataattctaacactttgggaactcaaggagggaggattgtttgagcccaggaggttgaggttgcagtgagctgagccatgattgtgtcactgctctccagcctgggcaacagaatgagactccaactcacaaaaaagaaaaacaaaaagaggatgtccaaatggcaactcatcatagaaaaaattgctcaaactcattagtcataaagaaaagttgaattccacaatgagatactgctatgcactcaccagaatgtctatctactgtgacaattctaatatactaattgtcaaggatgtgaagaactggggaagcttatgcattcctggtagtgataaaatcaatacaaacaatttgggaaactgcgatatctactaaaaccgaacatacatatatatataccatgacctcacaatgccactcctacatgtatacctcccagaagtgcatgcctatgcataccaagggaagtgtgcaaaatgtgcattgtggcagtattaataatagtcaaagctggaaacagcctagatatctttctgcagtaaaatggatcagtaaattgtggtattacatacaatagaaaaacaaaaagactacagctacttgcaactgcatggaagaatattacaaacgtaatattaagggaaccaagtcaaacataaaagggcgaaacagtatgattccatttatataaagagcaaatctagaaaacctaatctattttgtttagggatggatagttaggtgtaaactataaacaaaaagaaggatttgattattctgaacatttgaattgggctgggagtggtgtctgaagcctgtaatctcagtacttcggaaggctggagaaggaggattgcttgagcccaggagtttgagaccaacttgggcaacatgatgagacctcatctctactaaaagtaaagagctgaatgtggtggcatgtgcctgtggtctcagctatttggaaggctgaggtggctggattgcttgagcctgggatgtcaaggctgcagtgagctatgttcctgccactgcactccagcctgggcaatagagacactgcaaaataaaaggaaagaaagaaagaaaggaaggaaggaagagaggaagaaaggaagagaaagagggggagagagagagagagaaagaaaagcaagcaagcaagcaagcaagaaagaaactaacttttaattgaagggaggggcaaaagaggagtttccggaaggctgacaagaatctgtttcatggcctgacatcagtattttccttgtgataagccattatacattgttgtttatgaacttcttttctgtatgtgtgttatctttcacaatacaaagggttaagaaatttaattgatgagcagagagagagagaggaatgcaatgaggacacattttccaggaggggtaggaagactgggattcctgaggaaagacaggaaagggagggacaaagagtaaaaaaggccctcagaggaaaggggccaggggacaagctgcttctctgcaattttacaggcccaagtccaaaaggcggacagccacccaggggactgatattgctctttgatacccacatatctgctttattgtttcagaaatctgtccattatgaggatgaaaatttctcttttaaaacttctctttcatagaaaaatacctctattttcttaggctgtagcaggtctgacaggattctgtaccttttatactgcatagttctttatttagaatcatttcttgtaaaccacttggataaaaaaacctagttcctttattgacttgcttcaaaaatgtgaatgagctaattctaaaaactcttggtacagattctcaaggtactactgggagtaaatttaacatttagtgccaatctacaagaaaaaattatttagtttctcattctcagagacctgttccttttctttttgcccctggtaatctcaaggattacaatgtctacccattggggtcagaggacgagcataaagcctgcaaattgaccctccttggatttccactaaataggagaatgcttggaaaggggagacaaaatagagatatatttccagccaaggaatactctttcttgaggttaagaaattatggcaattatgctaggatgtggagcaggatgcaccattggggaatagcatttccagtgattccaaagacatatacagattccacctatccctttccccaagaaaaaaaaaaaatcaaaagtgtgctctctttctctctctctctctctctctgtcccacccccgccgtgtgtgtgtgtgtgtgtgtgtgtgtgtgtgagagagagagaggaggtgaggaggagagatagagagagagtgttgttgggagtggagacagtgtaaacttcagccactaattcatgtgctcaactatattattcttagaagaagtgactgcctgcaagagttctggataaaattgggataatgatgttaatgattaaagtttacttatttctttgtttctttagttcaagttgtctgcaactacatacctcatttgttttttgctggaataacctcagtatatctgtatgcttttaaattaaattcacttaaactcaggcatagaatctgtaattcagagaactggatgtgagtgagggctttgtctggcacatgtgtcaataaatgttagttatcaccatgattagtattattattttcttcctgagaaagagaatcaccattttgtcctagcttagccaaagtattgtataaactgcagtgtccccaacctttttggcaccagggaccggcttcatggaagaaaatttttccacggatggggtgggggtgatggtttcgggatgaaactgttgcacctcagatcatcaggcatttgttagattctcataaggagcaacctagatccctggcaggcatagttcaccaatagggttcgctctcttatgagaatctaatgcccagctgatctgacaggggacagagctcttgcggtaatgctggttcaccagccgctcacctcctgctgtgcggcctggtttctcacagtccatggactggtatggtgtggtccagggcccaggggttggggacccctggtataaaagatcccagagatcacacccgctgtgacccaggtcacttctgggccttaattttgacattaggaaaataaagaacttggattccctgaactgtgactcaaggattttctgtcttcacggagtgccccaggtttcctcacaggttgggaattagtgacccctgggttctccagtggtcggtgcctcggtgggagagaatgcactgagatgggggaggggagctgctgctttcttctggaggcagtgtttacctttccctgggcagaggttgttgaaattaagaaaacctggtaaagcagatgccagggacagatattacctaatttggtcaaagaacaaagaccctgtgaaacatttggaaatcctcaacggtgcatagggacgggcacacttactggaagagcagaaacaggatcacccagcatttcagagtagggttgctgcatctcagagggtgagcataataatgtcattactatttcgaacagtctgggtttttgagaaggaagcttctgggttggaatattgactccaccagctactagtgctatgttactagtgcaaggtactcgatggctttgagccccagtttccttttgtgtaaaatgagataaacatctaatttatggagctgttgagaggatggaataggtagcgtaaggcaacctggaattcattaatgtaagcttctctcattaccataaaactaatagtctttctaattccagacaccttcaggtttactcatgctttactgagaattctcaaaatctcagtagttttctataatgattggactccttgctccctatcaaccccccaatctttggctgcggagtggatggaagaagaggcacgtggggaaggactggggcaaaccctctggtgtcctggcctcctggcccggtggggactgtcatggcggcccagcaacagcttaggtgatctcagatggcagagcagaaagaatgcaagggtatgagggtcagggctgcgcggacccctatcccgcctgcggtcctcccggcaagcccagcgggagcgcccgctcggctgggtccccgcctccagcggcgccggggccgcccagaccctgggctcagcctcgcgccccggtgcccacctgaggaggcagcggtcccggcctcgcgtcccggatgggacggcgcgggagcaatgccagtggccccgagcgccccgggccacgcgcggggccggccagccgctctcgcgccctccccgccccctccgcgccttgcctcgccgcccgcggcccccacccaccggccgctcctcccctctccccaccctcctcctccgccccctcccctcccccgccgcctcgcagatagctcggccgcgcgtctcagccgccggggccccgagcgcaggcggcgaggccaccacacctgcagagcgctcgggctgcctagccggcacctcgcctcccgccgcgcaaaccccttctccccacgcgccgagtctcccatgacgcccgagccccccggccggcgacaatgaccacttccctgcaagatgggcagagcgccgcgagcagggcggctgcccgggattcgccgctggccgcccaggtgtgtggcgctgcccaggggaggggcgacgcccacgacctggcgccggccccctggctgcacgcgcgagcgctcctgccccttccggacgggacccgcggctgtgctgcagacaggtaggcaaccctggagggcgcgggggagtgtcctggctgggcagccggcgagggggtgaggaggcggtcctagggggtgagccatgtgcccagagctgggccaagtttgtaaaagtctctgaagacaatcccctttgagctggctcctaccggatcagcaggacattgcgatctcacagcgccttataaatagcatcaccgtttcattgagagctctcatctctctcgcctctgcccatcggtggtgaaactaggagctcaggctgcagg

SEQ ID NO: 8825 - DNA, 6000 bp, Homo sapiens
cctaaccacccccagcccaagttggctaggcaaaaagaagaggaagaagaaaatggtaaacatgtgcatgccacacctgtttactcttctctcctgcccgccttgccacaattcctctgaagacgaacacccaaaggaaggagagggtaggaatggcacaggacttgctaacacctccagctgccaggcctcctctcaccagttatgaggaaagccaggcttcattcttaccccacccccaccaactctcacctccctcagccttcacaaaaaaactccacccatacctccccaatcctatccagaagcatttccaaagtcccttcttccctttaaaactagtctcctgggccaggcgacatggctcacgcctgtaatctcagcactttgggaggccgagacgggcggatcacgaggtcaggagatcgagaccaacctggctaacacagtgaaaccccgtctctacccaaaatacaaaaaattagccgggcgtggtggcgggcacccatagtcccagctactcgggaggctgaggcaggagaatggcgtgaacccgggaggcggagcttgcagtgagccgagatcgcaccactacactccagcctgggcgacagagcaagactctgtctcaaaaaaaaaaaaggcaaaaaaaaaaaactagtctcctccagctctgctgaagccctgccacaggagtcacattccaagtaaccggaaagaaaatacagaatgaatgtaatccatcatttgtggataccctaaccctcgccttatagtaactctagttactagagcaactaggaagctctcctgaaatcgtagttcattttctggtgattaggttactttcagaaattagaggtttcatttatactaagaaacttaatatgaaactactattcccacctaatgagcaagaaatgctttcacttattaatatatcttgccagggcgaggcacagtggcttaggcctgtaatcccagcatcctgggaggtcgaggcagagggatcacttgagctcaggagttcaagaccaacccaggcaacatggcaaaaacccatctctacaaaaaattagccaggcatggtggcacacacctgtagtcccagctactcgggaggctgaggtgggagaatcatctgagcccaggaagtcaaggctgcagtgagccatgattgtgccactgcactccagcctgggtaatggagtgagaccctgtctcaaaaaaatagagagagagagagagacagacagacagacagacagacagagataggagaaagggggagggagagagaggtagggcagagagagagggagaggagagaggagagagaagagagaaagagagagagatcttgcccatctggctttattctgagacccaccgagtgaagcctgtggcagacaagagtggtttctatgaaaaaaatataaataaataataaataaaaagtggtattcccagatgtgaaggcaaactacaacaatgacaatggcctctctattgattggcagggtcaatttggctgacaagttggctggtcaggtttctcatctccaggtgctctgcttccaaagctgggagtggtacaaagagattacatggtccttgcaccagagttcatctactttactcaaccccatagttttacattcagttctaacaaatttagatggtttccaagttcagttaatcagacagaataaatcttcatagagagaaaaacactttattcattcaacaactatttgttgagtgcctaagaagtgccagacacttggagattcagcagtgactgatacacaatgaccccatctcctcctggcttatgtgtgtttggtgggaggcagaggcagagggttagacagtagaaaagtaaattaaaattaaaataattgtaaataaaataattacaacatgttacggtggctaacaaggacataaacagagctgaggatcttgcattctcagaattatgaaaagcaatattcaatcaaggccaggcgcagtggctcacacctgtactcccaccacgttaggaggccaaagtgggagaatcccttgagcccaggagatcaagaccaacaacatagcaagaccccatctctacaaaaaataaaaataaaaataaaaaaattagccaggcatggtggttgtgcccacatttccagctactcgggaggctaaggtgggaggatcgcttgaggcctggagttcaaggctgcagagagctgagattgtgccactgaactacagcctaggtaaaagagtgagaccacatcacacgcgaaaataattaaaaaacaaaaactaaaaaactaaaagcaactgatctttgagaagtgataactgcattctcaaagtacctaatctcaacaataccctaacttaaaacctgctgactaggagatgtatttgactgcaaatctggcccacacaagcaataatctgagtttccatcaaggaagctgtaagcaccaagtagagcaaaaacaaatccaggcctcaaatggaaaaagcagctctgaattgtgattttcgaagaaacctgcatttcttacacttcagtgtactttccccatatttaactccaagatttttgttaatttgtttggttttcctttctcaaacaaaattatgctcagactgaaaaccctagatttgttccctattgcatcttcatttcttcccaaacattccataaaacgtgacctacattaagttagcaagttaagtctgaaagcgtctaccttccctggggagggggaaggtgtaggcagggcagagatttgtagtccagccctcttgccacaaattatgaattagagaggaatgactttgcttttttaatgatctccagagaattttccatcatttccctctcttcacccagctcctttgcaaccactgccagagaagtcttcctttagcttcttaaacatcgatcctaaaacacttccagacacctgtgctgctcctttcagttcccatggagattaggctgtgtaacaatctcgcaaagacgttcccctccgtctcctcatcctcttttcaaacccttttacgatttcccatctcactcagcatgacagtcaaagtccctgtgatggccaacttctgcatcacctagccagtctgccaccgccaaaactctccagcctcatctttctactcttcccctggttccttgcccacgcctttacacttgttctctgcttggaatcttccctcccctccttgaggaactttctcaaatgtcaccttccctcaatactccccctcctccatttaaaactataaacttccaactctctaagcccctaaagtactctatatttaacttattgtataaactactgtccctacttgtaagttccaagattgcagggattcacccgctttgttcactgctgtctgccaaggtctagaacagtgcaagttacccaacaggagttcaataaacagccattcatttaacaaatatttgctgagcacttcgtcccgtccaagtttgttaaatcaagacaaataagacaccgtccctgcctttaacgcaccagatggagaaatgcaccacagacataaatgtgcaatacaggcctgacactacggccacaagcaagtcaaagaacgtgccaaaagttcagaggaagaagcctcggcttcgcctttcgggagaccagtccagctttccaccatcacgctgctcatcagggaccatctccgggggtctcctctagaccccaagggaggagcgggtcccgcccgccattcccaggtctcagagtttacttgtccagagatgcaacttccggcctcttcaggccgggcaagatttaaggaaagaaaagaaacataaggacctccgttcttcggtctccgtcccctccccttcccccgcgtgccgtccccacaacgggccaggactgaacccaactctcgaccaactcccggcagcaaaactaagcaccctacttccgttgtccccacctgttcccggcgtccccttcggctactcccggcgtttgcgcaagcggtcccacgtgggctcgggcggggctagcgccgcggcgggggctgggcacgcccctagcgcatagctggcttctgattggctttccggtgctcgcccgagcagggttggggcgagtggaccgcgcctctaaaggcgcttgccagtgcaatctgggcgatcgcttcctggtcctcgcctcctccgctgtctccctggagttcttgcaagtcggccaggatgtctcaggtacagcgcgtgcacagccaggctgcgaaggtgcagcgggcgggaggcccgttgggggctcagccggctgccagaagctctcgggctctttccttccgtgcccctcacttgctcatgggcccatgcctagccctgattcgttggacagagccttgtgagcgggattttccgtttggggatttctaaatctgctgcccaccccgcaactgccggaaagttgcccatggggtggacttcgctgtgtagcgggagaggggtgggagtcgagggtgcttgatggagagatgggggaaggggttgcacggattggaggagcgaggagactcagtccccatcccgaagcacagggcaggacgtcgcggcggagtggggaagcgaggagtccgtggccgagagcttggaggtcaggggaagtacggggccggctgctcagagtgcgggacgaggagaatcgcggcccggggagaggtgacccaggggcccctcccttctctccagtgtagacccttgtctgagaccgagctatgtggggcgacctctggctcctcccgcctgcctctgccaatccgggcactgggacagaggtcggtgttgaacgcgcgggccccagggggagggaggggaccaacgggctccggcgctgacaccgcggcactcatgccctgtcccctttcagctgtttccagcatactgtgccccgtctgtcctcaggccagggcttcgctgcagccccggccactccctagtgcctggcccggtggtggccaggcagttggccgcgctgcttctcccgcagaggggacccccactgggggcgaaggcttggcctgccctcttcactgctgtatttccagacctgatgcctgcgtttgtgagagctctggatatatggttttcgattgaatgagtgaactggaggggcttccccttcttgtgttgctgaatctttctagctgccctgttggggcagggaggggcagacacacttcaggggctgcattgcccgaagggtgccacctttcccacctctccatccccgtaactgggctgtcatcaggccacagtaggattcttaccctctcccacccagaggaggccctcaatcctctcctctcccttccatttaggctgagtttgagaaagctgcagaggaggttaggcaccttaagaccaagccatcggatgaggagatgctgttcatctatggccactacaaacaagcaactgtgggcgacataaatacaggtatgcagagcgggggttggaagggcatctgctcatcaaagcaggctcagcagctcagactggaagtccctgggaacttcactctcaaactgcctgaggccctactcttcaggtggggtatggtgatggttcctgaggtggaaaagaccatgttccggattctcagtgtctccagtagtaacagaattcaaatcctggttttagaaggtctttactggttatcaccagcagctactctctactagggaagaagcaaaggctgcagcttggaaaagacttgctgaaggctctcagctcagtagtatcattgttgagccgttcagcttctgccctagatgggcaggatcaaagttggagcactttttggagcacttgacagcctggccaagcctgatgtcaggagcagagaagcacctggtttcttgggctaggtcagagcatttcgctaacaagtctgtgccttcctgatgataactttttccctgccc

SEQ ID NO: 8826 - DNA, 6000 bp, Homo sapiens
gtttggatcctgcaagatcgttcctgtaaccagatcaagttcctcctgtttgctggaggcccttgggtctcccgtcacaactgcacccagctcacgggcacaggcaggtgcataccctgcccgtagagtcatctttcatagacttccctgctggatccgggcaaatagtgtttccagaaaaagcgaatccagctttctgtgccaccaccctgggatctggtactgtgtcatgggaaggcatgcagggacttgcctcctgaccccactgccaggaggggtgctggtttgatcactcctgaccccttcccgccagcatttatgatcttagacacttactcaccttccaaccatgtgaggcaattaagaatgattgcctctgaatcaagggcaaatcatccaccagtttcctggccaaggtttgagtgggaggaacagcttgtgtgaaatcctttaacggtgacaaaatgcttaacaatcttgatggcagtggtcagttagggtaacgaacatagggcggtctgacctccagctcatgttttcctgtgttcactttctacctggtaatggtgagctcatcctaatccccctggggtagcccccatccgggtaggaggctactgttggcccctgcacagatgggtctagcccaccagcctcccccccacgaccccaccacagggtggcagttgcgagcacacgcctagaagccctgcctttctttggcctctcccagagaatgaaatttcagcatttgtacagctcagacccactggctgaaacttctacctcctggctcaaacttctacctcctgcttccctgagtgaagtaactgacagaggaagtaatacttccaactggattttagagttcctgagtctagtctatgtttagtctatctctatttccctgtccctcccccacgccctaaactgacatttcgtaggtttctggtaaattaccgagtccagagttggaagccctaagtggtatttattttacttcaaatcacctttagtcatcagaatcacctggagggcgtgttaaagcaggagctggcctgagaatgtgcacttctaacaggtttgcaggggatcctgctgcactctgggacaaggctttgagacctgctagccgcaggaagtcttttcctctctttcctcccttcctagctgtgcctctccctgaagcccacctacaggagagacgggaaaacgttatgggcagtgttgtctcaagaaggaatgtcaggataattggaataaacaaaagaagaacttgaataactgatcacagtcaccgttgatcctttccccaggaaatagtactttttgtttttattttcttccatgaactagccttttatccatagcagagaggttttctctcaagaagaaacaggatctgaacaggatctgaaccttaattcttcttctggtgggagttcagtccatttccttcttattctggattaatttcccctttgccattgaataaaacagaggactttacaaagggcctacttcatgccaagtaatgtgttaatagttctaagtggtttatgtgcatctcaaaagaccttcgccacaatttcacagactatatgttattagcccattttacaaactagcaaactgagggttagggaagttttgtagttactggagatcatagtagtcatagatagaacagagattcaaatcctggcttgacttcaaagatcaagctatgctgccatagacagcattacgctttctatagtgaaagacttgtcacaaacaattctgtgatctgtcacttattcaatacacatatttattaagcacatactatgtgccatgctctataattaattaggtcctaggaatataatgatgtacaagatggatggaacttttcaaaacatattttcttagattgtctcatgaaaatttgtttttaatactttgtccttcgatggaattgctcatgaaagcatatgtcattaaacccagaaattgcattcccctcctcaatttcttgccatcctcctttgacttactattaatatcagtttaacaaatttgtttcctattttccttaaaggagtctgttgcttttatttttaaaatatatttagtttttgggccaggcatggtcgcccacgcctgtaatttcagcactttgggaggccaagtgggtggatcacaagatcaggagatcaagaccatcctggctaacatgatgaaacctcgtgtctactaaaattataaaaaattagccgggtatggtggcacatgcctgtagtcccagctactcaggaggctgaggcaggagaatcgcttgcacctgggaggcagaggtttcagtgagccaagacagtgccactgtactccagcatgggcaacagagcaagactccatctcaaatacatatatatatacacacacacacatatatatatacacacatatatatacatatatacacatatatatacatatatacatacagatacatatatacatatacatacatgtgtatatgtgtgtatatgtgtatatgtatatatgtatatatacgtgtatatatacacgtatatatacacatatatacatgtatatgtacatacatacgtatatatacgtatatatatattcgtgtatatatacgtatatatgtatatattcgtgtatatatatatttagtttttgaatgagtacattaacatagctcaaaatttacaagaaataaaaatgtgtacagtaaaaattaatctcctttccaccccatgacccctagccactcagatctccccagaagcaaccgcttataaatatacattgtcttcccccgtcctttctttgctcatgaacacaaatggttggtttctacctacaaagtgttctctacttttatttttctcagttgatttatcttggagatcatgccaaatcagtaaatatagttacctcgttcattttaacagccgcatatgtaaataattctaaaatgcaccatactgtatttaactaagcccttgttgacgaacacataacatggcccagtatttttctattacaaacaattctacaatgactactcttgtgtgtctatcgttttacacaggagcaagtatatctacaagataatttcctataaagggaaatgctgggtaaagagaaaatggtatgttcatctgtaatttaaaaatgttttcattatggaatttttcaagcattacaaaaggagacagactagtaagatgaactgctgcatatccatcatcaagcttcagcgattatccacaatccatggctgatagtatttcgtatatatataggccctatccatttccccaccccaaattattttgaaacaactccaggcataatgttatttcactaggaaatattttggcactgttcttgaaaagcaaggacttaagaaaagaaaaatatatgtgtgtgtgtaatcacattatcacccctaacataaattgttcattaatactagaaaatatcctgtcagtgtcatattttccaaggttgtctcataaaaattgattttctactagtttattctttgattagaatccaataagatccaaaaaaaaaaaaaaaaaagaatccaataagatccatacatggcagttggctaagtctttttttaatctcttggttctgtctccatctctcttgtttttctttgtgcatcgttgttgtagaaactgggtatgtttgtttccagagtccggattttactgaccctatcgaatgaccacagggtcatttaaaatgttctgctacccattaggtcaaaaattaaacacaaaattaaattgcagaatttcttaataataaaacacaacatagctgaacctatgtgacacagctaaagcagttattagaagaaaaataacagaactaaataactctatcagtaaaaaagcaaagctaaatggattacacccgtaagtcagaaagctaaaaaaaaaaaaaaaattaaaatataagacaaaaggaatcagaaagaagataaatgcagaattaatgtttcatcattttagggcttgtttttacaaactgaagcttaagactcaccatttgagaactaggagaccatttcctaatttgtaacgatatcaacaacacatctaggtagctgtcaggggctgggagccttttctacacaaactttgctctgaatttcaaaatactagcctgtcttgacacttagtggaaattcaggtagggtggccttaactcaggttcttcaggaaagcgtcctgtttcagggacacagtggggtggggtcgggggagggctgtattccgcacatctagttctggctgggcttatggcaagtctcagtcctctggagtcacctgagtgactgagggatgagaggcatttctgatcccgtaatatacttacatggctttgccatctaccacatcccagttcaaatctcagctggcacagttaccgttcacgtggcctggagcaaatctgagctgaactttcctcaccgtaaatctggtaaaaatctttaccttaaaggagtgtggatcaaatgagataccaggtagagctagtgctcaccgagtggaagctaaggtgatgaagcccctttattctcaagttctgtgattccatgatggagacccatgaggcctaccagacggagagtatcaattaaaagaaagcaatcacggagttcttcccgccttctctggaggatgtattcctatgagctgccccgaatgttaaaaataatacacctgcccccaaagtgccgaggacgcctttgtggtccacctactcatcgtccaccggtttctgcaagtggaccggttacctgctcaggagcaaatgtttccatcacgacgcaccctctcccagggatgggctcaacctgtgctctccctgcgacaatgctgaacagtgccatctgtccctacccagcgtcagcgtcacgcagagggcccgggcttggaatgtgggaggcacgctcccagctcactttggttttcccgccctggaggggaatccaagatgtctaactagtcttctggccccgagagggagaggtggggataggaccttcctttagtcccctccgtagtggaacgaaggattctttatggtcatctgtggtgttcatttcgtaaagaagcatctgcagggtaagaaggaaaaacgtccaccttgcaaatatatcccaggcacatgcctcctgagaagtgaccccctcctccctccgcctcccccggcacgtcctggggcttctccagtctcccgctcctgggaccaggcagagatcccggcgtgggcagacccctgccaccgcgcccaggcctcgtccgaaactcgcgcccgagagcccacgccggaggcgacgctcccgataactactgtgctcccaagacccggagggcacgaagaaaggagccctggcaaacaaagggtacgggccgggaccgccgcagcccggggcgggggcacggcaaccgcgaggcctgggggcgcccgccccccgcgccccacgcccggtgccagcgagccgaggcgtgcatctccttatatggtcaaatgacacggcggggtttctcgagggcgggagctgcgcagcgctccactcggccggcagcggagccgcagccaccagccgcccgcgccctccagccccgtccgggagtccccggcccgctgcggtgccgtgagtacctccaaccccctgcgccccggagggaggccgaggggcttagccaccagggctcggaagtgggggccgaatccggtgcgagacccaaggagaggggagcagagccggagttggggagactggtgagaggagagcagagctgtgggtccgggaagaccactgggagaggggacccgaaccgtgcggggagaagccgggagaaaggagttgagctgtggggtagacccgggagaggagagccgaaccctgggggttgggggtggggagaccacggggagaggggagcggagcaatgg

SEQ ID NO: 8827 - DNA, 6000 bp, Homo sapiens
catttagatttagtgttcacactagtggtcactaatagagctgtgtcagatagtgaaagaatatctacattttcctgtaaagaagactttgtgcttttgttcagaaaaaaatcataaggctaacaattgttaagatgagaaaggaggcttgtccactatgtaaccggagtgactagtctttccacattgattgtatgtgaacataaggcctactgtgtacaaagaacactctgctaggtattctgggagaagcagagaaactaagagactcagtcctaaccttaaggattatatttgtgttgagtggaaaaagtagagcctgttgaaggatttataagttatcaaaacaatgcattagtaagtctcaggcaagaaaggagaaatggaaaagtttaagtcctaaaaaaaattacaaaacagggagtgatatgatttatatggagggatggctgcttgatggaataaattttgatctatgtctttgagagagatgatgaacctagctaggcaatgagttatcccaagggggcacagcacaatagtgtgagatacagggaaagatgaaaggacagtgcaagttgtattttgtgtgaggcaggagattggctggattaaaaaagtatttgtaggacttgatattcaagaaacatctccttattgcttttttttctctgtataaagccactgggggctttatacagtcagatagacactgagatggtcagagagaagttagacatgccactgccctcaaggaacctccattctaaataatatagaatgcatccacataggagacagtagctgaagtttgaataaactggtgtatgagaaagaataaagtggtagtattgcaaggacaggtagggtttgaatctgtaaaatgagatgaaataatacttactttgcagggctgttagaataaaatgaaataacatatgcaaagtgcttaacacttaatgggcaattgatatgtgtttgtcatctttccttccttccccacctctcaattctgacataacttgtatataaaaaggagagatccttgaaagatgcacagaagtgaaattttcagaagaggtgtgactggccttgggccttcattgtggggcttaatgaactgaggaacattatgaacaaagaggtgggaatacagaacatgcttttgggagcttcgttgaagttgagtgggagaagagatttgaaagggggacttgaaacctagaggttggatggtacttttgtattagactggtgcaaatgtaattgcggttgttgtcattactttcaataataaaaaccccaattacttttgcaccaacctaatagcatttttcttctgcccagattccactttgtatactataataactgatggtttatgtgtcaccctgcatcagctgttttggtaaagaggagtcatgagttgattaactttgaattctccataataaacagcacagcactttacacatagtaaggtcttcaatacatatttataaagcaggttaatcaaacaaatgcttgggtacgtcaggaacaagggctgtatgaatgtgacattttatgctaatgtatcaagctatgtatttaataataaaatgtggaaacacatgttgtagagtggaatagtggggtgccttggagagagccagattacagttttctccctggcttagtggctatggactttgtgaacttggtcaagttcttttgcagtatgtgcttaaacccaagaccatttcttagctgcctgctcttctggccttaatttcctcatctattcaatagctagtaccttatagagttgtgagcattaagtgaaaactagctcagtgcctggcacataatgggtgctcacataaatattattgataatcacaataatagttatttttatttttcctaattgaaatattgatatgaaaatattttaagtgacacatttactcttgttctatccaattatcaaataaaattctaaataatgtacactgctattctgtaatattttattgttgactctgttgtgttaaaaacatcttataatgttagtttcgtttttggagataaaagaccaattctctgcagcgggagtttaaggagtgttttgttagtgtctgccttgggctcttccaggccttctgcaaacttgatttcctttgatcctcacagcagttctgaaagttttggtcatagttttttatcctcatttttgcaactgaagaaaattaagggtcaagtgacaaggttagtgagtggcaaagtcatttataataattaatgagaaaaaagaataggctgaagttaaatttggaatcagtgtctaaaataactaggaagtaagataaagcacagtcaatatgagcacctgcaaaggattacagaaaaatgagattccacctgtcttaagtatgcagggtgctatcttgttcagtctgctgactatgaaaagtatcggtaagcttcatttttcaaagacatttgcctttttgataacatagtcacaaaatgccaaattttgctcttcataattttccctgaaaatttagaaacttagttttccagtgttctgaagggatgacctatcacacacacgtaaacagctagtcatctattaagtgtttttaagcccttttagggcatgtatatattgcactgtaatctatacaggacctggatactgttttgaattgaagcgttcattttatacatagtgtttaacaggctttatggtgtgatacaaaacagcatttctaacttccccatcatctagacttcaaacctcagagtaaactttgagaccttgaccctgtgttcacatcagttttcaagttctgcatattcctcacctctattcacttttcaaagcaagtgccgtttccttcttgcagcctgccctgatcttacccctattgtgcagttgcttctaccttggtgcacccttgatacttagcatttaatcactgttagtctcaacttaccactgaatgggatattttaacttaaaaattaatatctctattccactatgagacagtgaccttaactgtcttaataatagtgtgttcctactgcctgatacagggtttggcaaatagtactttgcttgataatttagtgaaatgaattactttcattatgatggaaccccagtaaaatttttgagaccagagataacactttttttttttttttttttttttttagatggagtcttgctctgtcacccaggctggagtgcagtggcgcgatctcggctcactgcaacctccacctcccgggttcaagcaattctcctgcctctcagccttccgagtagctgggactacaggcacgtgccaccatgcctggctaattttttgtatttttagtagaggcagggtttcacagtgttagccaggatgcagagataacactttgtaatatttgaaggctaaattgagaaaagaagacagataaggccaaatattatgggtgatattcttgaaattatttgttaccatggtctttgttattgttggcttgctgaaaagtagctcaaggttagaacagaatcttttacttcacaaatgctaaccccccatcgctgtattagttggtatttgctttcttggtaattttcttttaaaagatcatgataaacctaactggataaggatcaaattaattaatgcctccaaaatagatctgtgactttttatattaagcgcattactgccactcccaactaccattctgagggatttttggttttgaaattcaaagcagggatccttggagttgtagtgtctcttttttcttttgaggaatatgagctcaccatgcatattaaactcacttatgtataaagcagtaaagtgaacactgcctagtagcagtcaagataacgaaatggaaagtttgtgtctgtgttgctgagtatcttccattttgccttgttactacaacaaccacattgtaatctggaaattaccagttcttctcccgctgaaggcagtgggtcaggattgaagagcattgagcagttcagtgaagcttgtccagatgtcagtccagaagagattttacaattgtaaaagctcagattagttttaacgttgcaatcctttttgtcatttttgagtgtttctttcattttttatttagacttcattgaaatttttcttgttagttatagatgttttccattgtaaacctcctccagcctccctcccctagaaacattagaataaacttttcagtttttatgagaagaaatgcaaaatggtcattaaaattttgagaaagttttggcagtggttattttttaaatgcttttaatggaatgaaatatgctacatcacacacatttgtgctttttaaaaacataagtatttgagattgatatattgtagtttaatcccctctttgtatttaatactattatttaggtttattgttaaaataatatttaacagtgtgtgatatcaaggatagctggaaggcttataatacaaaaattttaatgtttaggaaatgaaagatattaatatatattaaaactcttttattataccatagaaattaacactttgtgccaattctaacctcaggattattttttgtgccttgtgtatgttccagttgatctcttcatcaattttatgaatagcataagtaaatttagttcattaatatatttatatactttaaatagaccaatgtaaacagattcttatctgccatatgttgaaatgctttagtaaagacataactgcctagtcaacaaagatggcattgaattgcactgttttggaaaaaaagttgagcgaactagatgcctgttaatctggttctttaaatatcataaacaaaagtatcagaatgtgtttccaaggacaaaggcggggttttccgggctttgattggttgctgccttgtcctgtcccacagccatccttaattggctttgggtagattggaatcacataagcagggtgacatttattactttcctagttgtttcattgcactgagccctgagattcccaaggagtaaccataaaagatttcttttattttgtccatgacctacgagacaggatcattctaagaagagcaggcatgagtttgagtgcaagaagagtcactctgcctgcaataacgccaataattctacagaaaagggtatgtgacttctttatcctttttttctttaatttttcttgctgctttttttcccctgttactgtgtgtttattaatacataggaagctttacttacatacccttgaaagagcctataattcattaaagttgtaggtaaaattaaaggacatattattggaattgaactaggaaaaataatactgcgctaggacatcgctatagttaaaaactttcacctaaaagaagtttgatctcgatttcaggtcactgtgatttagagactgtattgaaacttttccttttttttctttctactgtaacttcaagcctctttgtttttagctcagtaggaaatctgctgttatgtcttatatttgtttactaaggaatagtttctttgtttcaccataattcataatatatcaatctcttcattgttgaatagactatacaattattttactgtttaaacatgtgttaccagtttattctcaggtttctacccatttctattgagcttctgcgtatttgcttaagaaaaactttccattaaattcccctgtgaaagggctttctgttaattattaatgcagtcaatcctgtgtatgaaaatattttatttattagttttttgtaaagattatttttatgtctcacttacagcattgcattttacaaggtggtatatgcaaccatgtcatgtagtcatagtaaacttttcttgtaactctccaaaataagaacattgcactggacttcttaaagaatcaaatctgtcgcattgagaaggaaggcactaaaactcagttttggcaatatgcttaccaaatggttttggtgacactagaa

SEQ ID NO: 8828 - DNA, 6000 bp, Homo sapiens
aaataatatgtaaacacatgtgaattgtggaagaatctgaaaatttcggcaaaatgaaaaaaattcaggttcttaggtaatataagaccatgtaaaatgcatctgaacactctttgttcactaatagtttggttgcttatgatgaagctgagaaattgctataggtacattttgattttttcttatatttttcctatatgacatttgccatctttctttgacagacagagtgcaaactcaataataaacacaaagatttttcttgtttgttgtcatttgagaatgtatactaaaatttacacatagaacactgtgaataatgattattttagcgtaattcttcataacttgggatacaaaaggacacgttaaggattagatacaagattaactctgtaagtgtgatattgattattttcaagttagggatagaaatgatacattcaggatcatttaataaaggcagtgataattaggcttaaaggctgataattggagaagtaataagttgaggcatgcatatatttcttgtttatataacaagcaaaggaaaattaggtctttccatagaaacaagtcccctaaggattttaaatctctggggtaagggtgagaaaaatgctattaaaagttagtcattttgtcttctggtctacctctgatttttgcagaattttttaaaatttaaatagcactttgctgaatgatgttatctttgttctcttctaaattatctctttgagtccaggggctatgtcttattatttgtttctgtatagttgctagcacatggtaggtactcaaatttttattgaattgagttaaattaaattaaggtgctgccctctagaactcagtctagatagtaggccttctatgagtttccctgtaggaggcaattgggacaaagagtgaaaatcaggtctttgttccaatcttcagaagtggaaaaaccagtcatgaactaagagaagtgggactaagagagttttttaaatgtggacattagcccaatgttggaatgggcgccctaattacttattttatatattccttttcatagttgatgactggagtcactatggggttggagtccaagaacatctgtaaaaacgtagtgtcatttgacacctttaaattttagtattatacaaagaagttccttatgatatgccaggttttagaatgggcattcttaccctttttcttaatggttaagtgccaccatttttaagctgtcaagaaagcatttttggtatttcttgggttggtcaaattcaacaaaatacttttgtactgacccttgaacaacagaggtttgagctgcatggatccacttatatgtagattttcttctacctctgccacccctgagacagcaagaccaatcttcctcttccttctcttcctcagcctattcaaagtgaagatgatgaggatgaggactttatgatgatccactttcacttaacgaacagtaagtatattttctcttctttatgatttgcttaacactttcttttttctagcttactttattgtaagtatataaaacatataacatataaaatatctgttaattgactatttctgttattattaaggcttccggtcaacagtattgtagttaagtttgggggtagtcaaaagttatacacagattttcaactgctcagaggattggtccctctaacccctccattactagtagttttaatacaaactttagtcaactgtatttggcaagggtcaactgtatttgacaaatcttcataataatgctttaagttgttgagaacatttgtataggtctcaagggataagagatacaaaggaatgaaacataaataaatgacgtaaatatatgcattttcgtatgtgaaaaatagtaattttttgaaatatcattcttgaactggtaatattaccactaacatagtattactgttcagactatatttctgaactcaatgcaacctaaaatttagttattttatgttaaaaagggccaaagcaaagaactttgagagctaagccagaaactcaataccaccaggactgaaagtgttttcttgaaatatcagtgttggcaatacctttagaatccagtgttttcttccaatacaatcaatactagatggtcttttctctaagataaaaattatattaatgtgcatatcttaacaccaggggcttaaaatagcaaaaggaggtaggaactgaaagtacattgaatccacgctgatttgcttacttaagggattagtaaaatttgaggtcagcaagagtccgaagatacaggagagatcaaggaaggaagcacaccatggtggctgtattcctttcctactggtcacaacatgggcagctggacaggaaggtggctcttctgtttagtactttctgttattcctctgtctatacagttggcttgtggccgatccctacttttatttcattcttcagagaggaaaattccactttaatattgctgtgcatgacaggaagtagcatagtacttcacacatagtaggactgactgagtgaaaatcagactattgtctcattccagtagggtgtctggaacatttagttccttggataaattcagtcttgcaatactttaatgtgatgattgaaatcattgctgtcaaattgtactaatagaatctcattggatttctaaataggagcaggctaaacaggaacctatttttataatctcagatccaaggaaactttactgtagtggaaagatctccagactggcagaaatataaaatttacctgggagtatttttcaaaaagtatatcctcacctacttcttctcctcacccccaccaaggacatatcagaatctccaaggcaggtaatatgtagttgagaaaaagttgttcatgcaatttgtatttcctgttcccatctgtttctcttcactttctgaatttgaaaatcaatggagaagttgagctgtaaaattctatgattttgttagtaaaaattccactacctactgatggttttcttcctaggagttattagttttatacatatcttcttcattgggacttatttagtatgtggatgtattctgtcaggtcattggcattaattttcgtatattctattagataggtagcagattaaatgaggatcattttctccactttgttgtgctaggctagtatttgacatcttggatcagagaactttagatacataggctttcttgatctttagaagtagactgtctgctgttgcaaccctggctgagtcctattatattggcagaaatagtagctctgtcatatcgtaagcactcaagcaatggttgttccagaaaagtacctttgtagtttaataatatacattttaagaaaatattgataaaaagtaattttaaatacaattttacttttattttggcttttggaattaagggccagactttttcttagttatatttaaattaactttgaagaaatgtcagtggaacaacataggcttctcaatgggatagaaacaatctttctaaagtgaagttattatttttattataacaaattgtttgtgattgttgattatggtcatttgaatgagaaggtagcttttattcatcagtctgtggtagaaaatcaaattgaccccaatatcagtaaattcccagtcagatatcttgttatttaaacccttggtatcaactcagtatgctatgcagaaagtagccacttaaatatattaatcattagggttttaaaataaatgttttcttataaaaataataaaagcttgttgtaaagaattgtattgagaaggaaagcagataaaagttatcgataattctacctgcaatgagcattatggaaaattttggtgtattgcttaaaataatttaatattcattcctgcttattaaaggttttagaatctggtaaaattattcttatttaagacaaactatgttaataatttttagtcaccctcttttaatccctgaaagttctttattactcttcatttgtaacctccatacacttagtctggagttcagtgatatatgggcttcattacttaaaatactctagatctataatcagttttaggaaatatgtgtagtcacttgatgatcctcaccaactacttcttcctacaaaagagcatgtcttttcttctgtggattatttaaataatcccctacccctattttgttgagacttttaggcaaagggatatatgcttgggctattcttgtcagattcattgtcttttcaaagtgctttagtatcctgatcattcctactatcaaaatattttctttctgtcatttttgttgggaaatcatagaaaaacatatactttatttttaataatgtgtgacttacctaagtttttcacttttaaaatactgcaaatatctgtccaatccttactgagtcaacagtgacttaaatgcttgattttgttgtcgttggtggtgaatagttcagcctcactaagacatgctaatattaaagtcatcttatctgttttaaaagcccccaggtactcagagcggaacacctagtaaaccttatttacatcatcttgcttgaattatgtctcctatagggttctgagaatgaagcgagtacctcaaagtgtcaaaatcagactgatctggttggaggccaacttggactagtctatatgaaaagtgagcatcttaggtgagatttttaatgcccattagacttgtagcattgcttgctgtattttatactagtagccaggtgtgggcagtgatacagggcttgggggatctctcttaccggcccagggatccaaggcattcagtgcaaaacctggccagcagcccgagtgagtaggagccatgtgactctggtgagttggagtgtgcaattgcctcctgcttcagagctacctgatccgaatactaagcagagcgagtgccgggctgagtgtaagacactgaagacactgcagagcaaggtgcttattccagaggcgttacaaaacatggagattaaagaccagggagcccaaatggagccgctgctgcctacggtaagagacaacctgctatcacatagattaaccgcgtttgctgcaaaacctgttaggcaagcggtctgctagctaggtgcagcgagtgtacttttggggtggtggatagctcctacgacatatggacaggggtctcctcccatcttgggagactgaaatgcataaagcaaagcacacgattctcctcccccccccttctcaatatggatgcactacggtgatgaaatgtctcatgtttgctgctgtttgaagaaatggctaggttttagcagcaggggcagttacgtgtctctctgcctgcctgttactgcttatctctctgattctcaggctgtgtgctggtttaagcccttgcagagaagcccccttttatcatgtttaatccctatcgaatttcctccccctgcctcatccccaggcagtgaggtgagggaatctgctgctgttgcagctctagagatttagtctctacagaaaccaggggaaagaacagaaggatcgtgtgtgtgtgtgtgtgtgtgtgtgtgtgtgtgtgtgtgtgtgtgttctgtctctttctcaaaggcaaatgtgtcatggtttttgtacaaagaaggtatgcatttttgggggacaggcacacaattcagatgtgaatattagaaaggtttctgaactgtcatttggtaatagcccatctgtttacctctgggttcttaagctgtttccctacatttaatttttgtgtaagtgatggatttgcctatcctctccacaatctctctgtctggctcgcagactttggagatcttcaggcaacatctttttctgtctggagcagctgctgtttctgtgtttaaggaaaaaagaaaaaaaaaacccagtattttcttgatgcaacagagatgacagtcatagcttccagccatctatcagtgctaccacagcagaaatcc

SEQ ID NO: 8829 - DNA, 6000 bp, Homo sapiens
tcgcctgagcctgggaggcagaggttgcagtgagccgagatctcgccactgcactccagcctgggcaacagagtgagactcatcttaaaaaaaaaaaaaaaaagaaagaaaattttaaaaaaaagataaggggttatggagaccaaggttcttattatgccgatgaagcctccacctagcaggcttcagagagaataaattgtgtttcttaccagactttaaaagacgccagactcagttaattctctcctggatcagggaagagacttggaaagggaaggggattctctacagcaggggtcccccagccactagactggttcgggtgcatggcctgttaggaacggggccacacagcaggaggtgagtgtcaggcagtgagcattactgcctgagttccacctcctgtcagatcaatggtggcattagattctcataggagcacaaaccctattgtgaactgtgtatgtgagggatctaggttgtgcagtccttatgagaatctaactaatgcctgataatctgaggtggaacagtttcatcccaaaaccatccccacccacccccatctgtggaaaaattgtcttccaggaaaccagtctctggtgccaaaaaaagttggggactgctgctctatagaatgtagatgtttcccacaagagacagttttgcaaggccatttcaaaacatgtcaaagaaatatattttggagaaaaatacttagaattctttcagagcctgctatctgtcatgttggtatcattgctacaaaaagtctctttcatcagtcttaaggtctgttttaatgttaatactggtcatctgtgcctgaatttttttttttttttttgagacagagtcttcttctgtcacccaggctggagtgcaatggcacaatctcaactcactgcaacctctgcctcctgggttcaagcgagtctccctgccttagcctcccgagtagctgggattacaggtgcccgccaccatgcctggctaatttttgttatttttagtagagatgggattttgccatgttggccagctggtctcgaactcctgacctcaggtgatccacccgccttggcctccataagtgctgggattacaagcgtgagccaccacactcggcctgtgcctgaattttaaagtgaggagaatataatgaggcatgtttaaccatccattcccatcatgcctggtactagtgtttcaggttaactttggaatgcccttggcaaagaagaagtgaccattcagttagttgggaggcttaaaattttatttttggttcacagcctctctaggcatagctttgtctaaagtaaacttttaggccatgtaaaagtaacagtttaaactggagatgaatttaggaaggggtctttatcattggttattactaatcttgaatcacggaaagaacaagtgagtttgaaaggcctgatttcttagaattagtcgtgttcttttttttgtttgttttgtttttttgagacggagttttgctcttgttgcccaggctggagtgcaatggcatgatctcggctcaccgcaacctccacctcccaggttcaagcgattctcctgcctcagccttcccaagtagctgggataataggcatgtgccaccaagcctggctaattttgtatttttagtagagatggggtttctccgtgtgggacaggctggtctcaaactccggacctcaggtgatccgcccacctcagcctcccgaagtgctgggattacaggcgtgagccaccacgcctggcagaattagtcatgttctttatagatttcattaaagactcttaattttgttgtgtatgatgactattttctcctctgtaagagggaaacccaggtttatgacatggacttccttcagccactgctaaagattggggtatgaagtaggtttcttatttcctcttttgtattaatagttggttcttttcaaatcctctgaggggcaaaaagacccttggatttactatatcatgtctcacaaaggtagactggtcacatttgaaattttagatatgtgaactaatattgtggctgaagcagcatgaataagctaaacagtgaaaggtaaaccatttacacataattcagtacctctctttcccccaggtactgaaaatcatttatactatttttatagttgagatgagcttctttatgaatcaagtgaggtggctggaaaaagaaaatgtcttacactttcagaaagttttatgattataacatattagaaagtctttaccctaacatatttcttatatataaaactggtaaagataaaatgaaattcatatattgttgctgtagtgtccattatttgactcagcaggtgattttgtgtaagcctgcaagtcattttctgagattccttttctcagtaggaaaagtaatatgctagtatgcagagaatcatttattctatctgataattttgcttgaaaatctgcccaaatcagtgtgtatacacttgaaagtaaataaatgtttgggtgagtttaaaaagtgttaggagacacagtctctattttcaagttgcttaccacatagttttctatagggatgacatttaaaatatgtaacaattagtaaagaataggcaccaaccaagtagaatgggagtgactaataagagctgggtccaaagggctctatcttagccaggtattaacccactagttcctaaaatgtggaggtctggggaatcttgagaggaaggactggcacaggggtgagaagcatggggggataccactcagagttgcagctgttaaccaacttgcattgaagtatttcagtatttgattagttggttcagccgtacttgtgtgtaccagctgaacattagccttgtatatccataactaaaaaagcagtgtaggtgccctaaaatgtaaggactgcaagcgctatatcttattgatatttgaaagaaaggttatgtatgttttaagggtgttgataataatgtgttcaataaaataagtatgagccataaaatatcaagctaatttggaagcttcttatgctttgcacacaaaggatgtactatcatgattttatgaactctaaggactttagttctaggatgaaccttagaatatatttaaaacgatccccttaatttatcaatgaatctgaggaccacagctattgtctcacatttagtggcaatggtgagacttgaaactaggactcaggcttaatctcttttctccacacctcaggacttctccctttgtaagcaggagtgaggtccatgctctggctttccaaacaaggaaaagggcatatgagtagttcagtgttctgaactacgtatggcaatcagtaggcatttatcaagcaccattttcgttgttttggatgttttttgtagagatacaaaacaaaaaataaccttctttcatgaaggtataatatgcaggttagcgggactacctagccgtccatactgaatgggtttggaaatcccaactcttttctctacctgctctgtgataccaggcaagttaaagtcttgtgtgcctcagtttcctacctcaccgtgttatggtgattaaattaatatatatgtggagtacttgacacacagtcaagcctgcgattactgctgttcatggttttattttctctactagacaccagtaaggcacccccagaactcgctgtgttaagtagattctggttggatatagaaacacaggcaccccaggcggaatgcagatacgcctcaacatgtggattaagtaagagccaggaagcagagtaatgaagcaaaaataagacgtccagagtcaccttttaagaaaatgtgggttggtggttgcttaagaggggaggagacaatttagatgggatgtatggcgtgagcaaagggcaagaatgagcacggtgtaggcacaagtccatggaactgcttggctggatcgggatttttttgtcatagagtgttaagaaatagtcgatcagttgaggagtagaggagtgaagaccttggaaagttgccaaaagcctcgagaatttctctacatgtgtgacatgttctcaggactcaactttttcttttaggtttggaagacccgcagtaagtgtgctttagaattaaatgggtgggaaggggagctaggcaaaacacctcgcacttagcactaaataaagttcgctgttgccctaagagactgaaaaggttactttaacaaagggggcggggttaacttaacgtagatgtttaactcgtatacagatgaacattccagttgatcactctgaagctttttggctaaagcgtttgggtttagagcttccattactcattcgccttgcccaaggcctcagcaaccgacgttcgaaagccaggagaaaaggcgaatgataaagggcgctccacgcatgcgttaagaagccgccccaactcccccgcggcgttctttcttggaacaaaactagcgcggagccacggaactccgcagtttgcgtagacttgaatttcctattcctcggacgatccatgtggaatccgtgagtagtgcgactcctttacgcaactggcgttatccgaagtgaatagctaggtggcgcgtgtacgcccatagcgtagcacccataggcggacggggtgcggctgcgcagggagctgagtggaccttgtacgccgcaagcgtagcagggtgtcagacgcgccggtttctgcgacgcagttagcgcagtctgctttggtgaatacacgatttggtgcagccggggtttggtaccgagcggagaggagatgcacacggcactcgagtgtgaggtaactataaaaccccgatttgtttacattccctcccccagaaccggccccgtgcgcggcggagactgcgagtcccgggacggcgtgggggtagaaagggagaacagaaccggggagtcggggctggttccctcggggatgcgggcgctggggttcccgcagctgctgcagtcggcggcggccagccgaagcagagcgcgtggtgggcagagtgttgggcgccgcggctcctcgtgtgcggtctgggctgctgcgggccgcgggatcgggagccggcggcatccacttcgcgtgcggagcctcgcgcccccctcaccttcctgtggaggttggcggagcctcgcgggccgcgcccggggtgggggagtgaccgctgggcgggtggcggcggttagggggctgcgcgccggccgcggatggcgtcgcaggcgcgggcgggcgaggctttggggatctgtaggcaggtcttcgggggcttggcgaccagcgccccggttttttcttctccagtccttctctctggtctgtaatggggcgaggggaccccgggatggagcctcggcaccgctgttccggaccgaggctaacggacggcggcgcctctgctcctactagttttctcccggaccaaccgaaaagccgaggcggagcgcgggggtgtgaagatctcggcctgctgggggtccctggagctgagggtgagggtggggccgggtcggtgggacaggccgggtgggccggaggtggcgcggccgcacggctttgttccggaaagcccttaggtggagagcgatgtggggcgcggcagggggatcgcgtagaggaaccttcgcgcaccgcctctccgggtctgggaatctgctgaactccttgcctctcctggggtccctcgaacgccccagctaagaagggcgggggccttgccagggcgcgagcaacatgacgttcaaggtcttcctgtggcttctgtaaagaaatgttcacgtgggagcctgtccacatgggctgtactaaggatctggcacgaggaagaaatatcactgcagaacctgaagccctccgttggaagggtcgttcactcgagtacctattctaagtaacagtgacacaaaacacatgttagaaaaaaacaaaaagtatggtaggttatactgttttttaaaagaaacttttatttatg

SEQ ID NO: 8830 - DNA, 6000 bp, Homo sapiens
tcccactctccctgagggacattctgcgtcagggctgtggcacttgctgatcacccctccggaatagttttcctgcagacgtcctcatggctagctcctgcttaggaggcatcttatctaaaatttaaatctccccttcaacatttcatatcctctatccctgctttactttttctcctttgtacgtgtatctcaacctattaacaccattttacttatttatcgtgttcattgtcttccccactaagatgtcagctctgggaggacaggcatttttgtcttattttatatactgctggaaatttagtttatatatagttagtatttccttacatctgtaacactagaaagttacagatacaagaagaatgagtctttacagaaaggatttatagtttaatgaagaagaaaagtcataactacagttattttgatatgtgttatgatagagttttgcaccatgtttgtggaactacagagaggctggctaaaaagttggggaatagaaagtttttccatcaaaaaaatccgagctgagtcctaaagaatggagtttattagaagcaaggggaagggtcgtatgaggaagctgaatgatttataacatcattcctttgaacagtaagtctatagctaggactatattctgaggaaataacatgactactcctgataaaacaagcaaacaaaaataaaacctcactacgtggttctttgcagtagtatttataatgtcacaattatattggaaacactctaaatgttcaagagaaagggaagaaactgtccacatatattttgtgagattttaatgacccagaaattgggtattttctaatgttaagtaggaaaaaatggatccatattgtcgtcaggtaggtgttggccatatcctgacagtcgcacaacatgccataccaaaaagatgagagtttatcttgtaaactttggagagccatgaaaaagtttaagcagtagaatgacatgatcacatttttgtttcagaaagactttggctctatggaggaagacttttattgatttaaagccattcaataagatatcaacagtaccagaagttttagtttgagatacctataggataaccaggtggaagtatctagttgtagaggactttgggtggtgctgtttatcaatcagtatcaaagcatttttatgtaatattttaaacaaatatggccataccggtaggtgttggttggctcttagctgtggttatgacaaacagtgtgggtgttgacattcaggttagaattaaatgtggcaaagccatagttcctattctagttggtatgtatacatatctagagggcatatttctgtaaaacatgctgcatattgtttatgcttaagtatttaaggaaagtcataatgaaaaatctttgtaacaataaaaacttggaaggaggagaaaggatagagtaaaatagtcttactagaaccatatgtaggaagctgtcagtttgaagggccagatagtagatggtttaggctttggggaccatatggtttctgtcacagtttttcaactctgctgtggtagtgtgtggttcctgggacagcgcctctgctgttgtagcacaaaagctgccatagacaatgtgtaaatgaataggcatggccagattcagcatggtttgccaacccttagaccattagttgatttgataaagtgattttgtgaatggtttggacaagaaaataatctttactagctattatataccattaccatagacttttaaacagaatttatgatagcatgctgtagttcttaaatatgacctttaagagattgctaaaatataccatagcactgtcagagcatggtggttagattaattgtacccattatttaataacaaataatgatgtttcttcctagacaggaagaagtatgaattaagaattatgtgacttaacactagatttctcctccctaaacccaaatcaccaagatactgttttggagcaaaacgtagtgtcccagagggtagcatatcagtgtcatctttctgtagataatgactgcaaatttgaattatgtttgcagaaaagtgaaagtaaaaattggaagtagcaattccttcacaattttagattaggtttgggtggaaagaatgtatgcctataatgatgcaaatgtatttcttccacaaatcttatttacttagacaaattaaaggaatttaatttttatattttgaatctacagattattcttagatgtaatagtatgtggtatgctttagaaattaagtatataaacttttcttttcttttttttttgagacggagttttgctcttgttgcccaggacggagtacagtggcgcaatcttggctcaccgcaacctccgcctcctgggttcaagcagttctcctgcctcagcctcctgagtagctgggattacaggcatgcaccaccatgcccagctgattttgtatttttaatagagacggagttactctatgttgttcaggctggtctcaaactcccgacctcagttgatctgcccgcctcggcctctcaaaactgctgggattacaggcatgagccacaacgcccagccatatataaacttttcaaagcactgtgccttcaaagatgtgataattttcagaattttgaaattttaacaatattaagagaatacactgtgagggcagtgtgcatgacttggtactagttatgctggatagctctgctaggttgttttctgtgtctgttattggaatgaaagcaatggcataagggcatagagatgccaatttggatttgtccccaagtatctctttgctgtcatgagcagtgggaaataagaatttcaagtggaaaagagtgaagaagtgaaaccattttgaattaggccatttcccaaaagaatcttcctttttttttaaaaaaaaaaaaaaaaaaaaagtttttttgagatggagttttgctctgttgcccaggctggagtgcagtggtgtgatctcagctcactgcaacctttgcctcccaggttcaaatgattctcctgcctcagcctcccgagtagctgggactacaagcgtgccccaccacgcccagctaatttttgtatttttatgggtttcaccatattggccaggctggtcttgaactcctgaccccatgatccgcccacctcggccttccaaagtgctgggatttatgggcgtgagccaccgtgcccggcccaagaatcttgctttcttattgagtttaagatacattagtaaatgtgggaattgtggtgatcggtttttggagtgtcttattggtaataagttgctttatgctttagcataaagtaaaatgtcagaatttataaggtcagtggatagtaactgtttgaaaaatgactaatgtgcatattttaagtgtttgttgtgggggatgaggaggagggaacagagttagtatttcctagcaaaagcataaaatttcttcagtatttgactaaaatacatctggtgggtagcattgtgttcaataaaataattattttgtctgtagttacacttcagtcactaattttcttaagtaggaaaatgtttttaaaaactgttttgagcagaagtattatacaaagtttaatgtgaagatttatttttctagcttccagaaatgttgcatggtgatggtgacaatgaagaacatggcttttgtcctgtggggcaattcatccttcagaatttaggattgctctttggatttgccattatgctggtgattgccctctatgaagataaaattgtgtttgacatccagttttgacctttcccagtaatcactgttgattacgagaatgttaccatgcagctttgcatctgttccttgtactgtatgcacattgctcaaaggaaagtcagtggcttgcactacttacaagtttcatagatttgagcctaaccacaagaggctggtgcttagtactgttttccctgcacgtaggggtcttttaaaaatataaagcttgtgataaagagaggagaatatgggactccatgaaccagtgttgatatgtttgattaagacttttcacaaaataatcatataaaacactagtctctttattagtagaaacttctgtggctatgcagaaatagagatcgaaccaaaaaaaatcatttaaactttaaaaatattttaaatggactttggggagacattttttgtgtgttttaagaatgaattgtagtgctctttaattcagctacatatattcatgtggtgatagggatcaacttgacacaactttgaaactgcataaagtagacataggaactagaggaaagctcaggctgcattagagtatgaatttagcattgggaaaagcccttattcttgaatctagagttactatttttgtatatatttgcatagtgtttaaacctgcagcctaaactactgaaatttgtgattgtatgtttgtgtgagcttcagtttaatgaaagattcataatggttctttgtattattataatacttggtgttggggtgttctttctgttttgttttttactttaattttgttttgattttttttttttttttttggcgggggtaggtgagggtttggagcatgtggtctttttaaaaaattgtaaccctctagaaaatatcaaagaaatgaaccagacgtggtttaaatagttgattttcctattttaacagtaccaactagttaattgggaaatgtaagttctgaatgttcacattgctttaccagtttggcactggaaccaagagcacatgtcgtggctggctacaaggttgtaaagcagaaaatcgaagtttaccatgtctgtaatgtgtacatgaagtgtcaatttagaacagttactaggataaactccattattgccatggctgtcatggtacccaagtgacttggaagatgcatttaaattactcagctgaaatcacttgatcatcttgtgccaagatatgctgttggtgcctgatagggattagtcttttaggtgccctgttctcctaccataattgtgaatgatttgtgagaagtgcaagccatgtttatcctgaatttttacttaataatttgtattactagtcatatgcatgtagctttctgtttacatcctatgccacatggtcttcatttatgccaggtaaactgtatttgaactatgtgcagctagctttgttttaatctgcttggcaaccagtgtagctgctgtaacaatctatcttattgttcaaatatataagagccaaactcttttccattccatctaaaatgttttcatttagtactcttctttcctcctactctatgaacttcaaaacaaaaacaaaactttgagagcagcacatgcatccaggtatttatagattattgccagtgtcttttctgtatgctataagcaagggagcttaggtgttatttctttaatttatgcttgaatctgaaaaattatttctgacttactccatggcctccttataataagtagaagttttatatataattaattttcagcattgggcactgaattaggacagtcctcatctcattgcttggcccttcaagcaacctagctaaaaggtgctgatattttatttagtactgccaacttcaagtgatttagatatctatctatctagatttctgaaccaagatatatttatagttcacttttgggtttttatacccacggtaggattctgcattccagcattaaatctgcttcattttagaacctttataaaagcaatagctggaatatactcccagttttaaaataaatgcctgattgatttaaagcaagtaggttatgctgaagtatataaagaagttttatattctctcaaaaatggtattatctttctttatttgctagattcttacaaatcttttaagagggctgtaacagttgctgctagtattagggttccacatcattctaatgtatagtttcaagtcttaatagacaatctgaattccac

SEQ ID NO: 8831 - DNA, 6000 bp, Homo sapiens
tttgttgttgccttagagccaaaaagattcccaggacctgcagtgggagaatgggcacctgcgagcccatggcaggtgcccatggcgggtgctgggcacagctgtgacaagtcgtctggtttggtcaggggccagggtgtggcaagcagcaggcctgactggagtgtgctcgagcaggaagccccctgcttctggggagggctttgctggggaaaaggcaagccttggcttctaggtgccctaggctggagtgcaatggtgcgatctcggctcactgcagcctctgccttctgcgttcaagtgattctcatgcctcagcctcctgagtagctgggactacaggcatgaaccaccatgcctggctaatttttgtatttttagtagagactgggttttgccatgttgtccgggctggtctggacctcctggcctcaagcgatctgtctacttctgcctccgcctcccaaagtgctgggattaccggtgtcagccactgcacccagcatggaatgggctcttgaaatggagaaagaattcgtgaaaaattcagggcaggagagtcagagaggtccaattgaatctgggcaagtgccatgcttccgaggcctgaggccatgggggagtcatctaccctcagagcctcaggttcctcagctgaaaaatgggggtaataatgcctatctagagaggttggtgagagaattaaataagggggtacaaatgaagcgtctagtatagagcctgccacaaagtaaataataaatggtggttgccattgttattgttgttgctgctgctgttgttaataaaaataataaataagtatcctgaacaagtagaaggagtaggggactgggggttaggtttttgctaccctctgactgtgtgatttctgtcacctctctgactccttatctgtcagagcagggggtggtaccagctgatctccgaagccccttcctgctctgacagcctctgagctatgaatagatgaggcttgggccctggaggagtttaatgactcaacagctaaagtggttaagacttcctaagaaatgactttctattactgttgggtgaacttagggcaccagcaaaggaagggtttcctggctgggagaccagggatagggagctggaggaatccttccagccagtggagacggtgactaaccaggtgaatgactaagaaagaacctgctgacctccaaccaatcagggctgcccatgagcaccctgtgagctggcatcactaagcacggcttggctgtgtcaggcctggctgggtctgagcttcatagcatatggagtcaaaggaagcagccaaaagaccagcagggaaagagcactgggcttggagtcagaagacccagcttcccactctgactctgctgcttaccagctgggtgactgggggagccgcttcccttccctgagccttcacgccttcatccatgcagcagagctaacaatacctgcccagcaacttcaccaagtcatgaagactgagaatcatgacaagagatgcaagtgcattgtgatcactaaggtagcaaatgatgggaagtgctgtcattattccatcccaatgggacacccggtatctcagaatgagactcattcatgttttcaaaggggtcaggtgaacacaggctgctgcccttgggtttggggccattatcagcctaactaaggcccctttctaccatctgatcacagcccaaataggtttttcttagagcagagcccctgtggacagcttccagcaaggtggcatagccacagtggaaggcaacacaaagccaggatggtcaggtggggcagggagggaggggcccccacagaaccaggggggtggtctgatgttgtctttcctcttgcccagcactttataaataaataatcaccagaaccgcactctgtctgcctctccccccatggcttttagcgtctctcttggtgaggactgcaagcactttgggaaacggcagaggaagagggaaggatgctaccctttcatttctgcacaccttaaacccatcaatagcattctgtgtgtgctcacagcctctgggtactatgctggcacttggagcacagagacaggaactgcaggacctgcccacatggaggttgagtacagtgtggtcaaagagacaaaacacttcccctataatgcaaataaccattcaaaacagccaacagcgtgtcacccagatcatcctcacagtgagacctgcagttgtccagagcagtggcctgggaggctttgaggaggaggggggatttgagctggacctggaaggttagcatggacaagataaatagaaggtagagccaggcgcagtggctcacacctgtaatcccagcactttgggaggcccaggtgagaggatcgcttgaggccaggggtttgaggttgtgctgaactatgattacaccactgcattccagcctgggtgagacagagtgagactctttctctcaaaaaaagaaaaaagaaaagaaaaagggcagagaaaaaggcatgccagacaggcatacttaaggtattctcagaggacaggttggcagctatcgagagggatcacataagtaagaagtgagatgtgaagtcagacatagaggttggagccaggtatggagatcctcaaaatttgagataaggagcatagaccagattccatggacagtggagagtcattgagggattccaagaagggaattggtttggtgacagctgagtttttctttctggcagcattgtccaggggagcatgccttgttgtggggtaggcagggaggtcagttgggaggttactatgaagctggggaccatgggcctgagaaggaaaggggacacgcgtgaaggcttgacgtgtggaaaagagggagagagagggtccaaagatgttcagtctgattcttttgattctccagacagctaaacagctactgaaaccctggcaaatagtagtggggtgtgagagtggaagagactgcagaccaaatctgggctggtgtttttcaggaagcgggctcctctttgggcagacctaagtctgatcatcctatcctaaactcacaggaccagtaggacccagaggtgccccagctgggccacatccactcccagggccctttcctccctcttccaagagaagaatccagaaacgacacagcatagctccccatggtccccagggagccgtagattcttggaacagtgtcctgcagtggatagaccgcaggaagagtgtctagtcctgccttttactccctcagctcctgttgactcccaggaaaacaatgccatcttcatgggctgcgctaagtggcaacgaacccctgggagtctgatcaaggcagggaaggggactagggagaggagagggaacagtaaagacagaggaaactgcttctggaggcatctcaatgggctttgggggaaggtgggtttcatctcagaatccaagcacgtcggggctggggaggagctcttgagatcattttggccacccctccttgtctggaggtgagcctgagacccagacaggggaagggacttgcccaaggtcatatatcacggtagtgatggagctgggctgaaatcatagggtgttggggacaggtaaggtgttattcccgtctggacagttttgaatagcaccaccaagggcctggctagagattcctttcctgggcaacgtttgttctctctctctctctctgtctctctctctgtgtgtgtgtgtgtgtgtgcccgccctgtgtgtaccctgtgagtgcctgtgtgtatctgtgtgcatgtgtgcctatgcctgtgttgtctgacagtctgggtgtacgtgtggcctcctacatggtgatctgccctggcttggaaagaactggggttattcctgtgaggtgactgttttgctgggacagcagagaagaaggctgacaaggccagatctggcttcccgcaccaattctgccgctctgagaaaatcacaggcactgactggtggcgaccaaactcctggagctgaaacacgcagacacacgtacactcacagccgccgttatagggtggccccaagtgccccgaagtgccgcattccgacatcctcatgcctccccagagcccagcaggtgtagacctgctaggctgtggaagccgatcctcagggatacggagcactggcgctctcccgccgctcactctcagcgccctgttcagggcctggcccggccacacccctcctgcccgagcctccgccggtcgtccctgcccctctcacacacttcggagtccctgggggcctatgcaacatggcagggccaagttagggctggcccggccggagagtcaggtccggagccaggaatcgacgcctccccgagttccgtccccgcggagcacacacgccaggctgaactcgggtttctgcgagcgcagggttcggcgcccagcccctctcgggggagcccccgcccccagccccagccggccccggacgactcccggagccccgcgcccagccctgggttcccgccccccgcccggcgagccgttaccgatggtggtgatgacggtgatggcgaagtagaaggagccggcgaagcgccactgcacgccggccttgtgcggcttgaggcgcagcacgacgcgctccagctcctcgtagccgccctggctgaggttgtagcgcgcccgcagctcctgctgccgcagctccagccgctgccgctcgatcagctcgggctccgactccagcgcgtcgaagaccgcggcgcccaccagcaggtaggtgaaggtgcacacgatgagcgccagcgtgcgcacgttctgccgcttcatcgtcccgcccgggccgccgccggccccccggcgcccccggcccgcgcctcggccccggccgccgctgctgctgccccggaggcggcctggggcatggctgcgctcgccgctctccgcgccgggcacccgctcagcgcccggggccgccgccgccgccgccgccgcggagctgtcccttcagcaccacccaccgccctcctccgcccggccccgcgcccgccccccgccccccgcccgcaggccgcctcctcccgccagccctcccgcccagccaaataaggactggggagacgcgccgaggagggaggaggggggctggcggaggggacgggaggggcggccgcgagagagcccgggcaggacagagagagagaaagagagagagagcgagcccgagagacagagaaaactagacagcgaaacgctgataactacggagaatgggagaaaggcagtgtaggactgagggaagggggctgtgtgacagaggaggagataaaatcagaggtgcactcagacagaaaaagaagagaggcgggcagaaaaatacagagcaaaagatggaaacagagagagcaacagactgagacagagaggcctggattgctggagataaactaatgacagagaaacagacaggaaggcaaggaaggcagagcgagcccctccccaccccaccctccaccctcatcacagcatattgcagccaggaggcacttggggcctcgctgtcctgcccttatcctatggatgaggaaatggaggcccagagaggtcaagtgacacgcatgggcacgcagtgatttcgtgacagcactgggactcagccaagcgttccttcctcccaggccacactccttcctcccttgggccagactctggctgtcttggaagcaggcagggcccagctgtggacctgggcacacatgagctgacacccaagggaaagccctgttctcaggcaatgtgtgccttcccaggtcagcacagttcttggaactggctgagaaggcacaggctgggagtctaggcctcctgcttcgctcccaggggcttctaggctgtcccgactcccatggttcctgtcttgcacccgtgcaccaggctgggcttaggctgagttgccagagatagcacctgccaccaccttaggg

SEQ ID NO: 8832 - DNA, 6000 bp, Homo sapiens
aaaacgtaaaagccatttttagctcacaggccactcaaaaacagtccgtgggtctcacttgacagaggctgtgtggttcaacctgggcaggtgctgggttccgagtcccctgggatgaagccaggggtagaggagggggcagaggacgcagggccagggctgccagcggtgccccccgacatcaggatgtggggctggggatgaggcaggcaggtgccccagaccacccagaagccccctactcaggtccagactccccatggagcagccaccctgcagtccaagggggagggcatggctgaggccagcgcggaccacgttctctaaaatgctgctgtttctattctgcagctcaaattcccatggccacttctctggctctgccatcagaggcctcagccagcactgtcccacagtgccacgctcagaaagggccactgtggcgctggtaaagcatttacggagtcaccctggagcccaccaaccctggatgcacgggcacgggctgtgcacagctgccacgttaggattcactgtctcctccgcgagtcccaccggctgtggggccattcccagggacacccctgcagggacctggtcacaggcccgggggtgggctcacctccagttcatcgcagccgcctcattgatgtattcagcacagtagactaagatgactgaaaaaaggtacaagtcatattagaatttagatggcccgttattactcgttataaagttatacattctttacagcagaatactgaatagaaatgtcactttaattttaaacataacatcaggtaaacatcctaacattgtcaagtcgtaggactcacccatttagcagaaagaaaatcaaggccaacagtgcttcagttctccaatgctctatggtctcactcagagcccgtgctcaggtcagcacctgcagagctactgcaggagccgcccgaggccccaggcttcacccaggcatggctggacctcacacatttccccagggacagcagccacagttcagccccacagaacacggcagcaggagctgagagccacgagacccagagctgacaaccaagggcttttcacgctcacacttcccgggctgaccttgggacactgccactgagatgaccataggaggggagcgaacagctttggggtgctggaggcaaaggcacgggagggagggcagcagctggtgggggcagggcaaggcctccatgctcccaggagcacacagactttagggactggcccagggtcttcagctaattcgtgggtaatgctggtactcaaacccatgagacagtgacccatggtaccataaaatcaaataaaatatgattcggcaaattaagaaaaatgtgatgcttcaacttccaaggtaaatcaaactaaaaatcctttcattcttcttgatacacatcagaaagcagattaaactaggggctacggtgagcagtccctccacttcctcccttcaggaatggactcaataaagcagaggaaaagaatgcacagggaaagaaccagaggggaggggagggaggaggaggaggaggagggggaggatgggggggaaggagaggaaggaggggaaggaggagggccaggagaagcaggacagccaggcaggtgagaagggtaggctaacacaggaggtggtgggcatgggtgcggggaggaaggtgtggagggctgacgttacagggggaaggtggggagggtggtaggcacgggaggaaggcgggcagggagggtgtcaccaggtgctcctcctcagctattcctgaaatgcaccctggagcagagtctgaatcttgaatcttgatggtgctggttataagctgtatagctgagggagttagagaacctctgcatgtttcatttataaaaatgggcaaataaaatccaactcttggctggtttgagaaatgaatcacaggaaatgtaatggcaggcagcacagtgtctagtattaccccggtgtgaaagcagtcatccttccccttatcctagaaaacatcaaaccctttgtgcagttctccagctgacaaagctattcagatccaggagctcagctggtgaagccatcacctttctttgagatgcctgcctcagggcctctgcgtggggcacttgctcctgccctctgccagcatctcactgcctggctcctgcctatgcaccttttgcccctgggttcccaggggactgtgtgatttaaatcaggccgctcctcctgtttcactgtgtttttggcttttccattgcaacacttgtcactgttgataacacaggtctgtgatgaatcactggtgctggtgtcccccaggaagctgtgggaggcaaaggagccctgtctgcctggtccactccagcactcctcagggcaccctcaatacagagcttgctctgagcgcctcacttgcataggcccccactgtgatgcaaaccctcatcacttctccagtctttctaagatcatctcttcttcagatttcccgctttgcacacagccagctaactaaacttatctgaaattagttatttttaactaccaagcaaaatcttcagtgtctccccaatgttgagagtcaagagtagcctgagccaggcctccaggccctcctcgcctcttctacccacacgtgttcgtaacgctcagcatcagaagtgcttaggtcctggagggcttgcagtttctctgcctctgatccacaccttccatctatctcagtctctgcatgtcgggctgctgccctcccagggccgtcacctgctccctctcttttcttattaacattttactcactcttcacaccctgtgccatgatttcagcttttctgaataatctttctcagtcatcctgtgcaactccctaacttctctaagttctgtagcccttatccttgaaaccaagttgggcaatgccttattttatgcacagaacttttctttcccagtttgcaatcttcctcccattcaaagcagtgcatgagcacagctgccaccaaggacgcatcttgtgtaaaagacagcacttccggaaacccaactctcctgtgtgcagctggtgctcagcacctccctggtaggcaacaggaactcaacagattcctctcaactctaacatccaaaaagtagttttctttatagcttccaagagtgaaaaacgggagtgccctgggagcaggcacatgacagagggttgggaggtcttgtaaaaatatgtatatatttcgaagacacagacagaacatacacagtttcatttcacacagtgatctgagttgtggagtttgtgttgttttactcacctagacacagaaagtgcccgatctgtagtctgtagcttcgggaggacaagcaggtgaggagcacgcagagcgcgtggaaggtggccagccccatgagccagggctcagtccagtccgtctgctgtaggaacacaccagcagacactcactgtcctgccactcaaggccgggttcacggcccacccacagccttctcccagcgcaggaggcaggggcctctcactcctgagtcctcctgggctactcaccaagtatccagagagcattgccaggcctcagagaaacatggggacaggaaagggagaaggaaccaggaggatggaaacaggattctcccctcagtgcaactataattcatggaattcaaagttcaagcacacagaactgaaggcatctctgatgtgctcctttcgtttgtggaacagaatcatgtttttaaggtgggtataattaaaggaattaccatcctttacgatgataattggttatgataattggtgacgacaaggaaattaagacgattgctcaaagagatgcacttggctcagccccaaaggtaaaacatgaatcatcatttcagactccttagtcagcactgaagacctcagggaatcttgagccatcgccacgtgcaagacttgattttctccaacctctctgcaatacactgaactctccagacagtgccgcactccgccgcctcctggactccccgggaccctgctgtacctggggacagtgtctggctcagggacctgaagtagccaggctcagatccactgctgctcagtccccacctgatgctcagatgccaatcccagcagtcctcaaccctccccatcccctccttgagcgccctcctgcagaagacaagccctgccctccaagctgcagccccgccctgccctccaagctgcagccccgccctgccctccaagctgcagcccggcacagccctccagaactcctgtgtcactactctctgctggggaccgcagcggcttctccagagccgcgccatgacataaggacacaagcgcatctactcccatcaatgcacccaccagaagaccagaggcacggaggtgaggggagcacggctttctgcccagaccccatcgagtgcccatgtcaccccttggcggccacgtggggcgtgggctcccctgggatctgtcagacgaacccggcacggcgcacgccccgcccacactgggcagcgttcctccgtgccaccccacacgatcaggctccaccacgcacgccccgccgcactgccagaatccgcccacatggcccaagccccgcccgcaagacgctggactggccggcgtgcacctcccacacgaacaaagccctacccctcgcgctccgcccacacaactcagccacgcccgcacggtgcaggacgccagcccagcccaagcccgggccacagagcgccggagccagctcactgcgcacgctcctccacaaggccccgcccggccccgcccctccccgcccaacggcccaggaccccgcctagcgctcgcgccccgacgcccggccccggccccctcccacagggcccaggaccccgcccacagcgcgcgcccccgacgccggccccgagccactcccacaggtctcaggaccctgcccagcgcgcgcgctccgccacaaggccccgcccacggccggggccttcttggccacaggccgggtgctctgtggggcctaccctacgcctctccgccgtcctcccccgaactggtggttacgcgggccgcgagttaccgtgagcacggctgggatgctgacggggaaagagctgacagagaaggcggacggcatggtgttgggaagcccgctctcacagcaaccgccgaacccggcctggccagaatccacagaggagggcgccaaatcctctctcgtgagatctgcccttctcacgaaacttgcgcttgcttcctctcgcggtaatttcatggcattgctaggtccagatatcgcgatatttcctggtggtcgctgtaatacggaaaacttactacgctgctgtgggacttgtgctcgctccgccaggaggccgagggcgtctttagttcgttaacagaggagcaggcggaggcgggtggaatttaggaggtttgtttcaaaggctcagggcgctgtaccgccacgccagccctgtcccacctgggactccctagaagggtcagagcatcaatgaggacggtgtccgccccgagaccctgcaggagccggggacattgcccactcctcggaccctgcaggacttgggaaggtgtctgctctcgcgaccctaagggcagtgcactcttagtctgggtcagcttagggttatctgtcttcactttggagatttaccagatgttcttacgcttcacttcgttgttcaacgacagatacaaaaatataaagttaattttcttccagcgaattttttccctttattttaacatctataccccaactttgacattttcaaattaaacattctgttattttaacatcatgaattattaagtgtatatactttaattgcatatgttagctcttgaactagtttaatgtttctaaaaatagttctagtggtggacttttttttttttttaatagctttaacccctcccagatctttcttaaaatctttccacagtgtggtca

SEQ ID NO: 8833 - DNA, 6000 bp, Homo sapiens
ctgccctggggctccagtaacacccacacctcacccagcctggctgaccaccccagcctacagcccgccctgcctcactggatgggcagccaccctggcccttcccacagcagggcagagctgcattccaggggccacgtagctcattttatctctgggctgaagggaccaacgaaggtatgagggtgccaggctgtgcgggggccttggcaggaaggaccagtttgcagggcaggcactgggtgggccaggctgccgggtctgagggcacatgggtggcagggccctggcggtggcaccaaggcaggggcagggctggcccagagcacccagaggccagtgggggtcctcagcagggcagccgtggacacaggccacagacccccggtggggctctccccgaggcctgcgcagccccagaaggccccagcaggaggccctacctgggcccgatgtctgccggcttgaggtctccggccaccagggccacgaggtaggcgggcacggggtgctccatgtggaagtggaagacgccttcttcctccatgtatgcactccgggtggcactcatcagcacctgcacccccgatggcgcctgtaaggaggccggactgagaccgggtggccccaccgtcagcacacccatagccccggccggggagcctgtcaggcagccccatattcgtagcaggaaaccctacatccccatcagggaacgtttctgtcagagaacttctctccgaagaactgccaccctccattcggaacccctagctcccagcctgcaaacctcgtcccagcacagagggtgctgccaagttcgggcccggtgacccacagaccccactggggatcagcagctctgtcgggagaccccttgtctggggaccctgcagtgccactggggactcaccccgggtccaggaccccgacccctcaggcccgttggaggcagcccggcttcccccgttccctgcaaagcggctcctcccatagagtagggagggtgggctcctgctagcactgtggcctgctggcagctggggccacagcccaggcaggtaggagcaagggggaggcggcgtggccaggccactgggctgtcctgggagcaaggtgacggcagctggcggcccctgaccttgacgacggcagagtaggtgcacttcacggcaggtgtgtcgaagcacgggaagaaggagcggttgcacacggagtggccctgggtgaagacgaagggcttggcgcagccataggtcagctctgggtccagccaccagatctgtgggcaggatggcccatcagcagacggccacccagctagggtgctgggccctagccactgggcagcagcctgagagaaggcaggaggctctgggaggggacaatggccagattatcttgctgggttcgagggccaatagccaccccttagccttcacttgcctgcctgggcagggagacatccagggcaggtgacccagggtgtggcctgcactgtgtcatcagggccagaccccaacccaggcaggaggccctgtgtcaggtagccgataggggcatctcccagctaacgccaaggcgaaaaaagggaatagcccatcattgcattatcttagcttccatagggaaactgaggcacagtagggacacactcagtccaaattcccagcagttgatttggtcatggtcaggaaaaggaggctgggatgtggaacctgggaagccagagcctcctgatggctacgcactagcaggcagcacgcccgggcccagagccaccctgagcccaggcagcctcgcctggagggaccctgcaagagacaggctccaagccaggggacagcaagcagggagtggaggccaggccagaggaccctgctggcaggggacaggagcggccaagggaaggatggctggggccgctgcctggaggccgggggctgcggtgagtgctgtggaatgggtgcgctcacagcagctgctacccacctaaggtcacccccccggcaaacctctcatctgcaccaaagctgttgaggctttcctcacccctagatgccgaggccaggccccagccccactgagaagcctgcacacccggggccctcctgccactatcctgctgcacccgtctcatcttccttccaggaattctgacctctccagtgagggcagctcagagtctgggagggggaccctcttccaaccacagccacatcaccttcgtcccaagtcagccctgcacgtcgtatccaccctcccctctgccggaatgagatagtcaaggcaaactgaattgctcttcgtgcagaggccctcccatgaccatgagtagaaggtgcccccaacatgcttctaagactggacaagtggaatccacagctgaggcctggaggatcccagaccaggagggctgcctcccccgcagtcccggccagacccctgccagcattctcagatctcttccaaacttcctgttggtgccctggccctgctgggcagcaaggtagcacaggcgtctcccattcctgctgagccctgggctgccagggtgttcagggcccacctggggagccattcacaaacgcagcctcccccttggggggggctgggacctgggaatctgtatgaaggaacctccctgcaggagtctccccaacccttcagcctgcacggccccctcacaactactcctctcctgtggccttgcctcaccctcctgaggcccttctcaggctctgcccactcacacctctccctactgccccatgtccaccccacagcctcagtagcctgggtgtcttcccagataccagcagggcccacagctccccacttgccctgaagtgaggggctggggcagacccccagacaggacaggccctgccccacagatggggcaccaatccccgtcagggcacccgggcacaggtgctgatgggctggtggaaaaggaacaaggctgaagggctccagacgctgcagggcaggaagaacgctgttcttgctggggtggggtgggggtgcgggaatgggcccaagcatctgcagcacctccaaaaagcctctgggggcctggggcccactggcagggcctcccagggagcttccgctgcatcctccctggcacagggacaggcttagggatttgggcctgagtccctggaacatgcaggaagagaaggggactctacgtgtggccccagccccatggcgctcacatacaaaggtgcatgcctgaggttagagtcgaatactctgccttctgcaagtagggcggctcacaggccaggtgacgctaggccccctgtccacagcctgccaaccctgacaccacgcagacttgggggactatgccactctccctgcccagagtacccaagggccacccagtaggccataggaagccaagagacaatggccacccttgctcactgggccccgttcacagcagcctgctgagggccctggtccggccactctgcaggccagtgttgggcggaccagacacgtgggctccaaacacggatcaaggccaaggagaagcccatccctcagttctcacctgtcatactgggaggcatacttgccaccggtcagagccctggaataccacagcaggggcggggccggctagccagcggcctgcacacccacaggggttctgggaaaaaggtgaggtggcaggtcctgcttagggctcctgggaaatgtacaggaagcccataggggtgcactggtctgggttcttcctgcccagatgtcaccttggctctttgtggcctgaagcctctcgaccacctctccaccaccctgtccatttatgtgccgtgaccagtgacagctggacttcccagcgcctccacagctgtgtgtgtcttgcatatgtcgggtgtcacatgtgtgccgtccataccacctagggatgcagtatgaacccccatgctgtaggcaggaaaggccctgctccatcctgtacacatccccactggtggaggtggagggggtgctgcagccacagcgccagcctcagccacctggcctttcttgcagagtctctggagtggtgggtacccagtgtgcaagccctgcagagcctatgtgtgtctatgttggggtcgcggggcccactggtctcaacactccaccagtgctggccaaggaagccccaaaccgagcatcacaatctccatggccctttcctctgcctctggcttggactcatctgcacgcactggtcacatggaggcccttccgcagctgacactccagcccaacccttggtgccaggatcctgcagatgtacacctcggtgggtgacagaagctgctcatgtccccaggcagggaccagacacctgaacgggaggcttcccggagtgacatgctgtcccgtgtccccgcaggactccggcttctatccgagggtcctaagggctcacaggcaacagctgggaatcaccggggtggggggaggggggcacctgtagggcgcagattcgcgtccctcagcctggccgtgcggcgagaggccgctagcagcgccctgcggaccggcccgcagccccggcgcccgccccggactcacggcgggggcgtcggtcgaggtgtaccgcaggatgacctggaagggctggtgcgcctgcagctcgggcggcagcgtgacggtgagcgaggagccgtagtcggtgaacgggtccaccctgaaggccagcggacagcaggcgggctcggagccgggcgcctcggggaaggcgggcagcgggggcggcggcgcgggccccggcccgggggcggagaaggcgaaggcgcagggcgtctcggcggcggcggcgggggcgcgacggaaggcggctgagtgcaggcgcagagccgggtgcgcgtcgagcacgagcgcgcggggcgcgggccgcagcgcgcacagctcgagcaccaggcagccggccaactcgcgcgcctcgggccgcagctccaggcccagctgcaggtggcggaggcggaagagctgcgcgctggaggccgaggccacgtccagggcgggcggcggctcgggcggcgggcggacgggcgcggcctcggcgccgggcgcctggcggcagcagcactgcgcggccatggccgccggcactaggtgaaatccatgggcggcggccgcgccgggccgcgggcgaggggcgccgggcggcggcggcggcggggcgcgggcacaacaggaagtcgcgccgggagccgcccggcccggccccgcgccgtgcgccgccccgctcgggctccgctcggccgccgccgggggcgctgtgcgcggggccggggcgcggggccggggcgccgggcggggagggccaggagccaggggcgcggggagccggggaatcgagcgcggcgcggggccggggcgctgtgttgggagccgaggcgcgcggagcgggtgagcagcacccccagcccctcgcttcctccccgggcggcgcccgggagatcccaggaggcgggatcgctgctccctcccagacactgccggccaggcccctggggcagccgctgaagggacccgggaaccttggggccacaggggcaggctgcttccaggtgtggttcgtgttcccgaggagcgcagcgtcgcgaactcaatgtcatcctttcatccggggctacgggcagggcaggattctcctggcacccctgccactcctccaagtctacaggtgtggtctgtgctgtgggccctgcggtgcgagaagcgccggagccttcacgcagcgctgtcaactacagcagccaccaaccacgtgtggccatttagatgcgaattaaatacagttagaagttcagttccttcgtggcaggtggagtgagtgagtgtgtgtgtcttcctgggaggagtggctaatggacaaagcaggcaggaatcatttccacaatcgcagaagttcctctgggcagtgctggggacctctcatttgggagccctgtgctggggtacgaaggagggtctggc

SEQ ID NO: 8834 - DNA, 6000 bp, Homo sapiens; identical to SEQ ID NO: 3154

SEQ ID NO: 8835 - DNA, 6000 bp, Homo sapiens; identical to SEQ ID NO: 891

SEQ ID NO: 8836 - DNA, 6000 bp, Homo sapiens
ccaaagtgtgctgtgagagcacaggtaatggtgatctgactggaaaaggtggcagccacgctgtcctggacgattcccagaactgccttctcattatcatccaattcccaggctctgttgctctaggaagaggatgtactcctgtacaggccagaagatgtaagcatcctgacctcctggcagcttggcttctcattgtaaatgcagaaaacggacttctgagaataattggatttcccatatggcttacttagaggaagaatacattagccaaaggacgtgagtgtccacttctctgatgtgacagatcttattgtcaaattaataaactgtctttctggcttttagagtctctgagagtctggtacctgtgtatctgttgctgaaagatacattaatttttgatgtgctaacaagtcagtattctgagattgcaagaccagcctgagccctggaggatgtaccggggtaatgtcatcccttgggacatggctagtagatactagcctcctccagggacccctttctgctctgtgtgcttctttgatcctctgcatttctcaagggtggacccatgtctgatgcttctttgatatctgagttatcttctctcaccatgtgtgctacaaagcattttggttcttaacaaatttgtttcttgatttctttcactcgaattcaacctaatcaaaatagctaaaataacatctatttgggggcaagtcagatggaaactgtccatggagtatttttaaactgaaacacgaatacttaaaaaaaattcatctgctgcctttgaaagatcacaaccttttgaataaccatgttaacttcatcatctgctttggctgtgacggccagtgttcctcaaataagccaatcaactgagaacctttctccaacctatacttctaattaaagaacaagaaaccaaacactgtgaactcctttccaaatgaaaacgatttctttcatctccagtggtttcactgtcaatcacttagataggttctttcatctataacaaaagatggcaaactttttctgtaaaggtccacatagtaaatatttcaggctctgtgggcccacagtctccattgcagctactcaactctgccactgcagcgggaaagcagctgtagacaatatgtaaccaaatgagcatggctatgttccaataaaactttgtttatagacactgaaatttgaatttcatctaaatttcatgggtcacaaaatactgatcttcttttgatttatttccaaccattcaggaatgtgaaaaccattcttagcccacgagacatacgggcaagctgtcagatctggcccacaggccatagcttgtcaatgcctgtcccatcatgatgaatgccagcaatgagtcgctatactacatgaatgtgtatggtccctgtcccttcataatactcctttaccaaccctgagaactaggacttataagtggatctgaagttcacagttggcaaatttaaaatcttacgggaaaaatattttcattaaaattaaacaatgggccgggtgtggtggctcacacctgtattcccagcactttgggaggccaaggcgagcggatcagctgaggtcaggagtccaagaccagcctggccaacatggtgaaaccctgtctctataaaaatacaaaaattaggcaggcatggtggtgtgtgcctgtaatcccagctactcgggaggctgagacacgagaattacttgaaaccaggagggggaggttgcagtgagtcaagatcacaccgttgcactccagcctgggtgacagagtgagactccatctcaaaaaacaaaaacaaaaacaaaaaaacttaaacaatggtcagcacacttaaaaaaaaaaaagaaaggacattttacctatcttaagtcccaaatagtgggaactatgtaatttgttcctagttgccatcccctcagaaaaaaatggtaagatccctgagatagtggtgagcttgttttactctaacaatacatctgctgagacttttttcaatgttggtttatccatccaaatgttcaatgtcctgtctttctggttttaagattagtatttgtagaccctcatctcctcagtcccaccatagtccaagatggtggatgattgatacataaaaagctatagattttgtttctttaatctaatctacatatctacaacacttgcaacacccttccccacttgcaaatattgtcctgtctatgatagctttctaggcattcctaacaaacactttaaggctctattttccttgtgttttgtttcacttcaaatttcattgtatacttctttactactgcagactttctcttttaactctctttttatttccagtcccagggtttctctttttttcaccatccacaacagttgtcacttgaatgaggcatatatttgaactgtgtttcccagttacgtccttttcccagttgaaaggtcccagcatcatattcccaagtgaacccacatgggttcattgtactttctcttttgtgcagggttgaaaatgtccataataaaaaagattttataaaaatagagcatacattcctatactctagatttggtcacaagaggaatttgtggttgggaagaaattagcatattcatatgccacaccactccctggcatgccctccctattctgtgcctggtaaaattgttctcagcctctgagttctaggcaggacacctatggaagtatctcgataactctctcatctgcattcccaaagcactttatacatctccattaaagcacttactattgcattgtggttagctgtttatagagccgtcccaccaccaatctcccctaccctctaagcctacaagcaactctcatattttgttgcatccccagtgcccagcacagtgcctggaaaagaagatcaagatagcatttaaaagaggatcaagatagcatttcacagtgcctggaaaagaggatcaagacagcatttctcagaaacattgagggcagtgtctccactaaacaggtgtttcagggggcttccctagccaacttccataaacactctcaacctttctcctttcctaaaaaaaataaataaataaacaatctaagtaaaaacacaacttcaaaacaagtccccccatggccttcatacaatgagattgctgccctaaactgttcctcattggaattaattctggcatgaacactgcagaacatgcaaagttcttttaataccacaaaacaaaaagcctacatggcactcacagttttcaaactatttcaccttttttttctccttccatttgtccacttatccctgatagtcctatcctcatttttcagacactcaaggaagtaaaagtgacatgtccaatatcagaactggtaacagctctgtgcctaaaacccttaacttattgatctatccactcatctgactcttctgatgctaggctcagtatctgtgaagggtttttttttttttcctagatttttttcccattatgaatggtggcattaaatgggggcaccatgctctaaaaaatccatttcaagcaaaatcatttaggcagatacacattatgaaaagagagagtcgaatatgtcccacttgtgttagtattgctctatgattttgccataagtacttcttattgactaacgggtttccagtgaattaccgactgttcaaaaaatgccatgccatgcatttctacacatagaaatatgttattatctaaaaattttgctcataaggaagcactactatttataggttaagtgcaagatcctgaatcccatataattcctttttcctgaactattaaatgtagatacttatcacattaacaacctctatactttaaatactcttagttcttctacataatcctgtgtgatttaactattactttaattctcttactatttattgcatgcaactcttttaatattagtacatatcattttagacataaatagggcactacctgccaaaaaatcttgctactgagtggtaattgaaagtcaagattatttctcagatatattaagcttttcaaatgagctacatttagcttttctcaaattacttaatatttttcaacaaaggcctataatagagtatgcaaagcacgtcacacttaagattttcaagtttgatctggttacgaatctgttaattgaaaatttttcaatatggcagagcacaaaatatttcacacaaatgcaaatagagatgtcatgcagatagctgcaagacgtgcatcattgcccttctgcatcaaactccgaaattcagaggcagttcactctgcaagatttcttgctcagttcttaaaagttcagatgcatcaccttttaatcagggtaataagctataattgctaacatactgtgtaacgtttaaacctgcaatctggacaaacagaaaattatgctgtcacagcctggaaacaactgcaatccactgttaacacacacatcctccttagagagagctgtcgtcgggagttacatgctttatggttttaattatttttagcgtaaagatcttttcccgagaagcaggtattaagacgaaagcagcctcccaaatgaccttctctaacacagaccttgagcgagcgactgcgggggcagagagctgtgaatttcagcaagggattcgacagctccaccgggtccctcacactttgctttcaagaacaaaaaaagaatgttactctgcacctgccggtgcccccacccctctttaaaacttcataccccgcaaggtctgaatagccggaaagggtatgcatcgattcttctgtcccgtgatgccaagagaaaataaacccccacccaggagcggagcctggagtcgcggcagggcagggggttggagaggtgggtgctctctccccttactgcgctgcattttctccaccacgtgtaataatctcatgccgctggcaccccacgagaggcggggatccttgtcctcctgtctcccggacgaggacctcaaccccttcccccgctcggggaccccggccacccgcagcccggccgcgctgcgcccaggtgcggagctgcggcggtctcagggcccgggcagcaccgcagagctcggcccccggctgcggcccccggcgagctaccttttatccaggcaggcgatccactcggcagaggaggaagaatgggcagcgtgcgcagcgaccatgttgagcggcggcgcgcggtgtccctggctgcggcgacctcccgcgctcgctctgcctgcgcctccgcccccgcctcgtccgccgcgcggaccccgctcctcccggacgcctggcgaccagcgcggctgcgacaggcccgccctccccgcgggctcccgcggcctggggcggtggggagagggaggggacccggggggcgggacgcgggtgcggggagggccgagtcgcccgcccgcccgccgctgcactgcggcgcccgtgggtggggattccgccccggggtggggaccccgcggtcccgctgctgggggacactgggggtggcgaccccggtggccggccacctgcgacaggtgtccgctgcgtccctcggagactggggccccaccctcaccccggggcctctgaggcggggcgggagggcaggcgccaaggcagagtggggagagggctgccagtgtctatatatttttcatacagcaaatgctactaaaatggctgctgcctctctgtttccttagaaacccatgagtcttcctcagcagctgtcgaaacttgccggcggttgcttgctcacctttgctgtctccccttcagaaaaggctggaggggagggcgaggaaggcttggcgtggggacgcccgtcgagtctctcagtgaggaatgagaggccagcttctcctgcggggtgaggaagggctgggcgcaatggggggcagtgcgggcagggctgaggggcagggagggaggaggccggtgggcccgatgtggtctga

SEQ ID NO: 8837 - DNA, 6000 bp, Homo sapiens; identical to SEQ ID NO: 2132

SEQ ID NO: 8838 - DNA, 6000 bp, Homo sapiens
gcccgggtggcagagtgagacactgtctgaaaaaaaaaaggaaattagactcaacagaaaaacctatctagctataaaactttgatacaaaaccagaatagtacaaagaaaaaaaattcaatttcacctaggaacatgtatgcaacagtctcacaatattagaatagagttctttttctttttggagacagggtcttgctatgtcacccaggctggagtgcagtggtatgatgacagctcactgcagccttgaactcctggactcaaagggatcctcccacctcagcctccctagtggctaggactacaggcacacaccactacacctggccaattttaaaattttttatagacagagtcttgttatgttgctcagactagtcttgaacttctggcctcaagcaatcctcctgccctggccttccaaaatgctaggattacaaatgtgaaccactccaactggtttagaatagaatttggaattgcatatcagaaaaaaatcaagactaatcaaagttcattgagaaatgcaaggatggttcaacaatagaaggttgatacaataaacattttctctaatcttgtcttctcactttatttcatcaatttgatcttcaattactgatatccttttttccacttgattgaatcagctattgaagcttgtgcgtgcatcacgaagttcttgtgccatggttttcagctccatcaggtcatttaaggtcttctctacactgtttattctagtaagccattcatctaaccttttttcaaggtttttagcttctttgcgacgggttagaacatgctcctttagctcggagaagtttgttattgccgaccttctgaagcctacttctgtcaactcgtcaaagtcattctctgtccagctttgttccgttgctggcaaggagctgcgatcctttggaggagatgaggtgctctgatttttagaattttcagcttttctgctctggtttctccccatctttgtggttttatctacctttggtctttgatgttggtaacctacaaatggggttttggtgtggatgtcctttttgttgatgttgaagctattcctttctgtctactagttttccttctaatggtcacgtccctcagctgcaggtctgttggagtttgctggaggtccactgcagaccctgtttgcctgggtatcaccagcagaggctacagaacagcaaatattgctgcctgatccttcctctggaagctttgtcccagagggacacctgcctgtttgaggtgtctgtcagcccctactgggaggtgtttcccagtcaggctacacgggggtcagggacccacttgaggaggccgtctgtccgttctcagagctcaaacaccatgctgggagaaccactgctctcttcagagctatcagacagggacgtttaagtccacagaagtttctgctgccttttgctcagctatgccctgcccacagagctgaagtctatggaggcagtaggccttgctgagctgcagtgggctcctcccagttcaagcttcctgggcgctctgtttacctactcaagcctcagcaatggtggattcccctccccctgccaggctgctgcctcgcagattgatctcagactgctgtgctagcactgagcaaggctccatgggtataggatccgtcaagccaggcatgggagagaatctcctggtctgcttgttgctaagactgtggaaaaagcccactatttgggcagaagtgtcccatttttccaggtatagtctgtcacggcatcccttggttaggaaagggaaatcccccaatcccttgcgcttcctgggtgaggtgatgccccgcctcgatttggctcaccctccatggggtgcgaccagtgttcaaccagtcccagtgagatgaaccaggtacctcagttggaaacacagaaatcacccgtcctgtgcgtcaatcacgctgggagctgcagaccagagctgttcctattcccacattttcatactaaagcgaaaatacatacaatggtctcaacagatgcagaaaagccattcataaaatttaatatttcttcacaataaaaatctgagcaaggtaagggctgggcatagtgactcacacctgtaatctcagcactttgggaggcctaggtgggcagatcacctgaggtcaggagttcaagaccagcctggccaacatagtgaaaccccatctctattaaaaatacaaaaattagctgggcggagtggcacgcgcctgtagtctcaactgtccgggagactgaggcaggagaatcacttgaacccaggaggtagaggttgccatgagccaagattgcgtctctgcactccagcctgggagacacagtgagactccatctcaaacaaaaataaaaatgaaataaaaataaaataaaataaatctgagcaaggtagagagagagaattttgacaagatatctatcaaaaacaaaaagcaaacttcacatttaacagtaaaacttcagaagcactccagtggaagtcaggaccaatacaaggatgctagcttatctgtaaatgacagaactggctacacaaaactaaagagaatttcaaccaaaccatcagaactaattaagagtttgagattatgctgtacataatatttacattaaaaaaaatcaatagcattctgccataccagttaataaccaactggaaaatgtaaaaggaaaaaagaaagcccatttgcaactactacagcaaaaataatctaggaataaaaaataaaatatggaaaaaaatttcatggaggtaattataagttttttgttgttgttgttgtttgagatggagtctccctctgttgcccaggctgcagtgcagtggcgtgatcttggctcactgcaagctccgcctcgtgggttcacgccattctcctgcctcagcctcctgattagctgggactacaggtgcccgccaccgcacccagctaatgtttttttgtatttttagtagagacggggtttctccgagttagccaggatggtctcgatctcctgacctcgtgatctgcccgcccagtctcccaaagtggataattataagatatttaaggcaaaaagataaattcccaccaattgtagcttatacaatattcatggaataaaaacttacttgatccataaattcagctcagttccaataaaaatcccagtaagtctttttataaaggactaagtgtaaagagcgcaattacaaagaacagcaatgtgtggaaactcttgacatactacatatcaagacttataaaattctgtaattaagatagtgtggtgctagtagaaagtcagaaaatgcccaaaacagaactacatatttaggaaaccttgatatgacatagatggcattaaaaactaagaatagactactcaataaatggtgctgcgacaattagttacctatatggaaaaaaaaattagatttttatacaaagtcagttccatgtggattaaatgcaaatgaaaaaaccggaagatttaaaagaaaacatacagaaaaactgtcctgatctaggtagacaggatttcttaaccaagacaaaaagcataaacaataaaatatgacaattttggctgtattaaaatcaaaaacatctgtacaaaaaattgaacataaatataaagaggagaagccacacagtgaaaaatattagcaaaatgtagtaacaaaaaaggattagtttaacaatactcttacaaattggtaagcaaagataaagccaatagaaaattgggcaacagaaaaaacaaaaacagatacaaaaaataatatataaatagtaacatgtaattagatataaaatatatattattgttacattgttaagttttagatataaaatgcatataaatagcacaaacctaagtactaaaatataaaaacattactgggtatgcgaaacaccaaataaggacaatagtcaccactataaagaagaatgggagagtttagccgtcttttattttgaaaaattcgacataagtctggcaaatgttaacactgtttaaagttgagtagtgaatatataggtattatcttactctctactggtctctgtgtttaaaatatttcacgataaagtgggaaaatggttaattttacataaaaagaactttaacagatgcaaaaaataaaacctctctcattcgacaagcagcctaaatggggaaaaaagaacccactcaaaaaaaaggtagcagataatgtcaccgtggcttaccagcctaatcaaacttattacttgttatgtatatatccttattaaactaagtcgttactgtgttaaagcattttagtgtttaaataaaagatttcagaatacagcagaaatacattccaatatgttggggtttttacgcttaggaaaacctacaatagtaggtgatttgacatttgaatcacacctatctgaattaagatgtccagcactaccaaacaaaagccacacgaggccacgaaacactcccaactctgcatgttttagcctttttaaagtcctagaaaccaactgatactgattaaaaaccaaacaaaaaaaaaatacaggcctcagaaaaatacactattttgcacacaaagtccatccataggcctcagatctagaactcctgctttaaagttgcttctccaatctcgatccgaaacactggctgagttatgctggaaaagaatgcaaagtgtacggggcttgagttcctgttgcgtaaaacctttccggctttcagcaacttctcgagaggttaacacctttaaggagagactttgctccctgtcgatgccgtggctggacaaatgccgctctcaactgctacagaccaaagtctacgctttaaagatagagaagccattctgtcaaagtgaaaacagaagcggtaggtaggaagccgcccccctttctttcaagcacagagacccagagagacgcccaggagctcccgaaaaaaacgttgctgattagagctgccgggtcagaaacagctgtgagacactaaagtccccactggtaagcgccccagctccacctcggcccctatccccaaggttgggtattggttaaaggggggaagggaatacctccactaacaaccgctacaaccgcctcctgccaagtccccgctcgggcccactaaactcacagcctgaagaatcccacactcactggaaagtggggcccggtcctggtcccggtccggctcccggaattcggcgggtctcccagggtttggggggaggtggcggctgggacgccatctcctccgcctcctctcggctcccgctcctacccctgactgtccaggcccgcgtagaccagcacctggagcgtaagacacaacgggcagaacaccgagccgtccaccccgcccacccttgcagtcaggacaaggcttgagttactttgccagctgaatccatacagcgggaggatgccactaatttgtaggaagaaacacgctctttgtatttgccccagaaagagctgcctttctaaacctcagggtaaaggctcatcgatatttctggtagcggctacaactccctagacgtcggagtcccaccgaggcttttctgggagtggaccagtcgggctgggagtaaagccgcacgcactccttcgctcgtgggggaggtagggtgaggtggcaaaccaggcagtttttcggatttcctctacaaacaagaagggagaagctcacttagtcctagcgagagcgggctggtacttttgttctaaaacgcacgtttcctcggggaacagaattgctagacgcaataggtgcgttgtctttagtcttccctcttcccttcgagggccggaaggggttaaatctcaggctccggcgtctggggagaaggtgaggcgggtaggtaagaggtgaaggagtgcagactgggtgcaaaagaggtgtggcgggagagagttcgtttctctcctgctggagcggctttgttagcaaagga

SEQ ID NO: 8839 - DNA, 6000 bp, Homo sapiens
cttccactggactttcactctggccttcttccctgtcctcctgacaccactcctcccgcctcccctccctctccctcacctcccacaaacacaccagaactattcaactctgaggaacaggagtatgagacagcttccattcggccaggaatgggaggttcccatgtccttaaacttcaaagccaatcgtacccttaaaaatgcagctatttccccagttgtttaaacacttaggattagataggagtagatgtattggtttcttcagagaagccaacagtggatcacatgaaaatggaaccttttttcctatccttttgaatacatttctgtgtttaaaatataatttttttggctgggtgtggtgacccacacctgtaatcccagcactttgggaagccaaggcaggtggatcacttgaggttaggggttcgagaccagcctggccaacatggcaaaaccccatccaaaatacccctactaaaaatacaaaaatgagccaggtgtggtggtgggtgcttgtaatcccaactactcaggaggctgagggaggagaattgcttaaaccaggaggcagaggttgcagtgggccgagatcgggacactgcactccagcctgggcaacaagcaagactccgtctcaaaataaataaataaaataaaatataatcttttcctttgtgctagggtcccacctaagtttattcacacatatgatgagcagtaactgcctgaagatgcaaggagttgattcccactccccacttcccccgcttaatacagtgttgtcagtgcttaactgtcctaggctgaccatggtccatgggttgtttagagtcactgcctgcctttcttacctgcattcagcctgctggtggactgctgtttcctaacacctctgtaccaatggggacgatgttgaaattaaccatcaaaactgtttctctcgatgacagaggcaatgtcttagtgccttctttatccccagctactagcacagaaggaatctgccacacagaagatgctcaataaataccaagtttaattaaagtaggagtgcacagctagtgggcttgggagccatttaaacctagatacctggatttgaatgccggctcagctgtttactagctgtgaggctttaagcaaatcacttaacttctgtgtcttgttttcttcacatgtaaaaggggatccttactaaaattataggttaagataatgtatataaaccacctagcatgatgcctgctgaatagatcattcttgaataaagctgtgtattttccctgttttataaacttaataagctgtatcaaggcaaataagaagcttgtctcaaaagtaaatacaggctgggcatggtgactcctgcctgtaatcccaacactttgggaggccaaggcaggtggatcacttgaggctaggagttcaagaccagcctggccaacatggtgaaaccctgactctactaaaaatacaaaaattagctggctgtggtggtgcacacctgtaatcccagctactagggaggctgaggcaggagaatcacttgaatccgggaggcggaggttgtagtgagccaagattgtgccactgcgctccagcctgggccacagagcaagactccatctcaaaaaaaaaaagaaaaaaagtaaatacagtattctgctttagaactaggacctatcttcagttttattttttcctcaaatatataaagccgggcattttcactaatcctgcatttctgcttattttcagggacatatttggagaagactgtgtaagtgtaaaggatgactctattcttagcgtcacagtggacgggaaaactgccaaccttaacttggagacacgggtatgtagctgctctttcctacgtttcaagacatttgggaaataaagtgaaggcataaataatctgtgctctcacactcaacagtctactgttgcatattggcatttgcttccagtgtttccaacatttttttcacattgttctttttatattattatggttgaagttttccgtgtttttccgggttactgcatagtacaaggttcgcgtgtatgccactccattgctgtcctcttccataatacagcttagttcacctcatcccttctctagtttggcatctagttgactctccattttttaaagaagccgctcttctgtttgcaccagcaagatccaagtggattttccaaacagttcaaaaccagcccgggcaacacagttaaaccccatctctactaaaaaatacaaaaaaaattagccgggaatggcggcagctgcctgtagtcccagctactcaggaggctgaggcaggagaattgcttgaaacagggaggcagaggttgcagtgagccaagatcacattactgcactccagcctggatgatagagcgagactctgtctccaaaaaaaaaaaaaaaaagaactagaggccaggcgtggtggttcacgcctgtaatcccaacactttgggaggtcaaggtgggtggatcatctgaggtcaagagtttgagaccagcctggccaacatgatgaaaccccatctctactaaaaatacaaaaattacccaggcgtggtggtgtgcctgtaatcccagctacttgggaggctaaggcaggagaacccaggaatcaccttaacccaagagacagaggttgcagtgagctgagatcacatcactgcactccagcctgggcgacagagcgagattctgtctcaaaaaaaaaaaaaaaaagaagcaactagaagattattagtgagtttcagtcaaattcagtaccaaatgttgagtagatagccacatccattccttgccaagtaatttgtgtggcatagatgaacttccctggagtatcatttactagatcaaactgtgggctttgatgtaaatgtagtttactagactttccccagtctttcaccccagcctcaagtcatcactaattaggaccgtgctgctgtcaggaagcactgcacgcccacaagtgtgtagggcggccgttctgtttcatggtaatcagtcccaccatgacctctgcacacacagatgattgttcttttttttagtttgagacccggtctcgcagtgccgcccaggctggagtgcagtggtgcagtcacagctcactgcagcctcaaccttcccggctcagtgatcctcccacctcagactcttatctgggaccacaggcacacgccaccacagctggctaattttttatgagatgatggtttttttaaagagtattcatttatcttctatataatcattatagacttaattctaacagtcttgtttgtgcctcactttcagactgtagaatgtgaagagggaagtgaagacgatgaatccctccgagaaatggtggagctggctgcacagagactgtacgaggccctgacgccagttcactgagactgtgcctgtatatgaactttgaaaaaatacttgactctacttttgttacctaaaataaaatgcattcgtttctctgggggagcctgtttacttttaatgtcaaatggcctttatttcaacagcctgaatactgctaaattgctaattaatttgtccattattctagaactaactactagatcaactgcccattattttagaattttggattcttcttccaggcatgtatgtgcagctcccattgaaaccatcaagatctgccgatagcaaccgctgctggttaccctctcctctggggtaaccaatttgagttaataataaggattctaagttgcacttgaatcttttctgtcttcatctccactgctgctgttcgagtccaagtctactctcccctctgaattcctgcaaccacctccatctcctcccctatagctgattcctggaacagacctggcctcaagcctctgctgcttgaaggccttaatgaagtccttgtgataaagatgaagtccaggcacctttgcttgctctagcaggggctctcaatctgggctacccgtgggaatcacgtggggtgcatcacaagtgcacctgtgcccaagtcctgccaccaggaggtgagttagtccggctggaatgagggccctaggttggatcttagttgtaaagctcccccaggtgatccaagcgagcttgggacgagcaacctaaagaaagtcatgctctacgcccatcgccccgccccagggagcggggtcggcctctgcgccggcgcccctggcccttctgttactcatctacagctccgtgatttcaaggcatccttcccacccgttcgtttttagctcggctgccgaacttcattgcacagttgaggtaagaacgttgcattacaaccacgttttaacaggtgaatcccttggaagttagtcagtgctccgtgtccgcggggttctgcatctgcgcatccaccccacggcgggaaaaagaaaagcggccggctgcgcgcgcactgaaggtgcagctgctttcccttgtcattcgcagaaccacgaggtactgccagggtttccgcagtgcctgcgtcctcgtgggtgttacaggccctccagagtgacgctgggcgcaggaggccgcgcgcgcatcccacgacctcttccaggggggcctggagcagccctccgccccaccgagagccagctgtgcttcccgccgcgcgtcctgaggtcacactcctgccctttgccgaacgcacctgcgcccgcggagcgcggggtgggcttagaagggcccccaaccgcttttcttccgggaaccacgcagcgggacgcgggctccggactccctgggggcagccttgctgtgggtgagcaagcgcggaggccgagcttcttgcaaacggactccaaggggcaacgaccttcgcgcgtcaccaaagtgactgcgtgggtgcccacgagcccggctcccgcaacccacgggcggccactgcgcaggcgcctctcgtggctggcggccccgccccgccccgcccggctgctccatggcgctgtgcgaggccgcgggctgcgggagtgccctgctctggcctcgcttgttgctcttcggggactccatcacccaggtacggccgccccgacgctcggcctcccgccccggcctccctgcggggtcgctgccgagcaggccgaggctcctcgccgtcctcttcggcgcccgagacggctgggccggaggcctggccacgcccgtggagacaccggaggagtggcgggtcccccagtggctgcgccttccgggcccgcggcgtcccggaggtcacgacggcgtccgcgagagcccgggctccaggcacagacgcgaggggacccggccgcgctgcccgccccgcgccgcctcccacccgggtcgagatgcgcggtcttcccctcagcgccctcctgggcagcggcctttcccctccgggtccgggttagcggccgcgggcgaccgcgcgctgtgtcccaggaggccccgcggccagctccgggcagaggcgccaggagctctctcgccccattccctgcgggcacaggtggggccgttaggggttgaccttggaagtaaaacgccttcaggaattaggtagaaaaggaccatccgttcatccaagatcatctcacctcccatgaagggaacggtcttctaaatgcaggttcttacttcggggagggagtagaaattccattcctgtgtgtgtcctcttctcagacaggacttgcttcaccaggcttttgtgtatacgccagtaactggtaacattatgtttaggcatatggggcagtcagagctgccgaattccatgggaatgtgtatgaaaaagtgttcaccctcagctcggtaaccagcaaagcagtgaggcggtgtggccttcatttcctcactgacctttgactttatttcctgaacttagatttctgtttagcttttttttttttttctttttttctttttttgagacggagtctcgctctgtcgcccagactggagtgcagtagcgcgatctcggctcactg

SEQ ID NO: 8840 - DNA, 6000 bp, Homo sapiens
tggtctgaaactccctttggattagctgagacacaccattctgggccccattaaataccgtagagccctggaaaacagaaaataaaggtaaaggtcgtatcagtaaccacaggtagctattttaattaaataccatattgtcaaaatgataactacttttttattttgtagctgagtgtaaagagacaaatcaagagcttagaataatctcactcttgtgtaacagggataacaatatctacatcttaaaagggtgttgaaaattaagaaacaacatatataaatatgcttttaaataaagtagggttttttgttttgttttttcttaaaagagacaaggtctcacctggtctgtcacccaggctggagtgcagtacagtgtggtgtgatcatagctcactatagccttgaactcctgggctcaagccagctccccacctcagcctcctgagtagctaacactacaggtgaccaccaggctgggctaatttttaaatgttttgtagaaacaggatcttactatgtggcccaggctgatcttgaactcctggggtcaagcaatcctccctccttggcctcccacagtgctaggaacacaggtgtgagccaccgcatccagtccaatagagtacatttttcaataactgtagctattataattttaaatataggcaacttaaatcaatagacttgaatataaatacttggccaagttttggatagagaaatttctctattcgtctcatctagttttttggctatttttggctatttggctcatctagttttttggataaaagggtgggaaagacttgccctcaaactcttattaataaagtttttttccttcactctaatcaaaaccctacccttatttggtagtgttacctaatttcaattattgctactattacctctccagtcctactagcctctggtcgagataacactgatgcagaaattggtctgtatgcaactctggatccagctcggatctattaatgaaaaaaaaataaagatttcaatattaagaaagaatacaggtaagacttcaatgacttttctggtaccatgaattctaaaaaagcaagcagtaaaaatgaatcagaaacttctgaattgactctttgctgtttggtcatttttaatacataagcaattttaataaagtttcatgctaatgaaattgtaacgcttgctaccttgaataaaatttctaataacagttacaaagagagtaagaactgcttttgacatttccattattgtagtgccgtaagtcaagtcagaaaaaagcaataaataccacacgttctttggcaattttaagtggaccaacaagtatattaggagcgtcacaataaacatttatcattcaaaatagcccagcagttaatagccctgaccatttcaaagctatttctatatgaccattaatcataaaaaaaaatttctaaaaaaggaacttaagcaattctacatcagtttaagaataatctgtgaaatatctgaccataaggacatattccagtccaacttctctgcccttgagtgtccactaaattaaggtcacagaaaaacccttccgaaccaaaacctgattctctaagacaaatcctccagatctagacctcactttaagcctgcaaaattgttatgaaaataatactccagaggcaggaagaaagactttgggctcgttcccccaccaccttcctccgcccccacacggaaaggcaaagtccctccctctgcagcaacgagtttgacctacagacaggcactggaaagcgctgctgaggtgaactaggcctcaacggccccctacatcctctgcagtactccaaccttcgcgtcgaccccaatccaacagagaggctgagagaaggtgggggaaagggccactcctggtctagggaccagagagtttgacctacaccgagtgaggcctgacagctaggcctcggctgctctgcctcgccctagtggcaaggagagggctgagatgccctaagattaggaagaaaacggcaatgggttaataggtaaggagaaagccgttcccgagagggcggtgtgccccgcccgaaggttgccccattcaacaacgtggacgctctaggccaaaacgcccacccctcaatccccccgaccctgcctgggctacgcaccagagagggggtgcaggcgagcttggcgcaggcgaacatcttacactcttcgggactgcgcggctggagatattgggtgacaggcgacgtgggctcctctcccgcttcctctctgcggaggaaaagaggcttaaggtcaagtgccctccaggggcctgttcttcccacccaggccccgcaggctcccgtgcacgccgtcagcttgggccccgtgcccagtgaggcgccggcacaatgaatgggtccctactgggcgccgctccgccctggccaggccgggctccctgtgccctccacttaccttcccaggaggcggcggcggcacgggctgcggcagaggtcgaaggagtgggactcaatgcgcaagcgcggtccggctcttattcgcgccgcagcacccggatgaagaaggcggggtttcgggtgcaccaaggaagacactcaaggtcactttgtaacaactttattggcaactagccgggaaggacaacgacaaccacctggtgatggggcaagagggagacaaaaagaaaaactgtagattcaccccggcagagaggactaaacagattaacttttgatatgagttggctgcaggatagtgggcctttttcttcacgttggcaccttgtaagatttggccttttatcagttgctgcttctctgtagtagaagttgacttgctggtcattctcttcctctgtgaaataggactgtggctggcgggaggaaagaagggtcattcactacttaacaggaaactagggtccccagcaaagcgaagatatttatttcaaggaacctggaaaatggttccagaagtatggctaatccttcaggtgaaagagggcctgacctagaagtactggtggagccataagcaaatgagtagatctaagagctttgtcatctggggcacaaaattgcctctgggtaaagtgagggtgctcgacttttcttctagctctaagattggaagatttaagggattgtatttcatgtagggtttgagactaaaaaaagtcttaaaaaaagtctgagtattctcagaacgtactcaattttaacacctgtttttgttaagtttggacaaattatcttcttcagagggatgcagaaatatctcagaaaaatggctctgactgaacttctggtctttttagatccttgaattatgtaaatttaatttagtaattctaacaaatggctaatggaagtgatatcaacacgtcaacataaaagattaaacatctagaatgccctgctaagaagatggctggggactgaactccagcccactctgcctagagccctagcatgagacaacatcaacccagaggatcagctttttacttgttagcttaaaggtgcaatattatctagcagcaacgctggttgctgctagttctgggagaagccctcagaactaacacttgaaaaatgaataagactttgtcactaatccaacttcaaatggatcaaatgattcaaaattacaaaaatactaatcattttaggctcaatctttagctggaaaatagagataattcacgtgtactgttcaacaagcaattattcatatagtttctcaagtactcaattctaaccaagaacatggtgtcctgtggtgtctacagtagaataaacagtaaagccttgtacttcaataatagatcctccaggggaaaaaattattctaagtggatttatgtgtagagatggttttaagtgatgttcctatctctttagcactaaatcagtggcagtaactattgaggaggaagcaagaaagaagccaagatccacagtggctgcttccaagttgcatatggactagttgcttgtggcagggagagacatgggttccgaaatccagtctgttctttggaggggcctgaccatggctgtgactccacggtgctattctagatagattaattcagactttgcttggttttgcatcctaagattgcgttatagaaagaggagaatgaaggccaggcacggtggttcacgcctgtaatcccggcacttgggaggccaaggcgggcggatcacaaggccaggagatggagaccatcctggctaacacggtgaaaccccgtctttttactaaaaatacaaaaaattagccaagcgttgtggcaggtgcctgtagtcccagctactcaggaggctaagtcaggagaatggcgtgaacctgggagtcagaggttgccgtgagccaagatcacgccactgcactccagcctgggtgacagagcgagactccatctcaaaaaaacaaaaacaaaaaaaaaaagaaaagaaaaagaggagtgaattggagtaacaccaacccatgttgatgttgattgagggtggatatttgcactgaggaagattgaagaaaaagagtaccttctgagaggactaaagtgaggccataaagatgaacagggacctccctgagaagtatctaatcttttctgtgttttttcatggacagtggggacagtcatagtaagttatgacatcataatttggcaatatctgataagaccgggtgatgatgatagcctgagtgatgatggcatgatgaagatagaaatccgatagcaaagagaagtatgacagatcactcccaaatatagccctctccagaaaccacttggatagaaaaaagtccaaagagaactgaggtgtccaacacatgagtgaggccttcttggatctctagctctcgtcaagccttcccaacaccacgaggaacaaaaatgagccatccaaatgagctttacccaaattcctgacccacggtgtcaagagcaatgaaagggttgtcgtttggctctttccgccatcttttcgtgccgccacaatggtgcacatgaatgtcctgcctgatgctctcaagagcatcaacaatgccgaaagaagaggcaaaccccaggttcttattaggctgtgctccaaaatcatcatctggtttctcactgtaatggtgaagtatggttacattggcaaatttgaatcactgatgattacagagctgggaaaaattgttgtgaacctcacaggtaggctaaacaagcgttgagtaatcagccccagatttgatgtgcaactcaaacatctggaaaaatggcagaataatctgcttctatccggccggtttggttttattgtactaacaacctcagctggtatcatggaccatgaagaagcaagaagaaaacacacaggaggtaaaatcctgggattctttttttagagatgtaatacatatttacaaataaaatgcctcatggactctggtgctaaaagaaaaaaaagaaactttgtcatttgaagctattaagttttagggttgtttattatgaagtgctaatatctatttagtaatacataactaaaacaggaaacattgtctgctaaatattcactacttctttgagatctacgtggaggtagcagcatctcttttttttgagacaaggtcttgctctgtcatccagactggagtgcagtgttgcgactatagctcactgcagctttgacctcctgggcttaagcaatcctcccatctcagccttctgagtagctgggactacaggcatgcaccaccacacctgctaatttttaaattttttatagagccacagtctccctgtgttgcccaggctggtctccaactcctaggcttaaacgatccatctcagcctcccaaagagctgggattacaggaacgagccaccacatccatctggtagcagcatcttaaaatggggaatttcagtttaaaattccaagtgtagctcatagcaaaccagatagaaagaagcccagg

SEQ ID NO: 8841 - DNA, 6000 bp, Homo sapiens
gctgcgcgtgacgtcatatgcccaaggtgacgtcagagtgaaagccatgacatcaccccgaaagcgccccgggcaccggagagacccacacgggcctccggggctttatttaccctggccgggcccgcccccagccccgcccgagccgggctgtttagactccgctggcccgggactcggagggagggctggggttgaaccgcttcccgccaccaccggggccgccccgccgcccggccgccgcttgcatgtcagctccctgaccgcagaggcctggcctccatgccgcgggaagagaaagcttcattgaacgagccgggagggccagggagggggagggggcgcggcagtggccagctccacggggagggaggacccagaggaggagaggagggaactggccgggaggaatggaaggagaaggcggaatgtgggagggctcagggggatgtgggagggacgaacggagaagggggagagaggggggtccagtctcccctggccgagcatttttttttttttttggaagtcctaggactgatctccaggaccagcactcttctcccagcccttagggtcctgctcggccaaggtagggggagtcacgctaaccgcagagggaatgagtaggggatggagaggatgtggagggaccagggaaaacgggtggtgtgggatggagtcgaggggaagccacccaactgagagtttgattcttgtcaaagggcaagtgagacagagtacacggaggaggcacataccggaggcgggggctacgggtgttcgaacagggccgccaggagcgccctaagggagggggctcctccgggaggcgctgcccctgggtccccaacccagaacaaagctgccttgttggattgattgtttgggttgggggaagcatgttgacgggggcttgctgtagaggggctgttctcagccctaggcagagaaggccttggctgaggagccatagcgcctggcctcccgttgcccggtgacagggatggtggtgttggcaggaggctgggacaaccctaccccatcccccgcccagccttgaggcctggccctcctgggcctcttgaccctgcagggcatctgagagcctgcgtgttggggagggcgtgcagcaggttctccaggcgagctttggtgccagccttccctgcctgggaatctgctgggttaggactctgggctcccattcaggggatctgtgatcccagggccgcctagggccccttacgtgcctctctgcacaatcagtacagctgtctgtcctccctctgagtaaatggggtcatctggatccctcccacgtccgccccttggctcttgtcaatccctctccttctcacccgcggtgtgcttggttcccctatactgagtgcttagttctttgcctatcactttctatccgttgtctctctcctctgtgtctttctggttttctctctctcattcccacagtctcccttcctctcacatcctgtctgtctgggtcttcctctctctctacgtgtctcttgctcagtctctatctctttttattgacccttctctgactctcgatctctcatagttgtctcttatctctgggtctctcaggctgtgcctctatgacctgtgcctcagcccttatttaatgtgtttctctccctgtctcttggtccctggggctctttctctcctgttgtctctcgctgtctctgtcttactcagtgtctgtttttctttcgtgacttctccctctctttctgactctgggccccactcaatctgtttctctcacgcacactttgtctctggggcacccaggccttccctgccatgcgacctgtcagtgtctggcagtggagcccctgggggctgctgctgtgcctgctgtgcagttcgtgcttggggtctccgtccccttccacgggccctgagaagaaggccgggagccaggggcttcggttccggctggctggcttccccaggaagccctacgagggccgcgtggagatacagcgagctggtgaatggggcaccatctgcgatgatgacttcacgctgcaggctgcccacatcctctgccgggagctgggcttcacagaggccacaggctggacccacagtgccaaatatggccctggaacaggtgagcaatgatccaggcatatcctagatatttcctatgtgtggccaaagtgcagggaaagggaacacgaggatggcacagccatagggacacacgacaccaagaacagccagcattgagtaaatccatggatgacaaaccaagcaacatagttacttcccagagctgtgtgaccttaggctagtcagtgctttctctgagcctcagatgccctgtatgcaaaatgactagatgatgtctaagttcttttctgctgcaaaagtatgatcctacaaagccatccacaaaacagcccagatacaggtgagccctgtacaaataaagtacagttagtctcatgggacgctaagagcaggtaaatgatatctggatgtcccaaagtcacaaggggtcacagacactgcagctaacaaaatcaggttatgggccagagctaaaactaacaaggtggtactgtctaaggacaagtataaaatctaggacaagtatgagtgtgggtggtggaggcttaagagcagttccctaggtgaggcctaggactgtgcccatggtatgaacccacagtgggaatgatggacagaagcaggtgcaacctgcagctgattccccagttcccactggctagaccacctgtggaattaagtgtcatttgtagatgctgtgttttaagagggacagtagaaaatggaaatactttcagaggagagctgcctagatgtgaaagattcagaagccaagtttcaaggaggaattgctgaagaatcaggggattgatatggaaagtaaaaaccttgcatagcaatggcgtaatggttgtttttaaatatgggaaggacagtcgtgtggctgaaggatttttctggttggcaccaaaggaatgaatcagatgtggtaggggaaagtcatgaagagtcacaaggactttgatggttacacagtctggtggggcaggagctaggtgtctccgcaacaactgggtaagtcctgttgggatgtgaatgagatgtccttgaacattggctaggacagatgacctttgaggctgcgcccaattctgagaggaagccagtgatactccacagggttcaggccgggctcagtggctcacgcctataatcccagcactttgggaggctgaggtgggtggatcacctgaggtcaggagttcgagaccagcctggccaacatggttgaaaccctgtctctactacaaatacaaaaattagccaggtatggtggcacatgcttgtagccccagctacttgggaggctaaggcaggagaattgcttgaacctgggagacagaggttgcagtgagctgagatcatgccactgcatttcagcctaggcaacagggcaagacttcgtttcaaaaaaaaaaaaaaaacaggtttcagacagagagaagaacaaggggctatatggcagcacagacagggcgggcacaagagagaatgcaaggatgtgaagaaaggatcttagacatccaagcctcacagatagatcaaactcctaagcccccacgtattggctttatggtcttaagcaagttgctcagcttctctaaaccccagtttctttatataaaacagtgttctggcagctctgttctaagaatgatcacatatgtgcacaccatggcagagcacctggcacacagtaggtacctgattaattgtagctatcaatgaatgggtagagactgatcagaacttcagggttgattcttggttttttattcaccgtatcaggttcttgagtatccccagatcacaccaattttccctcaatcttatgcccccttcctattccctgccagggtcccctgtcccgtctccaccccttatcataccagaaagatgggatcatcatggccaagtgggaggcctcagcactcactcttccctacatccccattactcccccatcctccctccccaagcttctctgtcccttcatctccccttccacaggccgcatctggctggacaacttgagctgcagtgggaccgagcagagtgtgactgaatgtgcctcccggggctgggggaacagtgactgtacgcacgatgaggatgctggggtcatctgcaaagaccagcgcctccctggcttctcggactccaatgtcattgaggtctgcatttcctagacatacacacacacactacccaggatagccgagagtactgtggggtggttagcggagacattagaaggtagttacccctgggggatcatttggattggtgggagacttggaaaagcaaatgatagagctcccagatgctgtaaaatccaacaggtttttagcattcacattcaaggggctaaacctggcatgagcctctccagcttcatccctagtcacccctggggcacctggtgctctccttctcctcaaatgttcctgctttcctgagacatcttccttctgactttctcctccttcaaagccatttcctttttgaagtgctccctcctgctccaggcacagggagggcctccttcctagtgccctgaatcctctctgggagcacagcacatcccacgcgctgctggctgcaagagagtccacaccgcggactgcggccatcgtggccgctctctcagcgccgcctcgggcccatcccgccactgggtttacagcaggcacaccaagcagggttccttaagggcggcgggacacatgaaaggtgccactgggattctttccctgcttgtggccccgcccccaggtagagcatcacctgcaagtggaggaggtgcgaattcgacccgccgttgggtggggcagacgacccctgcccgtgacggaggggctggtggaagtcaggcttcctgacggctggtcgcaagtgtgcgacaaaggctggagcgcccacaacagccacgtggtctgcgggatgctgggcttccccagcgaaaagagggtcaacgcggccttctacaggtgaggggccgcgggcgccgggcggagcaggccgggattggggtgctccctgatgaatagccttgggagacatctgagcaggtccggggcacgggaggacccgggggtcgggacgcgcgggaaaatatggaggccgttgcaaagctggagagttgggaaatcttgtgggaccacgaaaggtgccccaagggagtacctgaaatggggaccagcgaggctcccgctctctcgtggccgacgcctgggcgggcaggcggattcctcggccccggggcgcgcgccggcctcgcgaggccactcccaggcgcgggggcgattccagcgctggcgctgccggccagcgatttccgagttcagtaaggacgcggccgcccctgggaggcggcgcctgggtgtgtcccgcgcaggctgggcgcccagggtccgggggcccggggacggcggcgcgcgatggccgaagggcgccaggagagaccgcgccagtctctctgcccgggccgccccggggcggggcgcgtatgtgaacgctcgagccctcggggctcctggaagtcctggaagtttcccaggatctcttttggcgaggcccaacctctccacctgcgctggagccctggggtccagtccggcttccagggaaacgcatcaccctggaaactgcctgtgcttaacgtctcccttccctggaacatctactttgatctttttgagaaactgccattgacagccaggcatttatttggaaatctttacaccctctcactgtaatctattttgcgagccaaaaatcctccctttcttcagtggttccctagatcagtattgctgaaaggcctcttgatgtccggataggtttccgcgggcacactacttcagatggggtctgatgccgccagctact

SEQ ID NO: 8842 - DNA, 6000 bp, Homo sapiens
cagacttcggctgagcttggagggtgggaagggagccttctcagtcctctctccctccagtctgattttataaagtgctgacgagattgggaataaagaggcataaagaattctctgtgtgtatgtgtgaccaagcacgcactgggggccggggtgaggctgggcacatgcatgacttggtcccgggtgaaaggaaaggcaggccccagcaggggcaggggagcctgtggtgctcagccagtcctccctcccccacgcctgcctaccttttcaaaacctctgaatcacaagtccacacttggccagtttattaaaggcagggagcttcggcagggtccaaaagggagaagttgggagatgccccctcctcagctccctccttccccaacaactcttctacagcccagcccccagggcccagaggcagggctggcgtcaggcagactgtactgcataaatacgtggaggccacagcccgaatcagcagcgtcagggggcagggaaactgggtttgggatgagaagtgggtggctctgggggcacgtcccccagtgcttgtccagagcccagggacccacagagccagagaggggaccagtgggccagcttggggtctggctacggccagccctgcccagcgaggctggcaggtggctctggttttgggggagaagtggggtggggtgtggccatgccacggcccacggggacagggtggggtcaggtgctgttgccctgctcctgttcaaagagtagcatggccagctgggttcgggagccgaggccctcaagcacgctctggaggcagcggtggtacaggtcctcactgagcctcgcgctgcacgtctgggcccggtagcgctgcagcagcgccggctccaccgcccgcagcacatgcagactggagaagtggaggaacagctcgtacacatccaggctctccagcagctcctcttcttgttctgaggctgccgccaggcgcccacgggctgccacatagtcggagttgtagaagcaggcctcgctggctgcctggcgatcaaagcggccagtgtcacggcccagctctgggggcccaggcccttgtggtggggccacagctgggtggaaggcttggaaatgcatgggaaagaaggcctgccagccggagatggcatgcatgcggcagcggttcaggaagtcaggcgtgagcaccgtgtctggcccggccagcaggaacagtgtgtccagcgggtgcttcttggagagtagatccatgaggcgcagtggtgagggtgcggctgtctgcacactgagccatggcacccgggcaccggggaaacgccgctccagctctgccacgtgggccttgacaggtgcgaagacatctgcatgggccacgcgctgggcctggcgcggctcatacagtagcagcagggtcagggctgccgcagcatcaccaggctccagtgctgcagtggcaaaggcctccaagaagccaggggccaggtcacgctcagccgcagctagaggcagcagcacagtgagacgtgaggcctcagtgacatagggcacaggcaagatctccacgcggctcagcggccggagcagctgcactcggcgagtgaggggccggcggcctccctggggggtcagtgcctccagctgcaagtccagcgtgtattccataccccgggccggatcaaagcgtcggtagccattcaccagctgctgcttctggagccgcaaggccgggtggtagcggcggttcagctcctctagagctgtccccagaacatcggccacatcagcccggtcagccccacgcagtgggcagcggggtgagccatcggcgcaggagaaagcgtgctgctccgtgaagtagtcccagcgcagcacctcaaagcgggaggccgggcgggatggtgctggaatacccacgggccaagcagctgcctggtccccatcaacggccagatggctggtattctggatctcccactggatcagagaaacaggccatcagcaagggacagattacagggagcagcacacagctgggggactgggtaggcagtaggtgccactcaggatgggcccctcatcccctgccaacctctgcccatacctatcatttccccagcatagacagccaagaggctcatcagagaatgtagaaacaggcaggggctgggaagtagttttgttctgtgattctagtgctaacttgtcatttctctgggctctctgtgacttctcagatcctgtccccgtcactctgccacccccagacctagaccatacctgtaactcctggatctcctggtacgtgcgttccagttcagctcgggcgaaagctttgtgcagctggtacatgtgcacagggtcacgcacagggtgggctgtcagggcacttcggaaatgagggtccccctcctgcactggctccccagggctcagctccagatggctatagtgcaccccctggggagaggaagggaagggatctgtgatgagctggcattgtcttccgttgtctcatagtaagtgtctcatctcctcagcctatgacctgttgtggacttgcagtctgagggtttaagtctaccttgaccagttgtgagtctgtgtgaccttcagcatgcctccgctagctcatctgcgaaatgggcatgcgtcctgtctcagagctgtccaagggctaaaataataactaacatcaaatgcctattatgtacaaggctccctgattttttctaatccttgtaacaaccccgagcaataattatttccattggcacaaaggaagatactgaagcccaggatatttagtaatttactgggggtcacagagatagaaaataaatgtccgaattggcatggaaaagcagacctgtatctccaacatccctttgcctctcagagggatttgaacatgacaaggaggtatcagtgggatagcttatcatcccacctcgtggtcaccagtgcagcccaccccggtggcatcgagaatgcagcgacccagccactcgtcagggcgcgcactgacgatgtcgttgcggcagccttccaggtgggggcgcagttgttgcagcagcatgcgcgacagcagcaccccaaagcctccgtggcagtagcggccgggggtgggctctccgccgatgaagtcctggggccggcccaggtacaggtgggcggcggaggccaggctgaggtggccagttaggcgtgccaggccgtgcgcctcggtgtaggtggtgtcaggcaccaggaagaaccagtcaaagtcgtcgccgtgctgctccagcaggtggcgcagcgccaggtgcaggtgtccaatgggtcgctcctcgcctagcgtcaccactgccatgccaggtggggcccggcggccccgtgcgcccgtcaggaacaccacacgctccagccggtgccccagcgtgcggttcacggccacgcccagcgtgggcagcgtggtctgagaggtcagcaccgccaccagcagcctctgcctgatgcccagctccgtgctgatgtagcgggtcctaggggaggagatggcacaagcttatcaaaaggacaacggggcggggggtgggggggaggtggtcagcacagaccctggcaggtcacgtcttctctgtatctgttctctcacctatgaataggttaaaaataaaccctctctcccaggggtcatgaggatttaaacgaaatggtcttaaacaggtagtgctttgcatttgggagatggcaatacccacccagataggagagagatattgtgggtctgactccggggttcgctacttagtagttatgtccttgagcatgttatttaacctgagccatctgtaaaatgggactgattatatctgtttaaagcacccagccaaacgctggacacaccatgtatctactcatttctatataaatatgccattatgccacaaatgcctcacataaatgacataaaggaacgtttggcataggggtgtactgagtgtttttgcggggaggggcaaactgcactcaggggctctaggaacttaccttttggtaaggcagaaggtaaattgcagaaccagcatttgaacccaatgttacttagaagttatttcaactcatcagcagagacattaatgagataggtacattcctccctcccccatctcaccctgaggtggcccttgtaacccactcaggaacaagagatccaggtaaatcctagttctctcctttctcttcccctgtctctatacactcaccctatatataagtcatttctctaacaccagcagcccagccagggagctagtaggatctctggggcgccatcgggtcgagccggtttaggacacagtccagtaagttcagcccaggccgggatagggcccagagaaagtctcggactggccccacggctctcgggaaggcagggccatcggaagttatcggggcccaaagacttcctggctcgccagccccttccttccggagcctgacccgggcccgggcgacctccccgcgcgcttcccggccgctgcccagggggtagagcgggcgcagccgatcactacctgacggcctttttggcggcctggccgggctgtgcagggtggtagggcaagacgcgcggctcccaattctccccggcgccttcgccggccccgggcttctcgcgctccgctccgggctgcaccgagttgggccggcgcgccgcgttggtgttgccgcgcggcggcagctcagagtctccaggttggggcgggcctgggccgcacggctcctccacccaggtgacgctgagcaggctcagggtgaagcccagggagatgcccacggccacgggccctgcgggccgcagcaccgacagcagcagcgatgcccgcatggcgcccggaccgcgggtccccggccccggcgaacccccagagcagccagaggagtctccgagggggcgggaccggggagggggcggatccggagggctcgggccccgcgggcgggcccgctccctccccgcagagcagagccagcggcccgagccgaatccccggagccgcgcctcgattcccctccagcagctgctctgggctgcgcagggttcttgcgctcggcactggagcctcagccgcggccgcagctgtccgacgtgtcactgcaagggccccgcccccggggtggggtctcgggctctcgctaccggagagggaggagaagggggaggttaaaggggaaggacccccggaagtgccccctcctcagtgcgggagagggagacgccgggggcggagtcccctgcctcccgcggcgtggttggtgcgtcccatgtgacgtcagaagcagcccgcccctgcctggatggtgcgccctgagtgacgtcaggagcagaggccggagctgtccatcagcaccaaaggccgcgggcgggctcagggcatggggccgcggttctggggcggcccgagccccggctcctgcgccttccccttcctcaggcccagcccgagttcccggacgccgcgggactggagtgccagccggtgttggacgtggagcggcgccgccaccgcgccgacaccattctctccggcccagcagcccccttcctcgcacgacggactttccctggaccccagtcagttggagcctctggcgccccgcaaccccggcccctcgggcctctgcacagcctctttcactcagaagctcaggtcgcctccagcccaggtaaatcttggacaatcccatattgagccgcccacagatgaatctcttggctgcctccttctcactggcagcacgctcccttcatccccccgactcccgtccctcttttaacttcatcccagcctccactagccaggcacttttgtttccctttgtctttgctccccactccagagatgcttccggagctgcacaaatgtggatactattcctttgtccactgtccttgctgagttctcccaatccctctcccacccccatcctggtggggacccaggactcctc

SEQ ID NO: 8843 - DNA, 6000 bp, Homo sapiens
tctaaccctcagttttctctccttcctgatatttaaaaaactttttcattcatttgatactaaaatgacagcaatttttcccatcccctaaaccagtttcctttcttcctttttcctccccttctcttttcatattcaaagaaagaactttgactttgttcttgtattcagacttttcttttcactcttttagctatttcttattaatgctagaggcacattatttctccaagtcaagagtaaataccaaacttctctgccccttccccttaactgtaagctgctgattaccgaaaggccctggctactgatctcaaagctagaggacagttgtacatgtacaatgagctagacagagcagctagtttcttctcagccttaggcagtaaacgctgatcaagtgtctgctgaaagagggtatctggaaagaatcgaaatgaatgtcactggacacaaaagtattcaggaaaatttgaattttactgcttcttctcttcatttatatagaggaagtgatgagaaccatgataaaatgcaaaaacatgatgtaatttcatattgatttgtttgtatagctttgaaaatagtaaaaactaagtttagtgaaattaaactgattctatgattcattagcatcacttttaatggaacagttacaacatttggaacacacatctttattataaattctgaagtactggagccttttttctgaaaatagctaaatatttctttaaagtccttcctcagtggtgtgtacttgctaatcttcctaggtagggtccaggttctaaagttcagatactagagaatgttcccttacatattgaaccctgaaaatatattgtaaaacaaacagtattattttggtaataaaaaaaaataagtaggctgggcacagtggctcacgtctgtaatcccaacacttcgggaggccgaggtgggcagatcacctgaggtcaggagttcgagaccatcctggccaatatggcaaaaccccgtttctactaaaaatacaaaaattagccaggcagggtggcaggtgcctgtagtcccagatgcttgggaggttgaggcatgagaattgcttgaacctaggaggtggaggttgcagtgggccgagattgagccactgcactccagcctgggtgacagagcgagactctgtctcaaaaaaaaaaaaagtaaaaatatgtgacactgtactagactgaaagaagcaaatatttttctgcatttgaatagggacaagtaagtcacatgcctatgcaagtatattcctttatcataacagtaacaatagtgactatgtgtacacatagatacatacaggtatacagacatacactatttaatcttaaacattcacttgaatttaaatacatataatatttacatttcaagaaaatcaaagagataaaatcaacacatcaatacttttctctagttctttgaaattactcaaataatacaaatattagaaaaccaaaagtgataagctatggaattcaaggctatagctcagccacatcagaaataatttattcaacactatatctcaaccttgagtcaagacagtatactagagatcttaactctttgctgtaaaagagaattcactaagttcaagtttcaaacaatacttatcctcacatagtctttatttgcactattctatacagcagccacatgtagttactgagcatatgagccacatgggctaactgggctcttgagactagatacaccttggattttgaagactttcatttaaaaaagtaaaatatttcatttgtttatgttgagagcatattgaaataatatttttgatatactagattaaatattattaaaataatttcacctgtttcttttaacgtattttaatgtggctcctagaaaattttaaactacatatgtaacttgtattacatttctattgaacagtgttgactatgtcattcaatctagcacttaataaccatagtattttttcaagcaatttcaagcaagttcaaaccctttaaatgggtcctttacttgactcatacaattttttgtgctgatcttgtctttccaactagaatagacacttaagtatttaataagcagatatttattgaccaaacttcattcattcattcattcaaaactacaatcttaattttatcagaagaggatcttttatatttcaggatccatgaagcatgtttttctggaaatatgtgatgagaacccaagattccctcaacggaggtattttatcaactccttaatctcctatagaaatagatgtgatctcaagtctcaagtgagtacatttaggagaatttatccttgagggtatatttttaaaaatcactactattttccttattttattaatcaatcttttaatggatatcccctcctcattccaactcaatgatccattaaagttcagtgtaatttttaaatgcttaaatgcaatgtaaaggcctatccagcccatggttccttacctgtaccacagatcacagaaaataattttgagtgtttattttttcaattatcccaagaatggcacatccctagggaccactctagatgcacgagagagaagttaattcatttcacagaatagatgccttaagttttatctatgaattctccagtagagcccaattaagaaatgactagactcttgtattgcctaaatattgattaagattcacaaacagaaagtgtttttatctatacagttgtggtttctcatctgaaaaaagcatgtttctaagaaaacaagctctcaaaaaaaaagaaagttagcattttgtctggcagattgtataattatgctctaaaaagacttctaagatttactcagaaaaacatggacaacaaggagtgggtcagtgatgtcttgaacctagacactgtactctattattacttaatcgagtacaatcatgaattttaataaagtacacatatgaattccatatttccattcttaaaataccactaagtaatcacggttacagtcacagatataagaataattgttaatttaaggttttactttacctaaatatatcaatccaaatcctccagagccaatcttcttgcccagtacccactgattgccttccatatcatccagaaccttgccttctggaaatggaataggaagtttgtatttttcatttctttttggtggcatcacttctgttggcagaaggggtgagataaatgggtaaaaagaaaaacaaacaaacaaaactcttaaaatacacttcccaaaatgtcttcaatagggaactttcccaggttcccagaaattaggattctaaagttaattcagtttggaaaagcccacacattatattcaaattagaaattcacatacattacaatactgagatctaagaggtatagatattttaaaaaaacagaagcaaactaaccaaatttcatccaaaattcatttcggggttctatagcacatattaacagtgcaggacacaccttaagaaacacgaaattaacaatttccaatgaagaaagaaaataaatttcatgtacatggaaatattgctgtcactgagaatgtaaaatgttaaaagtgagaaggtcttcagtcactagaaaagaacacaggattggattgggaagacacagacaatggcaatggacatctcaccaccgtgatactaggtactcagtaaacatttgttaaatgagccagggattttcacggatatgtaacttagcagaatactaggccatcagttctcgggctgccaaaatattctcagcattttgtcttcttaccctctttctcagtttatcacagtgaaaacagtcctgccttagagattacaactgtgccaccaacaacaaaagcataatctccacagcacagccatgcaactttaatcaactaattataattgtacataggttagcaaatttctcaatgggaaattctgagttaaaagagaaaatttcttaggggaaaatacatatgccagcatacatgcctgaaaataatttaaatgtgaaggtaaccatgatcctctaagtatttaaaactattaagagtttctgacatgaaagttaattaaaaacgtatatacgtaaatgtaaagttttcttaatataatcttcctagcttccataaaagaaagtatctgtttttcctttaacgggtttttcctccttcacttaactgcttttttacttagcagtattgtcccaggtagagtcgctgcgtgtatctttaacaatattcaccttcctcctgataggcacacaagggctgggaatttggatggtgaactatgcctagagcattgattgtatcataaagcaggaaaagtttttgtggaggtttcccttgaccagtacattatataggctggtgcctattacagatttactgatttaaaacttaaagtctccaaagtgtaaactactgattaaggaataaattctaaataattataaaaaagataaatacactttggggcaaggcagcggcctcagggcttgaggcggtaagggagactctacgaaatgtacatcctgggggcgagtcccgagttcatctgccaagggaaacgacagcctctcagggcccgtccctgtcaggggtgtcccttcggcttctgggtaccttcccagggctaagatgagtcctcaacacgagtttccgagcaaactggtacccaggggttaacatgtgcctgggctgacctccaaccccgccgcggcccctgaccctgcggaaggtaacgagaagcagcgcggcccagccgcctggtccgtccgcccttagcacgccggggacctacggccaaccccgcgccccaacttcccgccacaagttctctctgcaccggcaaaaagagaaactccacccacttttccgctaacacgtcggacccgcttttggcaaacgtgagtagaaggggacgccttgttctcactcccagcggggaaaaaagaaccaaacgcggaagcagcgactctgcccgggccggagctgaggcccgggggctgggacggcccggagtccccggcatctaactccgacggcagcccttttccgagcggggccgcggctccggcactgcaagcggaggtgccgcccgccacccaagaccccagagcaagagactgaccgggcctcaggatcccccgtcgccgggccgcgcgcaccgcctcctacctgccgctgcgacgaggcggagcccccgggcctacagtcccgcggggaggcgggcccagcactcgagcctgccctccctaggacctgcctaacttctctccagctgcgtcggcctcgcagtgcagcggcccgcggagcctcacacaggccgcagccggttcctttcagcggcctgtccacgccccggagacgcccaggggaaggagagggcgcggctacatggggaatgggagctgtgttactacctccaccctggcccgccagcgtctggacgaagaaccgccgccagaccagtttggtacgaaataagcacgacatgcatttgtgtaggagtgttagatctcctgtaccacaacctgagtactacgagcttccaaatggctagtccttaccgagctctcgccgagcaactaactattggtactagcgaagactccagttaggagggcctgtatgtaactcaccgcgtttaagttctcaaaggcatattggttcaggacctatttctgccattaatcgtaggataatttaacaccgtaattaacaaacttcaggtttttttgtctgtgaaatggaaataacccttgttgttagattataaggttattggttataagattatgacaataaggtgaggactttattaagcagttttctaatacataaagactcatagtggccaggtgcggtggctcacgcctgtactcccagcacgttgggaggccgaggcgggtggatcatctgaggtcaggagtttgagaccagcctggccaacatggtgaaaccct

SEQ ID NO: 8844 - DNA, 6000 bp, Homo sapiens
agactacgtccacttcccactgctgcagtacgtaatctttaccatcctcccaggagccagcgggggtgctacacagatccccagatcccatgctatggctcctaggctcacccccggagcaggtaagcagccttcccaccatcctaccgaaagagttaaatatatccaagattcccttactatccttgaagaaataaacctgccgctatcaattcacaagtgacttcacacgtgtactgcacacttccatttgacccccacacccctgtcaagttgctttcagaaagatctctattccacagtcatccttctctgtccagcctcataacaaccaaccacctcagcaagtcccgagtacccactgcagtgtaggtcagcctgtatttctggggttaggttctaaagtctgcctttagggcaaaagccaggtgaaatttacaaacactcatgaaaatcccttagctggaaccccccgcctttgaaaaatcaaaaaccaagaattaacgtcttgtgcgtttctttgctaagcttacagattccgtttcctcagaggcagaagacaccaaggcctgagcaaggaagggcaaagggttaaagaaagggatttctccctctctccaccctcagcaggaagagttgatgtcacaggttaaactgagtgtataatatcagtctctattgtatttgcaaggcatatgctaggtgctagcaggcaaagaaatgaatgtaagacccctgccctcacataacctacaatccagttgggagagattagatcatgtcctaaagatagtggatcacagtttagcacaaaacatcagaattgtcagacacaatgtgctacagacatccaaaggagttaaagacattgctttagtgtaggatggggaaattttaaactggttcttaagctatgattatattcttaaaatgggctgattcagcactaaatcagtgtttcaggcacaattgaccctgtcatctaagcttacaacagtattttctgttttgtctcactgtccctcttgaaaataccaaataattcactggcctcactgtccacagtaatatgttgagccgaggtcttcaggaaaccatgcgccataattctggtactatttggttatgaaagcttaaattaaatctcaatatattgttatgctaagagagtctatataactgagaacacagaataaccacttctttataataaaggaatccttttatataagcatttatcctgacttccccaacaaattatttataccatataaatactttgaccctttttttccccaaccctgtcattacttggtctcacaccagcctgtgttaaaattaaacttgcctatttctgctttcttgcagagtcctaagacttcctgtaagtctcgctgcccgttttggctttttctctactcttagcattcaaggtgacccagcaatccctggaagatggccctgggccacatggcactccgagtgaataaatgcaaggaagcaagtgcttaggtacacatcctgaatacagctctgattcttggctagctacagccacacttcactgggctttttcagaagggaatggggtggaggcaggcaaagaaggacggacccagaacttgttccaaggccagctggaatagagtcaatagtaagagtccaggcaccaatatttaaatagatagccctgacctatgcatatgggaagcagtttgataaatcaacacaatatagtacacttccaaaattcagatgcttgccgatttctctaggtctgaagaacatttctggcttttccatttaaaaatggcatgagcatgggtcagagattcaaatccacattctgttaagattctgctcaagctgaactttcagcttcagtttcttcatctgtaaaaagaggcagttggactagatgatctctagttcagaaaatatgattttaagagatggaacatgacaagtctgagaaaagtcaagaacaaacctagtaagggtcagaacagaacagaccgcgggcctggagcatttctggaagacagtggtggtcagagagagagaccccataaagaagaaaatgagggttggcagaaatccaaaatgacttcatgagactatctcttatagatctccttcttctaggttcttccctgtgatcatatatagatccatctcttcccagaagagctaagagtgatgattcataggctggatatacccacagtcatcatcacataccttccacctctgggaatgactcaatcttaactacctaagagaaattaaagagtccaaggtgctcagaccctgacctcagtcactcggcggaccaacttggctgaccattgagtaatcttttggagtccgaaacttctttaatatacagcctgaaaacctggatgaagtttatggtatctacttcaattttatagtctccaaagctttaggaacacccgacatgttttggggctctctgacacaatattattctgcaaaagtcataactggagtttaaaatgtgactgaatagttaaaggcactatagaaaatttgaactacaaacatttatgataggtcttctatgatcgtgcttttatctgaccgtcccatgcatctgatattttacttctccttcctcaaagtcctctgttcattaaactcacttttgttataagtctaattaagacctattaaagttaagttgctttgaacatgggtttcataaatatgactgagtttaaaatatcattacccaaaaacaaccacctttggctttactctcaggcaatcttagaatcacagaatgtttaagacaccttgtaaggtacctgacacacagtaggtacacaattactgctttttaaatgatcattaacagctaccatttagtcagcaagtacccatgccagacaggcattaagcactttgcatattatctcttaatcctcataataaccccagtaagcagtaatatctccattttacagataaagaaattaaagctcaaagtaaattaacagctgctaataaaaggccgagaaggaatctcagcttaggtctctctcccaccaggtccctgaaagacccccactgagtttttccatagagtttaggaagctggtccagaagttttctcagtcttactggctctgccatttacacccacattctttactgtcaaaggttgacaactgacctgtgctatggcctgtgtgtgctggttctcctgggaagaccaatgctattcctgaagctggaataaagctttacaaaagcatggaggtgggcagcacgtgacataaaccacagcctctttaaagtgtggtcactgcctttggactctaggaaacatacagtctccttatacggggcctctcccctctgtcagctgctaagaagagctttcctagaaggcatcagaccccattgcaggcttatccttacctcgggaggagttgcctcagctctaataccagagaagcccagcagcagtaacaagttttagcaagcatgctgctaaccttcacgacacagattcctggcaaagtcacgtttcgcaaatctccactgccaggatatttcttgtcccagtactttcccttcacactttttgcttgaacaagtatttcaaggaagccaccggtttcagtggggctctggtgcagagagagaatgcccaggagaatgaattccctctgctggcccacaatcatttctgcactaacaagctcaaattctacacaccaagtattccgagacaataaacgtcatctattaactgagttaacaggaacctttcatttcagatttacagcttaacaacaattatttctgagagaaagcagagtataagcagctggccaggcatatagcctcagaccaccctcctagagcctccccacccccagctaatttctgtgcttcacctagcaggtgttatcagaaaaaaaaaaaaactgactaaaattcaggggctgcaacattcacgaattccaaagttgttaaccgctgaaatcaagaggtttcctccagttctaaaatcccattcgcctctcctaaacacaaaatctcttcactgtggctgcactttgctttctccggtctgttggtcctggaaggtccttagttcaactcaaggcctgggtggggaggggagaccttttgttgctacagcctatttttcagtagcacagatgaagaatgcaaccccatagcgattaaggcgactaagcgccaaaataccctctccggcttaaatagccgatcatgtgggaaccaaacactgtttaagaaataaaaggagaggccagtagtgccggtctcctctttctcctgggaggtttaccgctacggtggggggttgtcccttacaaaccttgtttgcaaagtccaggctcagatcggacattttgctttaaccccttggctgtgcccgcccaacgcaggagccgagcgggtctcgggtgcggccgagtactttgggggctgggcacatcactcagacttgttttctcagctgatctagtccagcgaacaggtgtttggttaattcccgcccccacccccatctttttttttttttttttcaaaggcatgtaaaagtatctcctaaggagcgcccccgccttgctgagaaagtcatgcaggacacatggaaagtggctttccaacttgtgcggggcgcgccagtctgcgggggagacggggtgcaccgtgagtttgggaaaggcctagaccatcctggaactacgctccctgcaaacccacagcagcgctgcggtgaccctgaacgccaccccagccccaaacacacacgtgaagctcagcaaagcgtgccacctgccggggtcccagcaaacacgcccggagggaagaaccggcggaaagcactttgtttaaaacagaaaaaaaagtaaactctcccggggcccagcctagccctcgggttctcctccttcccgagctgaatggagggaggcgccgcgcggggcgggtcagggcggggagccgagcgcgctgggcgctgggtgcgcctcggccggcccgggcgcgacccacgggccaactactccccggggccggcgggaacagggcgcgccctcgcctcaactcgcgcgcaggccggcgccccagtgggggtgggaagggtctgggaactcacagccgcttgtcctcgggctgcagttgccagtgcatggccagcgagaagccgaagaggctcccggggtctccatatttccggatcacgttgtcctcccgagtgtccaagttgaaggctgcgccgagccgggacaggagccccgccgacaggtagagcaagcacagctgcccggcggcggccatgggcggacgcacggggaggggagcggggacctgcagcggccgccctgcgctccgggctgggtccgaggctgccgcgctgctgctaccgcagccaccttcgcctcctctcgccgctgcgcccggccccacccccgggacgggtcgcgctctccgtccggccgctccccctcgcgggcagctcgcgaccgctgaatgagcccgttgttctctggagactcgcaggcgttttatcaagtgacgaggacgccggccccgcccctccccaccctctcgcccctccttgcgcgcccgcggcccggcgcaccgcccgcaccttacccgccggctctggcgtctccagctgcccggtacctgcccggaagccacgacgtgggagccccggaggcgagctcgcggcgaagcagccccactgcgccgccctctgtggacagaattgtggttgccgagtagcacagagcgagggagactttactacccgttataaagagaagtgcaggtgatgcaccgggcctcatggcctgagcagcctgttcttgcagatgtgggcccacgtgcagatgcatacgtcattcattcatttctacaggtgtttatggagcgcttaaggcgtgcccaacacttggggactacagctgtgtagactgttctgggtcc

SEQ ID NO: 8845 - DNA, 6000 bp, Homo sapiens
tgtatacatgtgccatgttggtgtgctgcacccactaactcgttatttacattaggtatatctcctaatgctatccctcccccctccccccaccccacaacaggccctggtgtgtgatgttccccttcctgtgtccaagtgttctcattgttcaattcccacctatgagtgagaacatgcagtgtttggttttttgtccttgcgatagtttgctgagaatgatggtttccagcttcatctatgtccctacaaaggacataaactcatccttttttatggctgcatagtattccacggtgtatacgtgccacattttcttaatccagtctatcattgttggacatttgggttgtttccaagtctttgctattgtgaatagtgccgcaataaacatacgtgtgcaggtgtctttatagcagcatgatttataatcctttgggtatatacccagtaatgggatgaccccagccctcttctacaacctcctcccagctgttcccacccttgttctcttgaagttcctgcatagaacaaaaagaggctcaatgctcattcctgccttagaatcctcagcctggaattatctttctcccactcttcacttaatggactccttttatcactcaaaatgaaatgtctcttcctcagaaaggtcttctctgaccctctcatctaaactagtgcctccctacccttgttactctctcccatgaagtcctttagagaacttaccactacttaaattttgcattggtttgtttaatgcctgtctccctcccacttctcaccccaccccaccccaccccaaccccccaccgtttcctttaccacagtatacccagcacctagcatagtacataacatcatgtaagtactcaaatacttgttgaatgaatgtatgcacggatttgaatatataatgagaatacatatatgtgactatataagttaatcattatgtcacctttggtgagcatctggtaagtcctcggatggctgattagtagaatactcagcaagatacttcattcatttggcacttcaccaaactcactgaggctggctgctgccaacattaactgcttaactgtaacattattggctaaaagcagatcttatgcctttatcgttcaatacttgtgcaactgaagacaatatttatacagtatctcctcaaagcaaatcgtagtgcaaggctgtgcaggattccaaagagaatgagacctcttgcccacaagaaaaataccacaacctagcctagtaactattttagcttattaaagagtttacttttataatgtgtagattttgatcctcttaacaactgtgaaaaaaaagtataatgtgcagatatgctaaaaagtttcaaaagatgatctagagaaatgataaagaaaaacagggatgaaaattctaaatcagtttctacattttgttgtacattttaagccttgttattatgttcatgataattgagtattcactccaggcttcacaaaacagcaggcccctgaaacaataaaacaacaacactcttctcctctttctcctcctccccagcttgtacttactccccatcccctgcctccaataagcacccacagtagtcaagaccagcaagcaaaggccaggtccaggatgaaattcaaactcagttccccactccccaaggactctcgatagctcactccctcctgttctgctctctagctccagagagaagtgaggcagaaagatgctggacttaaagtcagaagacccctgactgtgtccaagttcaaggctcagtttgccttaatttcttcatcagcaatatgggcttcctaacttctgtcccacctatagcttataactctcagttgctctgaggactggaatgagatatcccatgtgaaagttcctacaaaccacaataggttatacaaatgtgaccgagtcattgtgatttttatcaggacttaaacatttagcatcttgtattgttctatcttgtctcactgatctggagtctccagatccactataagttcaagctcagagaccatgtcatagattctgcctaccttcattgcctgtagtactgggcacttagcacccatacaataagcacttgtgaattggtcactggttgatttacttgacaaatttgcgtcggagtacaaagtgttctgtggtttttctgaatttcttatattgataaacacattttctgaaactcaccataatgtttccctggcccatgatctttatggtttatcttccttttttcctaaccagctgggcagaatttcaccgaaaagcagaccattttgtcaaaggcaaaaataatattttgctaacgcagtctttgagattccttttaaggctgagacatgggacccaaaagtcacttggtaactgtaagccccctctgtcactgttcaacaaatgtagtccgagatcccactaagcacagggaacagtgttggaactgtaggaataaatgaggaaaactgaatctcacagtggctctgcagtcagactgcaagggatagaatcctagcttcaccttttccgggctgggtgaccttgtacaagttactcagtttgtctctctttcctcctgtaaaatacggtgataatagaacctaccatcctaagattgtcatcaggatgaagtgagttcatacatgtaaaagcttttagcttttagtgcctagtacagcgtaacaacaaatattagagatctaggtcagtgcagctaaacagaccaagacccagattagcaaaatgacatgtcaagtcaaggagccataaagaaatagatatcacagctggaaactgggtccccacatcctattctcttctctatgatgtttctttgtgggtatttcacacaggtggcactctggaagatgcactttcctgacacctgataagcagagtcaataaacacacccaccttctctgcttcaacataccctgcagagtcgtccttcctcctagtgagacctcaggcccaccatttcccactggcctcccatctgactcaacatgcacctggggggttccatctactgctggctcccacagcaatactgcagtgaagaaagcaagcatcacatcctcatgcagttgttatgggaattaaatgagataatgcctggaaaagtgcctagcagagtatctgatatatagtatgcagctaataaatgttatctattaaaaaatagaaggaaaaggaggaggaaaaccctgtggtgcctactctctcaaagctgacacacattccaatggcaaatgccagacacagggcagattgagatgggtggtagaacagagggatgcacgtctgtgaagaattacagtgaagggcaaaacccactgaagacaggagggagctgcagttcccactctcccccttccttcttaaaagaagatgatgatactcagttggtgctttgctggcaaactcaagctccagagctttggatttttaatattataatatttcagaacagaacaaagactgcttctgacctcccaatttgccctcatacacttgaccagcaaaaccttagcgtagctgcattcatcaatggctctattcaggcaattatgggtcagacaaaagattcaattaatactgatcccgcaagtctccttagtatattcacaacatgctttggattcagagttctatggcaccttcatatgaccttctccggatcccaatattgacaattcctagttcagaaacgacaaacataatattagaacaagagaagaagggaagctggtgagaaagaaagaacagactagactgggtgcagaaattatatcatccatttgctgtctgtccccgagtgcatcctggggcctggcccatggcgggctggttggaaatgcatactgaacgagtcaatctcctcaagaaggtcaccacccaggtaagaagtggagcctgcacattacaccaagttcagctagagaatcaaagccacctcttcggctccagatatgcagggaagacaaagcacgagggcatatgccttcagctaagagataggtgcgtgcttcctgtttacctgggcaggtatttgcaaatagtctaagaaggggggcaactaggagtgacttacacagttccaagtgaatggttacgcaaatcgcttgagtaaatacagggaaagaaacaggaaaggcttctgaactgtttgtactcatctgctccagtattttcagagggtagggtgaaagacaaaaaacccgaacgaaggctccgggccaaccacaaagctactctccggcaggaacgtaaggaacacctaccgcccctccccccacttcacgccttggcaccaaaccagggcccctgggtcattttggcaggtggaggtagctctttgctgtcctctgcccctgctgcgggccacccgagtgaagctttcggctcggtctccccagacaaaaccggggggagacatcaagaatgcaaaaggtgctcctttctccaaatgaacgagaagggacagagcggggttgggggtgcaggacaagccctgcaatgcgaaaggcgcccagccaggctcgccgcggcccctgccggcaagactggctcgcttgctagccaaggtgcctcaggaggtcgggcagccacccagaaaggcgcgaaaaaaaaaagaggagttcctgaccccggggtgacccttccccaccactgccactgatccaaacgcagagtccgcaagtgactccacacctgcgctgcaagcctcacgccgtccccacccagggcgcagcgctgcacgagagcaagggccctgggttcgctcttccctgcaactgtcgcggggcgcctagcacagctgcagggcaaaggggaggggaggaatgacaaagaaggcggagcagacggcccgggaagcatttacaagcgccaggaaagcgcctcctctcgaggaagggaaggaacggcttcccggccaaggaaacgccccggggatgcccctacgcgaggtgccgcctttcttcggctcatcgattctcccgcctccaggtggtcctccccctgaccatagcccaccccactccccgaaagctgatcctaaataccttccccgaggctttcaaatcaacccagccaccgcttcaacagcccgcagttcacgcaacaggcggagccttagggctccagcgacggcgggctctggggaccagaggatgcgggcgccgcgggccagacgcccagaaggacggaaagtgctctgcggccgtagaccctcggggtcgtgcacccgcgacctggaccacaggagactggggcagcaaaaggtgggggaaggcgcggtaaagttgcagggtcgcccggagaagtctccggagcgcgcagggaggtggggacgccagccaggtacctgcaggagtccggacgcatccagctagctccgctctgcgacgccgcctgcccgcgctgcagggatcaggcctcgcggcgcggccccgcgcctgccgccgcggcggcgaggagagcggggtggcccgcgtcggccggtctgtccgtcggtcccgccccgctagagcgaggctcccgggagctgcgggcggggcggggccggacgggacggggcggggcccgccgctcggccgccgccccattggtcgcagctccgccagcccctcgcttcgggcccgcagccgggcgccccgggccgagggcgcgggcggctgaggactgcggggctccgaccgccagacaggcggacagacccatagacctagatgctgccctgccggccgcgcgcccccgcccaggcccaagtgcagagtcaccccggagcggcaggcgctgtccgggtgggaccaggagcgcgccccgcgcctcccacctgcgcgccctcctgggccggaagcgccgtggccctgcgggaaaaagatgacctcccccgcggccccggcggctggggcaaccgcctttctaaagtcgcggcccaagcgacactttgctaatttgcctggatt

SEQ ID NO: 8846 - DNA, 6000 bp, Homo sapiens
ctccttggcttctggacacctggcttccgggactgcctctgaggcctggtccaggctcccacccatgcaccgtccctgacctgaaccccagctcctccccactctgtgggagccctggccaactcaccactgtgcttgaaaaaccccaaagaaggtggtgttgtgccaggaggtgtcctgcagggtgtgcatcgcctgcagctggttgaagtagagctgccagttcggggcagagcatgccagccgcgccttcaggaacgtggtccacttcctctgcagggtccgtgcgccccccatatcgccctggcagacggcaaggggacactgccggtcagccccgctgggccagcagggctcccagggcccaccgctgtgagactcggtaccttgcagacacgggccacacgagccaccacctgctcggcatagcagtcggactccactgcccgctccctgaagaagaagtagaccttgtcgtcgtcccccgtgaagctgcccacactctcaggtacataggcagagcctacaaagtgaggttctgtgggaaggggaggaggtcagcagggaggggctgggccccgggggacctcccacccatggctcccacaggccccccggtggctcaccgttgagccaaaaggccaggtactctgtcttcatggagtggtggggccccatgttacgcaggataatgggttccgtgcccaggaagttgttgagtgtggccgagtacagctcaccatctatgggagacagaggtcagctaggccacacatgaggtatggacacatccggccaacacagacccaagtggaaccaagccccaaggactcacccagcctgcatggggggcagccactcacccacaagaaggccagcatggcccttagctgggtcatagggacacttgcccttcccatcttcaaactctccatgctccaaagtgaaggtgagcatgttctaaggacagagagagaggtgatgaggagatgcttaagggcagggctctgtgggccacatccacgagtccagagaagggtgaggagggcggggggctggggacaccgaggtaggagggcagcactcacgacgtaggtgcacttgggctggaaggcgtaggtgccacagacgtacaggtgggaggcattgtagggctgcaggaagcggatgaagttgaagcactcggtctgggggcagaaaggtgtccggttagtgagagcgcgagggccagaatgggaggagacgtcctggggtgaaggcagcaccaggagcagcgtccaagcacccacctggttgttcttccctttctggatacactcagtcttcttctccacgggggcctcccaggagatctggggaaagggaaggggatgtcagccacgttacaggtacggactgagcacgtgtcacaagcacagcctgcagcagcaacacagggacgcccagtgcagaggcatggtccctattctctggggacttcctttagtacagaatggaagccccaaaccaccccactacacagaattcagtaagtgccagagaggagaggaatgccgcatgctgaccccaaccagagggcaggccccggatgcccagcagcacttctgtgggggcagccaggctgagggaccacctagccaagcacagcccctctgggccttgccctctggcaggcccgactgcctcccactgccccacctctcaccgctccttgcagctccagggcctccatgctgaaggcaaacagggcctctcgggcgcccacgtacagaagcccagtgggctccgtcagcgtcagtgtcaggaagtcctggatgccggtctgggagaaccgccgtactaccgtggccagctctgcaggggtaagcatggctgctgatgggcaggacccctggggctcgacagccctcagtcttgctccacgagagccagcaccccatgccacaagcagatgccagccaaaccccctgattggcaataaaggacacttttgaaacagcctttggccctgacagccccacctgggcctccctagcctttcccagcctgggaggaggcaaatccaggctgctgggaggaaggaaggatatctcagccacagcttccggccagaggaagccatcagactgatggctcttgctctcagggtcaatggcacctccggccgcagggctgggcacccccaccccaccttcgcttcctcggcggctgcttccttctttgccctgctgcccactgcctctatcagagtccagcagagcaggaggcacagacggctatgagtactccctgcctcaggaaacccttcactccagcaggaccccaatccaggctgccagagatgcgagcacagcaggccactaggacaggtggggatggcaggaggggagctgggctgtgagccaggccagggaggtccggagaaaccagaggctcagagagcggagatggggctggggcctgggaagtcttgctgccacccggcatgcagggcactacgacatttatacagtcacgtgattcctacatcagctgccaaatatggctgccgacctgtcctcagggtccccccaaaccagccttagtctttgcaggcaacaatggatccagacacagaccggcatggcagggcttcactggcacccgagtggagcctgtgggaggtgagctcatcccaggtccccagagcgcacggctgatacaaacacctgacatcacctttcacacgggtgtgtgcacagggagcactgctgggtccccgctgtgccccggcaaccatgcgagcatgtgcacatacacacacacttccagggccaccagagtgtatgatgtgtacagggcagtaggaggtcttaggggggcctggggagccaggggagagagcctccagtttatatttatcccggttccagtttctctttaggctcccagcgccagtgacaattcaagaagcgaggcgtggagagggcgaggcagaaggctctccccctcccacacctgggcaggcagtctggggtggggagttggacagagctcccccagaggaggctaatcccaggtcccaacccacactgcccgttcttccaactcgagtttcttagaaagctgtgccacacacgtgagaataaagccagcacactatgggggcaactcctcagcagcctgtccctgacttcctcctcacccctccaggcactcacccccagaagacactgtcttacgcggcacaaggttccaccacacctcagccccaatgcccaggccccacagccttgctgccagcagccagacagcccagtgtggggccatggcgcacgccccggctctgagcttcaggccagctgtcctgctgagggaaaagacatggtcagaaatcacagccagagaaagcaaaccagaggggcccgcagcaggagaggccacaggactcctcatcaggccttccaggagccccggtgccctccttccccttctctttggaggtggacctaagtccccacacttggcctctgcctaaaagaccacaggtctccctgggaagcggggaggagttgagttggctgaaggctaaacaggctccgggaagccctccctggcctccagacccaccactacctctgcgcaacaggaaatcatttgagaaataaaaaggggacccccgcccaacatacacactcaggcctaagaggtttgagtttcttgaaagaacctcaggcagcaggccttgcagccactggggctccggaccctgccaacacctaattctgggaggaagactccttagggcgacgagggcatgcggtggggtaggcggtcgggaaagccccaaaggggaaacctggtgcggccggctgcgagcggaggtcccggtcccggcctgtccccttccccagcgcagacaatagccctgcagaaccccaaaccccgttccacatcagcagggcaggagtgtgagaagggccgggagcgaaggggcccagcttcccgaggcccctttgttgcccaagagggaggcaggaagtgggtgggatgggcgtggaaatgaccagggcctcatcctgttcctcgcactgcctcctccgaaacaccagccctctggcggaggggcggtggggggaccgagctcgggtcgagtcggggactccggcggcgcgcgcaggcgacggggggaggtaggggcggggacgcgagggggttcctcccgggccgctggcaacgcgccgcgcacggccggcacccgctgcgctcccgcgactctgacgaaccttcccaactcggggactgcgccccagggaccctggcctgggcgggccagcgggattggcttcccctgctccagccttcccgtgccaggggcggagacgcagaagctggggacctgctcacccccaaacaaagggtccccgccaagaccccgtcccgggtccccccgggttctcccctcccccagctccagggatttgaacgcaaacaaagcggcggcgcggggagcgtggcgagcccggcctgcggacgccccctgtcggcccagagccccggcgcgggagagcgggggctgcgccccagaccagccccccaaaacgcccgcggcctcatctcggctccttacccgaggatcgggccgcaccccgtggcgtgctccgaggatccgcccggcagcggtgctcccacccgcagctccccccagggcgaggaaacgggcagccgggaggaggggttggggggaggggtgcgggatccaggcggggcaccccacaccctcgcccaccccgagcggccagccgtggaccgcggccctccctgcagggcgagcgctccagccggggacggcgcggcccggctcggcccgggggcctggctttccgggacaacccgcctccccagcggaatgggcgggcgggcggggggccgcggcagggaaatccgatcccacaacatcggcctccctccaagcccgccccaaactttccatcgggggtgggagcgccgagggcagtccaggagcctggcgaggatcccggccgcggaccggaccgcgcgaggaaccctcgctggcgcgcccctccggccccggggctgcggggctgcaggtgctgtgcgccccactcccgagaccctgcgaagcagccgcgggggtcgcaggaaggatccccgcgtacagccgtctccgccgccgcggctccccgcgccccagcccctgtccctcccgcgtccggcagcccctgcccaagcaaagggacaaagcggcggctccggggccccgcggctccagcctcacgcaagcccggcctcgctcacctattgcgcgcagctccagtccccgggcgccgccctcgcgttcggctctgaccgccgtccacccctgcccccgcgtcgccgcctgcccgcgctcgcccgccagccctccgcggcctctctgccaccgcccctccgtccccgcccggctccgcgcccctaggctcgggctccccgcgccaccacggcgggcgccggctctttctccagcgcggccgcggctctccgcccccttccccttgacgtcaggctgggggggtcgagcggaggccgggggcgggccgcgaaggctcgctcaggagggggctgcgacccgcagcgacctgtggacccgcccgctctccgcccgggggctcggacctccgcctctctgggtgcccggacctcaacccctccgggtgtccagcagccccggggctcggagtcgcgggctgcgccacagcgcctggagggaggtggggcgggggagggactccgggtatggccacgggggaatcacactcacccgatctttctgaagtgtcccccgaagactccgggcgggctgggctggggagagggactcccgaccgtgcagttgcaggaacgaccgcgggcgagccacgtcgaggcgagtatccaggggaggcacgctgggggaaccgaggcgtcttttggggcggaccagaggggtctgccgtttggcccccaattctgcctctttct

SEQ ID NO: 8847 - DNA, 6000 bp, Homo sapiens
ggctcaggcggatacccatgtgtagccgagccctgcgccccactgggtgggagtacagcagccacgtggggctctggggcggggcagcaaagggcatggggagtgccagggtccaggaccccacatccccactgaccccaggcctggggccaggctgcctggggccatccccccgaggctgcagacggctgaagggcccaccaggcacctggcctccacgggggtctacagcagcctcctctgggggttcgtggactccaggaccgaggagtggaggctggaggggactcccggggcccactgaccaactgtcatcccgtggcctgttgggggcgggggctgggaagcccacgatgctgccctggcagccccaggcagtctcgggcagggaagccacgcgctctgcgggcaggaaggaggtgccctcgtcagtgctgagcgcctgcacacggctgcccagtgggctccgggcattgcagtagaggaagctgccggcctgcccaccgtccaccgccgccagctggcactcgcctgagcgcaggttgggcacgaggcctccacagcgccaggtgcggccgtggtcatcgctgtagaaggcgaaggagtgagggctggtccggcagatcttgccaaaacactctcggcggtccacgcggtaggtgtaggcgggtaccagcaggcggcctgagggcagctgcacgccgtggccgggacccacagcgaatgtggcccagtctgcagggaggagggcagaggtgggaggggctgctgggtccccgaggtcggggggctggaggaaggcacagggggacggggaaggaggggctggtgcctcgggttaggaccatcgcactctgaccgcccttccacacgactcatcccagccgccctgagtcctcccaggctgaacaagcctctcacagctcttagcagccgagcccaggtggacggcacccagggaggctggtgagcgctgcccacacagagagagcagagggcaggcggggggcatgaggccctgcagtggggtccctgggttggccatgtgtctgctgcactccctgctgtagctcccacgggccggggtcaggtggccacagaggatggggtggagggaaagttgtgggtgaggcctggccaggccctgggcagggtgagaagggagtaaagaataagaggaaggggtggggcggggtggctgttggtttgggagctgagagacacctcagcgtccagccttctcctctgcagataaagagattagcgggggggatgagagagagtcgggtcagccatagagggcctgctcctgcccactgggtgactgggggtgatcaatacccatttgcctgggacgggaggtgcaggacggtcctggggagagggatttgtctgggacgggaggctcaggacggtcctggggagagggatttgtctgggacgggaggctcaggacggtcctggggagagggatttgtctgggacgggaggtgcaggacggtcctggggagagggatttgcctgggacgggaggcgcagaacagtcctggggagagggatttgtctgggacgggaggctcaggacggtcctggggagagggatttgcctgggacgggaggcgcagaacagtcctggggaaagggatggttggttcccttgtggctggagacaggggtggggcagaatggcaatttcccgctggaatctcccttccatgtggaccgtggccaatcaaagggacccagaccggcaccctgcccgcctaccctgcacggcaccaccgatggcctcctcggtgaggtcccgggcgctgccccacgagaggccggcgtcacggctggccacacagcagaggcgcgcggcgttccttcccgtggcgatctgcacggcctcaggcgtgtggcccagcaccgcgatgaagaagaggaagacggtgcccgtgccagcatcgtgcacagggcaggggttcatggaccggtgctccgccagggctgctgtccccagcacgtgcagggcaccccactgcccagaggaggaagttccgctgaccaggacgtccagggacctgggcacagccccccgcagggcacccaggatcgctgagcctggtttgctcatctctacctcgggcatctgcctgccgccgccacccccgccccatcccggggtgtgcagccccagcagatccggccactacacccacacagagcccccggccactcactcacccgcacggagcccccggccagcgtgcccctcctcagcaccaggcggtgggcgtgggagtcgtcagggctgagccgctgctccacaaaggccagcagggtgggcccggggggcacggggagcagcgagggcacgcggtaggtcaggcccgtcctctcccgctcgaagagcactgtccgtgaaggggtacgagggacccccatgctctgctggtcagtacagggccacaggtcagcaagacaggcccagggagccccacactcgctcccggtctggactggggaacgcgctcaggaggtgcagacagctcctgcccacacctgggcctcttcctgtacccaccttggggtcagccctgtttctgactccctcaccccagatctggagcagcccctcccccaccctccctcgcacccactgcaccccaaatgtctgtggaatcagccccttcccctctcaacacggctctgggagctgaccctcggccaggctggttggtgccagggtgcaggggaggctggccagagagcccccgggaccctgccagccatgtgcccaggacacagggtcatcccagaattcgcccagcaggaggtcatgtggacaatgaggacccaaaacctcgagcaaggaggagctcagtgtccccagaatagaggccacagcaccgtggaagccacagcagagacacaaagaggtgagcccacagggacctgtgggagccacggggctctctggggacaggggatcggctcccacttcctgaacgtcatcgggggagtcacggggctctctggggacaggggatccgctcccacttcctgaacgtcatcgggggagtcacggggctctctggggacaggggatccgctcccacttcctgaacgtcatcgggggagtcacggggctctctggggacaggggatcggctcccacttcctgaacgtcatcgggggagccacagccagggatcctgcaggggacaggtgcttggtgatcagacccctgcctgcaggcagctggccccacagtgccctcattccagtgcctggtgcttcccacctgcagggccctgacctgagaagcgcccacaggaatcagaagctccaaagccgagtggggcccggcggccattctgggagtttgctcccaggcaacacccaccagggcagggcccgggtgagggggcatttggggcacgcatggggtctgcttgttgcaggcgggacctgcctggggggtctctcagtctgatcgcacaaaggcagacggagccgagcgtgagcacgcacagcccggcacagggaggtggcacagctgcagacagtgggaacgctggtcctccaccatgcaggagcggtcagatccacggccagccgcccaggccgggcacacggggcacctggatgcggggctaagggaaggagggaggagggagatggccggatgccggacaccacgcctggccagggcagaacgcctgcctacgacggggacccatgcacacccacgggtcaggcgggacccactgacagagacccgggtaaaggcgcaacactcgtgtaaaacccaagcaggccttgccccgacacctgaggcccaaacagacagctccacctccagccacctctgccctgggccaccggttcctgaaaggctcttggctaggacagctggccggccccttcctgctgctcccccaccaccagtgcgcggcttctgagagcagcttccgtccccaagaagcccctggctctgctctcaaagggcaattgtgcccaagcgggaagcaggtgcagacgccatgtgtccctctgggctgagcaggcacaagcaagacattctctctgcacttggctccctccccaaggcccggaccacaggagcaggtgtcagcaccccctgcagacatgaggcccaggcccacccctggggacagagagggagaggaggagactccagaaaccagctggtcactccccttgttgcacagaggggaaactgaggcccacagagaggacaaggctgacacacacttggcttggggcttccttgccacggccaggccctgggttccacagagcctccgtgtcctccatgtggccaggccctgggttccacagagactctgtgtcctcaggaggtccctctgtcttgggggaccagccgtgctcagtgtggccaggccctgggttccacagagcctccgtgtcctcagtgtgaccagttccctgggttccacagagcctccgtgtcctcagtgtgaccagttccctgggttccacagagcctccgtgtcctcggcaggcccctctgtctcggaggccagccccgctcagtgtagccagttcagcacattccaggggtttggcttgactgggacagccatgtcctggacattaaccagtgccccccgccctccctgacagggccctccttgggggtgtggagtcacagaaggggaaaccgaggcccaggggagatgggacctccaggagaacctggccttctggtccgtggacccctggaccggttgtaggggtcactctggctcagcagggggccatcacagaccaccccccccacccccgccaacccctcacagcccatcctgtgtgggcgccccaagagccttgaggtcagaccaggccctccacgcacaccctctggggtccgcacacaccctctggggtccacgcacaccctctggggtccgcgcacaccctctggggtcagcacttcttgtcgtgggaagtgtcaggtgcagggtaggaacatcttggcgaggggcattcacatgcacccacataaagtgcagaggccctttgcacagaatcccggcagggggccctcggcggctctgaccctcagcctgcaccgtgagcgtcctgggccctggccagggcgaagactccgaccacagacccttcacctggtagagcgtccccgaccagcccatctgcagaacgaccctgtgggctggggccggccccctgcattgggcccctcacaaccagtctgtctccatcccatgccctgaatctgcccccaggaaccctcagtgtcacacccaccctgtgggccaggtaagtgtcccattgggagatgcatgtgggacctcttgctggaggggccctcggaatccctgcagcccgccccttgtttgagagctgaggagccaccctggggttggcaaggagtgggactcgtccagcacccccagacagagggggcggccagctggacagatacctcaggagcgggtcctgaccccgggcgcccgggtagaggggtgagggtgctgggggtgcaaagggcagggactcaccagccaccttgggaaggctgcagagctcatcatgggtggctgcctcgcctgacccagagcagagacaagggcccactgtgcgggcagcaggccagggagctggccacgtctcagggctacgtcaggaccctggacactcccacggtggcacggctccactgaagcccagagcagggccaggggtgcagatgggcacccaggagccacacagacgcccgggaccagcacaggctcccctctgcaggtcaatgcactcaacactggggtgctgaggacacgggggtgcgccctccaacaagggctgtgctgggacaggcccagctgtgaggccgcagttgacctcccagagggacacgggtctgctgctccagagacgcggccctgccaggagggctccgtgagtgcacactctcctctgggcttcccgggtgcggggcctcccctg

SEQ ID NO: 8848 - DNA, 6000 bp, Homo sapiens
ccacacagtgatctacaggatcaaatccagaagtcctttacatcaaatcattcccctctgacagcaccccacctccctctccagtctcatctcctgccactccaccattatgtctaaagaccttatctaacttcttgtggttcccagaaaataccgaggccttcatcactttacactccattgctctcttgttccataatgcctttctcccctcttaacctggtagtacagtctgatttatgacagtttcactcgtaatttttcaactttacgatggtgcaaaggcaacacgcattcggtagaaagtgctatgatattctctcaaaattctgggcagcacagcgagccacagctcctagtcagtaatgcaatcacaagggtgaacaggccaggtgtagtggctcatgcctgtaatcccagcactttgggaggccaaggcaggcggatcacctgaggtccgaagttcaagaccaccctggccaacatggcgaaacctgtctctactaaaaatacaaaaattagccgggtgtggtggtgcgtgcctgtaatcctagacactcgggaggctgaggcacgagaattgcttgaacccaggaggtggaggtggcagtgagccgagattgtacctctgcactccagcctgggcaacaaaacgagactccgtctcaaaaaaaaaaaaaaaaaaaaacaaacaaacagtgaacaaccaattctctactgcactgccagatgattttgctcaagtacaggcgaattaatctaagtgttctgagcacatttaaggtaggctaggctaagctatgatgttcagtaggttaagtgtattaaatgtatttttgactacaataggtctatcaggaacagaaacccatcataaatggagcagcatctctctctctctccttctctctatataatataaatatacatattcatctttctagactgagctttgccttcacctccatcccctgaaggctttctcaactctagctcccactccctggaagctgcctcctctcctcttccatagcagccagcacttgcctaactggacttattaactttttataactgttcatttacatgttcacatgccaccaaactgagttatttgaagacaagaatttcaacttagcttaattttgcagcccaaatgctatgcctgacactgagtagaccctcaataaatgcttgttgaataaacaaaatcaaactgtatgatggccaggcacggtggcccctgcctataatcccagcactttgtgaggccaagggaggaagatcacctgaggaattcaaggctgcagtaagctatgatcgcaccactgcactccagcctgggcgacaaagcaagaccctgtctctaaaaaaagataagaatgaaaataattttttatgaaattttcaggaactagtaaggttaaaggccagattctggttctttagtattaccattaagatgcaaacacaatctctctttaccacctctaattgtaatactaataaattcacaattatcatgattcctataatcaggctgttgttgagagccaagttaattaattaccataatatcaaaaaccagttcatcatgaaactatatatatatttatacacacacactttttttttttgagtcagggtctttctctgttgctcaggctgcaaaacagtggcacaatcatagctcactgcagctcaacttccagactcaactgatcctcccacttcagcctcccaagtagctaggaccataggcacgtgctaccatgcctggctaatttttttttttttttttttttttttttgtggagatgaggtctcactatgttgcccaacttctatcctcaagccatcctcccacctcagcctccggaagtgttgggattacaggcatgagccactgtgcccagacaaataactttctcgaaccaaccaaacaagatatttcacagaatatttcctcccttaggcaaaatgatacaatttcaaagtagctgctacactatcaattaaaactttgccttcccaaatgatgagcaaaccaggacaaaaaaaaaaaaaaaaaaaccaacttgcagtttcacccttagataagtggggaaaaatccctcaactataaagacctgtccaagggctgggcacggtggctcacgcctttaatcccaacactttgggaggccgaggtgggtggatcacctgaggtcaggagttcgagaccagcctggccaacatgtgaaaccctgtctcaaagaaaaatacaaaaattagccgggcatggtggcaggcgcctgtaatcccagctactcaggaggctgaggcaggagaactgcttgaacccgggaggcggaggctgcagtgagctgagatcgcgccactgcactccagcctgggcgacaaaagcaaaactccatctcaaaaaaaaaaaaaaagacaagtgtggtggctcatgcctgtaatctcagcactctgggaggccagggcggatcacctgaggttgggagttcgagaccagcctgaccaacatggagaaatgcaccgctactaaaaatacaaagttagccaggtgaggtggtgcatgcctgtaatcccagctactcgggaggctgagacaggagaatcgcttgaacgcaggaggcggaggtttcagtgagctgagatcgcgccattgcactccagcctgggcaacaagagcaaacctccatctccaaaaaaaaaaaaaaaaaaaaaaaaaaaaaaaaaaagcctgtccaaaacaaaggatgggtagaggcaaaaataaggctgaaatccttcagtataattctctgaagttaccttagttaataagcaacagagaacaatggcagttaaacctgatatcttcacatttaaaatacaaaagcaccctttcaatatccagacatagagctccttttttttttttaaccatacttccaaaatggttgattcttttacattctcattccttcaatatttgtttagcacttactctgttcatggtactgtgctagacctcagtcatgttattaaagaaaaaaaaaaaaaagtcagccatagggcctgccctcttaaagctcacgtcctaaaagagaaagtagacattcaactaatagtcaactaactgtttaatacaattgcgttaagtaacacaatagcgaatgcaagtgtcaatacataacacagaatccatcccacgctcttccataccaaaaatcaattgtcttatagtttcctgcttcagaaacctaatttccactccccgtgtgcacccctttcagcagttattctgtatatctgtcaggtttccaactgtagctctcagatatacctctagggaagataaattaaactacttcaaaagtaatttttccaccaactgcttttgtagtgtcagttcttctttacatccctcttataaagcatcacatgagggaatacaaaatatcttttgagtgttttcaatctttacccatttatggggaaaaaagactttttaaaataagcatttataaagcgcttactatctgaagacaacataaggggaacgcaacgataagaaaaaaagatctgtgagatttgtgttcaagcaaaactgatcccatggatttttcctttggataccactggattcataattttaatataaatgcagtattgagtaattgcaatagaagaatatttaggttataaatgtgtgcttttttttccccaaggaagcctcattataactaaaatgatatcaacaaactattttagtgaacattggacgcttgctaaatcgacctttgttttccaggatgataggaagtcatctgctgtcagatacaggaacttatataataaaaaagggggaaagatcagaacagaaaattacacgaaacttctagtaaattaagacacttatttagttgaaaatataaatctagggaagattctttataagaaaaaggagatttcctattataaacactgctcccattgaaatagctattttattggcacttagaaagtcagaccctagtaaggaagaaaatgttttatatgtcaatatttaccctgcagaacagacaacaaaaggggagtagagcttaaggcaaaacaggaggtatctgggttaacagccttctaaaatgaaagttgaaaagcactggcccgagttaccaagaaggctctggaccctctttccacttaaaatgttaagacaagtcatcacctcggttcagaatggtatggcacaatacggcttgaaagcagagaaacatgctatgtgaccttctaaggacccttgctttttttttttttaactcgagttaaacaaaatccattatgactttttcagttattcattcattccacaaatgcttactgggtgcctagtatgcacatagcactgtgcttaagccatgatggtccacaagaaaactctaatgagttgggcattatattctaatggcgagacacgctaaagcagcaattccataaacgaacagagcgcacatttaagggggaaaggggcacgtagggagggcttctttgaggaagcaatatttaagctaagatgtgaagatgaacgggtaacaacaaggatgaagggttaaagcccatatttcaggcttggtcgactggatggttagagtcattcattggtaaaggaactgcggatgggaaccagatttggaggaaagttaaccacccgcatttatttactggggtcctagtatgttgccaagcgcttcacaaattcctctaatcattttgcacagcagaagctattactttcagtttcatacacaaaagagaggctgagcggggttaaaatgacgtgcccaagacgaaataaagaaatctgacttttgtaatcaggtttgtatgtgctcgaaagcccgcgctctttccactccacagctccttcctgtgcacctccctttcatctggtggccctagcgccacaagctgccgcttaggaagtccctgccgggagcagaagtggagacatcagcaggatggcatcggcaagtcgctcccctcccgggcctcatctgccaaacgatcatctcctcctccgaagttgtatgcatgacaggcgagtggaaacttcactaaaatgaaggcgattgacacaacagaaggaactccatcctttcgggggcttacgaaaataataagtttaaaaaaaataggaagggaattccctcgctccatgatcactgagcgctctcctaaggaaaaggaaatctcccggggggtgccgactacgggcggcgggcttaggatgctcccacgctccccgacccccaatccccaggacccgcaggacctccggaggaacgcccgccagcccgcccggagccacgcggcacaaggtgacacggaccgcgccgcgcgggcccctcagccgcctgggcgaggccgggagcagggagaggggcatccgccggcccgcggtaccttgtacttatcaaagccagccagctgctccgggctcacgtattcgtagccagccatgacgacccgaaaactgagcgcccactcggcagcgactcccggctacaaggctgtgacacacaagcaccacaccggctgggcaaggatggcaaagactgggctgcccgagaaggtaggagagccgcgctccgcccaccgcgcacgcgtagccgcctcggccccttcggccgcctctcagtgcgcaagcgcagcccacgcttctccccgcccatcgagggggggttgctagcccgctcgagcggcccgtcccccgacactgctgttgtccaatcggcgtggatcaggcaacactaagtcccgccttccagctctcttcgtcgcttcatttgctagcgtcaaaattggtgagctgaggtaaggcaagagagggggtgaaaggtcaatttcccagcgggctttgctcccggtcccgggggaaggtgggatttctgtggtatccgcacttgcgtggtgatctggggtataccgttttagtcttgggggtagagt

SEQ ID NO: 8849 - DNA, 6000 bp, Homo sapiens
gtttgagaccagcctggccaacatagtgaaaccccatctctactaaaaatacaaaaattagccaggcatggtggcgggcgcctgtagtcccagctactcagagtctgaggcaggagaatcgcttgaacccaggaggcagaggttgcggttagccaagatcgcgccactgcactccagcctgggcaacagaatgaggctccatcttgagaaacaaacaaacaccactgagaagctagttgagaataagtcacaaaatagcagagacaccatcctcccccagcaacataggaagtaggaggtattagcttacgctgaatctcattatattgcgtagactttttctgtgacaaaaatatgactgatgacccactcatacagttccctttacattcttacctaagaggattatgattgaaaaatgtaaaatatagcaaaaaacaggcaaacaaaaccccacttgagaagatttactataataactggggagttcctttttgttttttttggtagagacagggtctccctatgttgcccaggctggtcttgaattcctgggctcaagggaccctcctttctcagcctttcagcatgctggaatttgattaaaaactgacttgtgagctgggcgcggtggctcacacctgtaatcccagcgctttgggaggctgaggcgggcagatcacgaggtcaggagatcgagaccatcctggccaacacggtgaaaccccgtctctactaaaaatacaaaaaattagccgggcatggtggcaggtgcctgtagtcccagctacttgggaggctgaggcaggagaatggcgtgaacccgggaggcggagattgcagtgagctgatattgcgccactgcactccagcctaggcgacagagcaagactccatctcaaaaaaaaaacaactgacttgtgattttttttttttaatatcttaccatcaacttgtagaagcatagtgtagtggaaaattattcaactaaaagtctgatgacctgtgttcctctttcctgggtgacttttggtaagatatattactattctattgttccactctatacaattggaacagccatcaggcccatggctcaggattgttagtcatgtgaaactgctttgagaaccagagtttatgtgtataaggcattcatttttattttaaaatgagaactaaatcaatacctttttacaaacttctttggaagaccctgcccatttttatggcttcagtaacttatattggagttattaactacattagtccttaattaacctccaatattttttggctgtctccatttatctgatacactcttattcagactaaataaaacaggcactccaggaacttaaaacactttattttggttatattataaaaataaaaatattgtttctagcacgaattgatattttctatgattattattctggaaggcaaaatgcctgatcttgagtgtacaagatgtagaagaaataaacttcaatggatgaagaggcagacatgggaaacaaagcaataataaactacactcaggaatgtggcgtgtagagcacagatgggaataacaaggccaatctaaagcagtccggggcagctgggctgccttagggaaaaatgcctcctggaataaaatttgggaacgaggaaacagaaaggtgacttagttccaaaggcaaatttgtttccatgacatttttctcttcccacgtgaccatgcctgccgggtttaggattcacagaattctgcgaaaatacagtcatgcatcacttaatgacaggatatgctctgatagtaaatacaaaagccagtaagacagttagttattatcaagtattcagtagtgtacataattatatgtgctatacttttagatgactggcagcgcggtaggtttgtttacactagcattaccacgaacgtgagtaatgccttgtgttacaacattttgacagctaggatgtcactagatgacagaaatttttcagctccactataatcttaagggaccacatgtggtccctcattgacggaaacatggttatatggagcatgactaatatcttaaatttgtatgaatttaattgaacagactggggccatatcattgtaggtaagacaagatttcccagatgagatgacttaatctcagagaagttatatgatatacagtttcactgaatttcagagatgaataggatcgtagtacctaataggttctaatggatcgaattagatcttaggatcaaatgatcttttttttttttatttttttgagacagagcctcgctgtgtcacccagactggagtgcagtggcgcgatctcggctcactgcaagctccgcctcccgggttcacaccattctcctgcctcagccttccgagtagctgggactacaggtacccgccaccacgcccggctaattttgtttttatatttttagtagagacggggtttcaccgtgttagccaggatggtctcgatctcctgacctcgtgatccgcccgactcggccttccaaagtgctgggattataggcgtgagccacggcgcccggcccaaataccctctttttgaaaaagagtactggggctaagtgaagtaagttgtctgagattacacagccagtaacatgtcaaagtataaaccaatttctgggttatgcttcagcttataaattatcagatgaatttataattgattcaaacttgttacaaccttatgcagagaagcagcaaattgtaactgctttcacaaaattaaaagttactgttttaaaaagtgcttttaaagaaaatatcagaggtagaaaacaattttaagaatcaatcatgtcattttgagtttgcttatatctgaactgataaacaataagtgcagtttataaactattattagcttgcactgaagtcacattttatggctttccacaattaactaagttttacaagtatgaagggtttttttggttttgtttttgagacggagtcttgctctgtcgcccaggctggagcgcagtgacacaatctcggttcaccgtaaccccacctcccaggctcaagcgattctcctgcctcaataacctgagtagctgggactacaggcgcgtgccaccacacccggttagtttttgtatttttagttgagacgaggtttcaccatattgtccaggctggtctcaaactcctgatcgcaagtaatccctccacctcaggctcccaaagtgtagggattacaagcgtgagccaccgcgcctggccgagactctcatttctaatgttcttctcaaaactggtacttcacagcatatcaaagagatctttgctcattcattcaataaaatacgttgatcatgtattatttgcaagccccctgggttatggaacatggggaaaattaagatgtataagatgcaaatactgccctcgagggcaagtgtgataaaggacactgaagtttattggttggcgggcgcccattcttcaaaaaatgcaaaaaatttagccgggtgtggtggtgtgcgcctgtagttctagctacttgggagacggaagcaagatcacctgagccaggggaggtcgaggctgcagtgagccgtgatcacgtcactgcattccagcctgggtgagtcagtccctgtctcagggggcggggagaagcttattatctaccatataccaggtataagattatctattactttctaagaatcatgctttaggaggggagattagacatgtagtaataatactgtgtttggcatatctcgggtccccaataaatagttgttaaacgaatgaacataaaagtatctcaaaataatcgcccttatttcagagacccagagagactgaaaggctccctgaagtagtggtttcccataacacagaactcatttcatgttgggtcgatcatttccgagcttcgtaactaagtgactctgggcaggctgcctaatctgaaaaaggggataatgcctttcacttcagtgttgttatggggttgataatgtatgtgaagttctccccacagaaggcgctcaataaaaagcagcaactattataaaattttattagtagatactcactagccattgatctagtgttttttgtttgtttgtttgttttacaattaactgggctccagttatgtaaaacacctcttgcaaacgcatttaaggactcgtcgagactgagagatcactgcttttatctggtcgggagacaccagcaatcttaatttggaacggtttgatagagcggagtgcgatgaggcggtccaaggttcctaagcaacatagacctgaggggcttgtctccaatgtcctttcacctgtctttcaagtccctctgctgaccgcacaaagactcccgtggccccggcagcagctcggccttctctacatctaaccacgtttactaaatttctacggcacgcagcgcaccgcaccaggagctgggagcggctcgcggtacagacctccttcctcttttacttcgctgcagcgggagaactaagtcctcttacctgaggcactgctgaactggttcgcaagcagtcactctacccccaagactaaaacggtataccccagatcaccacgcaagtgcggataccacagaaatcccaccttcccccgggaccgggagcaaagcccgctgggaaattgacctttcaccccctctcttgccttacctcagctcaccaattttgacgctagcaaatgaagcgacgaagagagctggaaggcgggacttagtgttgcctgatccacgccgattggacaacagcagtgtcgggggacgggccgctcgagcgggctagcaaccccccctcgatgggcggggagaagcgtgggctgcgcttgcgcactgagaggcggccgaaggggccgaggcggctacgcgtgcgcggtgggcggagcgcggctctcctaccttctcgggcagcccagtctttgccatccttgcccagccggtgtggtgcttgtgtgtcacagccttgtagccgggagtcgctgccgagtgggcgctcagttttcgggtcgtcatggctggctacgaatacgtgagcccggagcagctggctggctttgataagtacaaggtaccgcgggccggcggatgcccctctccctgctcccggcctcgcccaggcggctgaggggcccgcgcggcgcggtccgtgtcaccttgtgccgcgtggctccgggcgggctggcgggcgttcctccggaggtcctgcgggtcctggggattgggggtcggggagcgtgggagcatcctaagcccgccgcccgtagtcggcaccccccgggagatttccttttccttaggagagcgctcagtgatcatggagcgagggaattcccttcctattttttttaaacttattattttcgtaagcccccgaaaggatggagttccttctgttgtgtcaatcgccttcattttagtgaagtttccactcgcctgtcatgcatacaacttcggaggaggagatgatcgtttggcagatgaggcccgggaggggagcgacttgccgatgccatcctgctgatgtctccacttctgctcccggcagggacttcctaagcggcagcttgtggcgctagggccaccagatgaaagggaggtgcacaggaaggagctgtggagtggaaagagcgcgggctttcgagcacatacaaacctgattacaaaagtcagatttctttatttcgtcttgggcacgtcattttaaccccgctcagcctctcttttgtgtatgaaactgaaagtaatagcttctgctgtgcaaaatgattagaggaatttgtgaagcgcttggcaacatactaggaccccagtaaataaatgcgggtggttaactttcctccaaatctggttcccatccgcagttcctttaccaatgaatgactctaaccatccagtcgaccaagcctgaaatatgggctttaacccttcatccttgttgttacccgttcatc

SEQ ID NO: 8850 - DNA, 6000 bp, Homo sapiens
ctcttcttcagaatgcttacgacacagagattagaagtcatgaaattataatataattcccacatggtggggaactggggcccacacactagggaactgaggcctctagctaacaggcacatgagtgagcttggaaggggatccttcagccccagtcaggctttcagataacatcttgattgcaacctcatgagagaccctgaggcagaaccacccagctaagccactccaaaattccttatacacagaaactatgagataataaatatttattgttttaagttctgaggtaattcattatgcaattacagataactaaagtaccctctcaaagtttctataaatcttctgtaggaatggagagggtaatagtacctctctttcaaagagttgttctaaggattaaatgaaaaatacattgaaagccctcagccccaaatttagcacttagtaaatgcatattggctattattgtagcttgcatgccttctcttcctcaagcaaggcgctcctgcatgttatttacagccacattctccatgggcctcagtaatttcttaagtcataaaatttgaaagacacgatccagctccagtctttttatattgtctttctctgaccatcaactgagtagtcttcattttctctctctttgtgatcccctttgagaagagaggcagagatttctaagatagagaaacttaaggcatatgctatggctagggaagcaaaacccaaaataactggcctgaaaaagactaacctgctgacctcatgagcattccacaaaggttgacaatagttaactgagcaagctggagtcaactccagcttttacagagcatactgtttagaaattgtcccctgaaacatacaaagctttcattcaggcgcatttctgtgctttaaacctggaacagatcctggacttcctcaggcaaacctcatagatgctatcttttctctctgattattcctgtctccttcacatttgggttttctcttattactgatggatgggtgagcagtcaaatttcctttccaccgaaagaaggtatagaagaaatttaccactaaagcagtgaaaggagcaaaagaagagatatacttcttttccataataaaattcaataataataaaactatttgacaaataaccaaatatttcaaatttcagcatataatatagtgtaaaagaaaaaataaaggaatcataaatgctgcatgtgaattttattaccactaagccatgaagagttctacaattccatacaagtatttttacgtatttctcactgattcttggggaaactgaatgcttacatatgcaatatcctcctatagtaggatgattgaaaaaaaatttaaaacatacaatcatttattatatacacagaagagggtgaacttttgattgtgcttggtgaaatgaataatatgacttcaaggagtttttattcttaaatatatgacaatagtattaagcctctctctctctctctctggctccccattcactagcccccgtcctgttctgggtgtgtctagttttgctaaagtaagcatttcacatggaaatgcttgacctcttaaatcaacctctcaggggatgaacttgggtttgctcatggcttcctccttccttttggctgtttaattctttagtttccacgtaatttaggtctttgctttgtttttctatcaaattcctttccttccttccttcttcctttcctttcccttccccttccctttacatttcctttctccctacttccttcctttttccttcactctatttgtttacttgaaagcttgattgacaacatggagggcatttcttgggtgatgactttgacttttttgtaaggaatgctgacctttattatggcacagcccaggaaaggtattgctgatttagtgaaaatgctgcattcctgagcttttatctttattcctatgataaggcagaagtgttaacaagatgacttcccttttttccttaaacatacatacatacaagttaagaaatacagacaagaaattactagagtggtaaataaataaagccaccatgaaacaacatctccacctggttgtccaagaggtatccttagccaccctctcctttacctctctctgtttaaccggttaccgaagtccagtcattcacatttctgagtagctctggagcctccaaattctgacctgtactgtaagtgtcctgggccatttccctcacttccccctccagtgttgctccattgcaactcaccttcccactgtcatggccaacagttcaggcatgctcaaaacatcattcactgcatcatctccagcttagaatcaaactcttttgcctgtttcccaccctcctctggggccctggatccttttataatccctaacacaggatgtgatctcatgtctctgtgttgaaacacagggcatttgcattttctggaatatcttatctccagaaactgatgttaactattcaagcttggcccacaaaagaaacctcttataagaagtctctccgccgggtgcagtggcttacacctttcattccagcactttgggaggccaaagtgggcagatcatgaggtcaggagataaagaccatcctggccaacatggtaaaaccccatctatactaaaatacaaaaaattatccgggcgtggtggtgtgtgcctgtagtcccagctactcgggaggctgaggcaagggaatcacttgaacccgggagggggagactttcccagaagtgttccttctaacctccagagcagtctgctcaagcacctctaagttatttttttgaatcataagagtagttatatggaaacaagttgagtctctcaggaagtcctcctcaagagaacattcttgaaatgtgttcaaatttcatttggagaagataccaggtgctatttagcagaaatggcaaaacagctcttcctggcctgtataccctacccagcaaaacaaaattctcagagttaactgcagcaagcctcagatccctaggccttttcactggccatctcaagtggcttatcaaagtacagtattccttccaacttgctttaacggaagttctgataattacagttttactcaaacttccagcgatgctgtgatgcctcagtgatgttttggagagaaacatacagattatttctatttatatatgtgtgtatccacacacacacatacacacatatatatgtaaaacaagtcatatttgtttgcatgttcccactagcttatacagtccttgaggtcagggcctttatatttatatttacaaaatttaatctttgtatttgcagcaactaacgcggtgcctggaacataatgtaagcctgtaagccctatatttatcaattgtatgactagcacattcttctcccacaaggctttgcatgtatggtttacacaaagagttgctttatgaaaatagttatattttaacagtccacaagagtcaagcttaagtggactgtcatttaatggtataaaatagtagcaaccactggtttcttcaaatttcattagcagtaggtcaacccattcagttatttaacctttggcacatttgccctggccttgaattgcacagcaagcatggttttcatagctctacaatctaattctgaactgtcatcctaaaatctagataagactccttgagtatgcaagcactgactatacattcctcagttgactaaatcttccagagagaatgctttaactggctgactaatttatagtgtgtaatgctgaaatgaaagcaagtgtttaaaaggaaagtaaggccaggggagactgaaactagtagttctcacttgcttgcatcctacagtgagtattccattatgtgagtgttttatacatttaggcaagctaaaaagacatgaaagtccttaaataaaagaatccaccaaaacatcactgattccagacccttcttaaatattatcgtgtataccagctttattatttagctctgcaatactgctaaattggtcaattacttccctgcctccccaccctccaactgaattctcaccacccttgagggaaaacagtctgggttccctgtggaacatcatttctcaaaactgtattttggggcttgctttctcatttttcctttccatttcagatatccttactgctgtctttgggctctttaaacactgccttttttcctttttcgatcacacccaaaaacttttctcaaaaattacatgtaaatttaaaaatttacaaattaaatttaaaattgaaattttaaaaatcccgactctccctaatttcaggaagcatgcatttattatacataacaagacgtgaaagccgcaagagtttcagcctaaacactgaagaccccgcgaagtgaatccagctgctgctctacaagcagcaacaacaactgggaagccttctcagctacacttcggggcactggtccaaccccacgcaaaatccctcgtttcccttagcgtggtaagacggagcctgacctgagctccaactgtcctatctttttcaaatgtttcaaacttactgcctttgttcagcagaaccacgggcacggtgatgatggtgacaagcgcagcagcacccagcagtcccagaagaaccttccacggtgtctgcaagccgagcagatcaagtccaattagagggaagcgtgtggccccagtttccgtaggagggtcggggctgctccagaggcagcaggatttgcaggtgggagtgcgttagaagagggagaccgcgggctgggggtgggggtggcgtctggagtgcgccagttggagttctctaaggcgggtgcccttgaacttgtgccttcagagcacattagcgttggtttctctacccctgcccgggttcgggcgtgcgttctgtgagtggctctccgggacattcaaagctcgacgccagggtcctagcagaagccagggtccgaaagctaagcgagagctctgggacgtcccttcacctgtcagagggtggccttggggcttccgcctaaggggagtccctggtccggtttcgccagcttttgggccatttggggagtttggcgaagaggtccccacagctcgccccggggacgtacgtggcgcggcactcaccttcatcgtcggcgtctcctcggaagtgagcgttcagagaaggagcgcaggcagaagtcaccgcgggcggcggagacgcgcgtcctgcaccgctgctccgggcggtggagtcactcgccgctggcaagtttcggccccgagttaaacattagtgagcgccgagcccgctgggtataaaggcgccgcgggcaggctgcagggcaggcggcgcgggagcaggcgcgcgtggcgcggggcactggcatcccggccggggggagcccgcgagggccccctgagggcggtgtagggcgctgggcggcagccggggcgcagagtgcggggcccggaggagccgtgggggaggggaaagggcgcgcggcctcggatgcgcagaccctgggccggcgactcggggaccctgctccctcttagctaaaaatgacgtcggcgttcagctcctccaacctcacgtggacaggcgagggaaccgagacccagagagggcaggggactttggcaaactcacacagcccaccgcaggcaactggaactgaaacccaggactccgtctcttgccagtgaaagttatgttaggaagcagtgaggggtctaaagcagtatgaaaggcaaagagaaaaggtgattgttccctcttgaatggcccttggaagctgagtatctggattcaccctccctagggaatttcccgattgtcttgcaggcttacacactcatcaagatgacaaaaataatgacagtaacacttatgtggaacttgactttttcccaggtgctgctctaagcatttactgtgtttgttttacaggaaggaagactgtacacagagaataaataacttggcca

SEQ ID NO: 8851 - DNA, 6000 bp, Homo sapiens
gtcagcaggaaaaaaaggtcttgggaattaaaaataagaaaactgaggccgggcgcggtggctcatgcctgtaatcccagcactctgggaggccgaggagggcggatcacctgaggtcaggagttcgagaccagcctcaacatggagaaaccccatctctactaaaaatacaaaaattagccgggcatggtgatgcatgcctataatcccagctattcgggaggctgaggcaggagaattgcttgaacctgggaggcggaggttgcggtgagccgagatcgcgccattgcactccagcctgggcaacaggagcgaaactccatctcaaaaaaaaaaaaaaagaaagaaagaaaaaaaagaaaactgaaagttcagccttgggcaacataggaagacctcatctctacaaaaaattagccagatgtggtggcacaagcctgtggtcccagctacttgggaggctgaggtgggaggttcgcttgagcccaggaggttgaggctgcagtgagctgaggttgcccactgcactctagcctgggcaacagagcgataccctgtgtcaaaaacaaaacaaaacaaaacaaaaagttaaaatggctgaagataatgcaagaagatattccacaaaaatagaaaaacaaaaaacaaacaatgggttggtttagagttcagttttgcaagatgaaaagaaggttctttttttgtgttttttctttaagactctgtcgtaaaggctagagtgcagtgtcatgatcctagctcactgcagcctaaaactcctgggctcaagcaatcttccctgcttatcctcccaaagtactgggattacaggcatgagccaccatgctcagctctatgaatttctattttgaatcagtgctcagtacaacaaattaagaaagtggtacaataaagcaaatcattctaaaatttctaaccaacaagttaaagagagaatcctaaggcttccacagatgggggagatgtaacagacaaaaggatcagaaacatgaataggaattatacttttttaatagcaaccctagaaggtgtaagaaaatgtagtataccatcattaaaaagtcaggaaacaacaggtgctagagaggacgtggagaaataggaacacttttacgctgttggtgggactataaactagtccaaccattgtggaagtcagtgtggcgattcctcagggatctagaactagaaataccacttgacccagccatcccattactgggtatatacccaaaggactataaatcatgctgctataaagacacatgcacacatgtttatcgcggcactattcacaatagcaaagacttggaaccaacccaaatgtccaacaatgatagactggattaagaaaatgtggcacatatataccatggaatactatgcagccataaaaaatgatgagttcgtgtcctttgtagggacatggatgaaattggaaatcatcattctcagtaaactatcacaaggacaaaagaacaaacactgcatgttctcactcatagatgggaattgaacagtgagaacacatggacacaggaaggggaacatcacactctggggactgttgtggggtggggggaggggggagggatagcattaggagatatacctaatgctaaatgacgagttaatgggtgcagcacaccagcatggcatatgtatacatatgtaactaacctgcacattgtgcacatgtaccctaaatcttaaagtataataataataaaaaaataaataaataaaaaagaaaatgtagtataccttcaaaaaaaaagggaaaattattttcaaacttgaatatctagcccaacaacacatcaagtgttaaatagaagtaacatattttcaaatatgcaaagattctaacaacatatatcccccatctccctttcttaggaagttattagaggagatgctttagcaaaacaaggaagtaaaccaagaggaagacatgggatccaggaaatgggcaaaaccaccccagaacaacaatgaaggaaaattccagaatgacaactgtacagcaagtctagcgagcagccagtccagattgaaataagaggaaggaaggctctgggacaaaaactccaaagaaaaagtggaacttatatattgagtatatggaaaacattattgctagactttttgatagtcttagagcatttgaggggaaaaaccaactgtaaatactgtttacagaaaatcagacagatgagagaaaaaaggcaataattaaccctaagaaaaatgaagggccatgtaaactagaagtcatgattatagtgcatttcttggctcatcagtaaacaatatttgcatacataataattttaatacagctaggtgcagattattggttttaccaaaagttattacgcagctatatatggtgggaagcagaagtgatagagtcaagttcttatctaccgtgtcaggaagtcaacacataatgctaaaaattcacaaaccaaaaaataatggtataaacatttacttagaaacatgaaggtaggccgggcacggtgactcacacttgtaatcctagcactttaggaggctaaggcaggcggatcgcttgagttcaggggttcgaggccagccgaagcaacacggtgaaaccctgtctctactaaaaatacaaaaattagctggacatattggtggccacctgtagtcccagctagttggggtctgaggccggaggattgcttgggcccagggaaatcggggcttcagtgagccaagagtgtgccactgcacaccagcctaagtaacaaagtgaaaccctatcagaaagaaagaaagaaagaaaaagacagagagagaaagaaagaaagaaagaaagaaagaaagaaagaaagaaagaaagaaagggattatgaaggtaaatatcaggatgaatttgtgaaagagttgagcatattgcctccaaagagtaggacagggaactgcttttttcattacaagccttttagtattataagcatacatattttaaacaatttataaacattattttagttcaatagtcattaatgttacaaagctagcttatcggtcgggcatggtggctcacgcctgtaatcccagcactttaggaggctaaggcaggtggatcacttgaacccaggagtttgagaccagcgtgcccaatacggccaaaccccgtctctacaaaatatacagaaattagcccagcttggtggtgcatgtctatagtcccagctatttggcaggccgaggcaggaggatcacctgagctcgggaggcgggcagtgagcagagatagcaacgtcactccagcttgggtgacaagagtgagacaccatctcaaattaaaaaaaaaaaaaaaaaaaggccgggcatggtggctcacgcctgtaatcccagcactttgggaggtcgaggcaggaggatcatgatgtcaggagttcgagaccagcctgaccaacatagtgaaaccccgtctctactaaaaatacaaaacattaaaagggcatggtggcaggcacctttaatcccagctatttgggaggctgaggcaggagaatcgcttgaaccggggaggcagaggttgcagtgagccgagatcatgccattgcactccagcctgggcaagagtgcaagactctgtctcaaaaaaaaaaaaatttaagttagcgtataattttaggggatcagcaatatcctgaagcttatccatagcccgttaagtaatgtttcaaagggctatctgtgccttaatgataggagctagtttcttgttcatttttttatccccatccccaaacacatagcagaaaataaattatttccttgtatgtagaacggactcagctaagtttattatattctccccggaggagggaaaacacaaaacaaggcacaaaggcagaaggtgcagatgtagcacaacgatgagttaagattccgcacgcaggtaacaaggagggtatggtatatctctgccagaggtactggaaggtttcaaaggcagaaaaaaatgtgttccggacacctggacgcagaattggaggcatgacaggaacacagggaggcccatctaagttgcctattcacccaggtgacctctctttcatttctttaattgtccttttaacaatatggggaatttcacccaaggaaagggtcctcttctcgccccagcaggcaaggggtgttcctccagcgcaagttccggccccagctgcccccacgtcccacaggtctcctgccttttggcacgcacactcctgaccactcgctgcttccgcatccctactctgatcctctccccatgcatctctgcctccttagacaactgagaattttattgtctgtttcctttgccagactgtaagttccacgagggcagggcctcgtccatttcatttaccactacatccccagtatagagcaagagcccatgaaaatgtttgttggagaaatgaatgcatgatggtgtcgctggacagctatacctggaaagaaaaagaggcacccccatcaaacaagctgggagctaagaagcccgctgggagacgacaagggcgagcttcttgcgaggtttctgaaatgacaagaccggaagaatggagttggatctctgggacaagcgggagagagaagctgaacagtcaggcaagcctcggggaatgacagctccgcgggggacgcactggtaggcggtagacgtaagcggggtcggtgggaaagtagacggtggggcggcggcatcacacatacgcaagcgcagcctccgtttcctccggcgcgcctgcgctcgcgttcacgagtggttgaagcggaaatggcgccgcggggccgcgcgtccaggcggcgagcggaagtgggtgtgagagcggaagtggccggctagagccgggggctgggcggggaccgggcttgtcggtgaagcggcagtggcggcggcggcggcggctcggcaggcgggttcaggcttcgggggccaggtcggttgggtgggtgggtgtctccacagtctgcgtgcgtgggccagcgcgttcgtcttacccttccctccaccccggcccctctccccttctcccctaacctcctaccccacccagccccactcagggggcagcagggccgctccctccgtccttgcctcccttacccaccctcaccggcccttgtttctccttcccctgggggcagccgccgccatgatcctgctggaggtgaacaaccgcatcatcgaggagacgctcgcgctcaagttcgagaacgcggccgccgggtgagcgcgcgcccggggccgggggtggcgggggaagcagagttgaccccagctaatccccaatgttgtccagtcccccagacctggaggagagaaatggggtgcctggcagggtgtaggggctgccccagcggggtagacgtgggaggcgattgggcgcggccgggcgaggggcagagatgcgtggggagaggctcagaggagggatgcggaagcagcgagtggtgagggctgtgcgtgccaaagggcaggagacctgtgggacgtgggggaccctggagccggaactcgctccggagtagccccctgccctctggggcgagaaggggaccccttccctgcgtgaaattccccggcattgttctgaacccagagagagcctgtttggaattgggttggaaggagttttcaggaattcccaggactggaggagggaaggagatgcaggcccacatcgccaccagcattctcgttccccacccccatctcctttaaaaggagcagaagagaagactaaaagccgacccagtcttagagccggaaaaacgcgatctctggtttcccttccccgaacccttctgtgagagacactgggccattttgttacatatttttaaagcaaagccaattgtccctcgctccacaccccttccttatctctcctttgaggttctaatgctctctcctcacccactagcctttatctggttatc

SEQ ID NO: 8852 - DNA, 6000 bp, Homo sapiens
cacatttactgaatacccacatctaaggaatgcaaggatgataagcccaaacataaagaataaggcagatactgtgtcgggtgcagtgacttaagcctgtaatcccagcactttgggagcccaaggcgggcagatcacgacgtcaggagatcgagaccatcccggctaatatggtgaaaccctgtctctactaaaaatacaaaatattagctgggcacagtggcacgtgcctgcagtcccagttactcgagagactgaggcaggagaattgctagaacccaggaggcggaggttgcagtgagccgagattgcaccactgcattccagcctgggcaaagaataaggtagatactatctgtgatggttcattttatgtgtcaacttggactgtgtttttggatgagattaacattttaattggtgaactagtggccaggcatggtggctcactcctgtaatcccatcactttgggaggcaaaggcgggtggattgcttgagcccaggagtttgagaccagcctgggtaatatagcctgtctctacagaaaaaaaaatacaaaagttagctgggtgtggtggtgcatgcctgcagtcctagctactcaggaggctgaggtgggaggatggcttgagtctggtggatggaggttgtagtgagctgagattgcaccaatgcactccagcctgggtgacagagcaagaccctatctcaaaaaaaaaaaaaaaaaaatttgccctataacatgggtgggcttcattcaatcagttgagggctcaaaaacaacaaaaagcaagaggcaattctctagcagactgcctccagactgaaactgcaccatccactctcctgggtttccaggctgctggccagcagactgcaactgcaatattggctgtcctaggtctccagtctgccaaaccacacagcagattctggacttgccagtctccataactgtgtgagtagagtccttacaataaatctttcagccaggcgcggtggctcacgcctgtaatcccagcactttgggaggccaaggtggggggatcacaaggtcaggagatcgagactatcctggctaacacggtgaaaccccgtctctactaaaaatacaaaaaaaaaaaaaaaaaaaaaattaggcgtggtggcaggcgcctgtagtcccagctacttgggaggctgaggcaggagaatggcatgaacccgggaggcggagcttgcagtgtgctgaaatggcgccactgcactccagcctgggtgacagagcaagactccatctcaaaaaaaattaataaataaataataaatcttcctaggctgggcactatggctcacgcctgtaatcccagcactttggggaggagaaggtggggatattgcttgagcccagaagttcaaaatgagctggaacaacattgcgagatcccatctctactaaaagtccaaaacattggctgggcatggtggcataagcctgtagtcccagctactcaggaggtgaggtgggaggatcgcttaagcccaggagattgagactgcaatgagttatgatcacactgctgtactccagcctgggcaacagaatgagaccctatctctacacacacacacacacccttattgtttctgtttctctggagaatctgaatatataatcagaggtttgaaaatctatgggatgtttaaagggaggtcacatccacttacacagattaagaaaaattccactttgggaggccgaggtgggcatatcacttgagcccagaagctgaagaccagcctgggaaacataatgagaccccatctctaaaaaatctttttaaattaaaaaaaaattcatgaacacattcattctttcatttatatatgtcataaacattcactgagcatctacttggagccagggactattgttaatactggaaatacagcagtaaatatggacacagttccattgtggagcttactttttaaaggtggaaactgtgtaataaatacacattataacatcaggtagtgctaggagctacaaagtataacaaagtaggatggggtaaagatatagtgatacaaggaaggcaagagtagtcagaattctattttggatcaggatgccctctctgaagggaaggtgacatttgagaaattaactgaagggaataagttaagcaaacctgtgagaagagttcagggcaaaagaaacacctgatgaaaaggcagtgaggcacatgctggagattaccaggagaatctgagtgaggcagtagaaaaatgaaatatgagaagagtcagatcaagggcccatggtaagcagtttagattttattttgaatgtgatgcgatgtctccaaagagcatgacctcatgtttgccttttaaaaagccttttactaaatgtcttactgcttttactattccctcctagagtaaagaatggactctaggagggaacagtaaaagcagtaagacatttaagaagatggggttggctgggcacggtggctcgtgcctatattcccagcattttgggaggcagaagtgggaggatcatttgagcccaggagttcgagaccagcctggccaacacagagagactccgtctctacaaaaattttttaaaaaattagccagggatggtggcacatgcctgtggtcccagctactcaggaggctgaggtaagaggattgcttgcgctcaggaggtcaaggctgcagtgagccatgactgtgccactgcactccagcctgggtgacaaagtgagactccgtatccaaaaaaaaaaaaagaaagatggggtttaataaagtggaaaggatcttgacaagtgagatattctggatacgttgatacaatcaaatacgacgaggctagagagtcacctgcttggggattaaagttctgagagttgatgtaatctcaaattagagagtctataaagagacaggaagagatgagaaggtgtatatttcgaggtacaaagcagaagcagactcagtaaaggaaaacaagagagatgggacccaaaatattacttgagagaagccaaaagtacaaagagcctcataaagcagcaatgtcaaatgctacagaattaaggagatggtgagaataaaccaaagaattttacaagacagcaatttcaagaagcttagacatcttgattcagagctataaaagggttcattttttattaccaagttttaattagttttcttaattcccaaatgggatcccaaaaagttgactctgaattaactgaaaaggaggtcatccaggtgggcctggtctaatcacataagccttttaaatctgggtctagagaggaaagaccaaagtaaaagaaatttggaagtcagagaggcaagctcctggtagcctgcacgaaagcaaacatcaatgttatgaatggcctctagaggccttgaggcaaggaactgtaggcaggctgtagaagctgggagcagtggctggcaagaggcagcaagaaaagaagtacttcagtcctgtaactgcaagggactgaattctgccaacaaactgcatgagcctggaagaggaccctgatctccaaatgagaaccacagcatggctaatactttgcagccttatgtgacctggagcggagaacacagatcatccgtgcccagacttctatcctacagaacccgtaaggtcattcatgggtgttgttttaagctgctaaatttgtggtatttgttacgcagcaatagaaaactaacacaggttcgttccactttcctatggaaggggctgcttctgttacctagcagcaaataggaagagaagcgaacttgaaaaaacaaagcttgacttttatgatctctaactcactattcctagggattctgttcaattactgcttgagtcacagtacttggtttgctatctacattttgccaaaatatcaacttcctgaaaatcatgagcagtggaaacaggctttttaattttcaattttagaaagtaactttggcaattacgcaaaactagaagtaactgggtatttaggctccttgaatgtcaaagtagtcccagcgcctggagacacagatccctgccctaatctcagaaatgagccacaaggtcatgactcctgtctttccttgaagaccaggagtttcagctccacaaatgaaaatctttcgcttttgtttggattaagaataactcagaagtgttctcagctgcgaaaagaaaggcactccctcccagataattacaaccttgacccctaaaatgtggactctcgctagaagtccaggcacctccttattaaggatgcaacaagccgccgctccgctcgtcctgacgggaactgtagttctcgcccgtcgaccttcagcactgaaaacctatcgcgcgcccaaccggcgacccagacgccagcagccaggattggtcctggacgggggcagcgcggccctgattggactacatgcccacgaagccgcgcctcccgctactctccacaccccaccccgctgctgcaataacctcaagtcatcccagtccggcgaactccctggtggctgcctagctgcccgcccgggcctctcccgacgagggtggccctgaggctcgcctttgtcctggaggctaggcagcgaccaaggctcccccgtttttcgctgacggttctagttcagcctcctcacgcgcctccgggagccccagtgctcacctgggcggcggcggtcacacccgataactgacaggcccgcagcatctcggtcaagcggacggcgctgctggtggactcgagctgccgcggcggcgcgagttaagtggaggcgtgcttgcgtgtgtgcgtgcccgcgtccgcgcccggcgcaccggaagcacagcggacgccactgcgcacgcgcggccccttctaccgtccccgactccgcggctcttagagggtgggctgtgtcccggctgcggaaacgccaactccaggcgattggcgcgaaggaggcgaaaagggcggattccctttccgggtcgcgcccgggctgcaggtccttatccggaaggggttactaggtgaacactgccggagggagagcgctctgaaatccattcttcagccgcacgtggaaaatggacagctgtgactcttaaagagaattaaagcaacaaagcatctcagcctgctctatgagctggatatttcgtaggaaggagccgatttggcgaaagttacgtaaacaatggaattgtctcagtttgcgcctttgtttcgtttgacagccctccagggagtcatagtgattgctggagacggtgaactaacactgtggggacccttgtgctaaacgtgtcaagtggcacaacaaggataggaacacgggtcctttggactccacagcttctgctccttccagattaagccacactgctttctccaagttgttactgtagtaacatcattttggctgcagtttgtggatgggttggaagatgggaagtcaatgcagaagcaccgttgaaagtattccactgggcagggcgcggtggctcacgcttgtaatcccagtacttcgggaggccgaagcgggaggatcgcttgagcccagaggttcgataccaggctgggcaacacagtgagacctcgtctctatatagaaaaataaacaaacaaaaaatttaaaaagaaaagtagggccaggagctatgactcacgcctgtaatcccagcactttgggaggccaaggcgggtggatcgcctgaggtcaggaattcgagaccagcctggccaaaatagtgaaaccccgtctttactaaaaatacaaaaaattagctgggcatggtggcgggtgcctgtaatcccagctactcgggaggctgaggcaggagaattgcttgagcccgggaggcggaggttgcagtgagccgagatcacgccattgcactccagcctgggcaacaagagcgaaactctgtctcaaaaaacaaaagtattccattgattctgtaatcaaaataaaacacg

SEQ ID NO: 8853 - DNA, 6000 bp, Homo sapiens
tctctggctctgccatcagaggcctcagccagcactgtcccacagtgccacgctcagaaagggccactgtggcgctggtaaagcatttacggagtcaccctggagcccaccaaccctggatgcacgggcacgggctgtgcacagctgccacgttaggattcactgtctcctccgcgagtcccaccggctgtggggccattcccagggacacccctgcagggacctggtcacaggcccgggggtgggctcacctccagttcatcgcagccgcctcattgatgtattcagcacagtagactaagatgactgaaaaaaggtacaagtcatattagaatttagatggcccgttattactcgttataaagttatacattctttacagcagaatactgaatagaaatgtcactttaattttaaacataacatcaggtaaacatcctaacattgtcaagtcgtaggactcacccatttagcagaaagaaaatcaaggccaacagtgcttcagttctccaatgctctatggtctcactcagagcccgtgctcaggtcagcacctgcagagctactgcaggagccgcccgaggccccaggcttcacccaggcatggctggacctcacacatttccccagggacagcagccacagttcagccccacagaacacggcagcaggagctgagagccacgagacccagagctgacaaccaagggcttttcacgctcacacttcccgggctgaccttgggacactgccactgagatgaccataggaggggagcgaacagctttggggtgctggaggcaaaggcacgggagggagggcagcagctggtgggggcagggcaaggcctccatgctcccaggagcacacagactttagggactggcccagggtcttcagctaattcgtgggtaatgctggtactcaaacccatgagacagtgacccatggtaccataaaatcaaataaaatatgattcggcaaattaagaaaaatgtgatgcttcaacttccaaggtaaatcaaactaaaaatcctttcattcttcttgatacacatcagaaagcagattaaactaggggctacggtgagcagtccctccacttcctcccttcaggaatggactcaataaagcagaggaaaagaatgcacagggaaagaaccagaggggaggggagggaggaggaggaggaggagggggaggatgggggggaaggagaggaaggaggggaaggaggagggccaggagaagcaggacagccaggcaggtgagaagggtaggctaacacaggaggtggtgggcatgggtgcggggaggaaggtgtggagggctgacgttacagggggaaggtggggagggtggtaggcacgggaggaaggcgggcagggagggtgtcaccaggtgctcctcctcagctattcctgaaatgcaccctggagcagagtctgaatcttgaatcttgatggtgctggttataagctgtatagctgagggagttagagaacctctgcatgtttcatttataaaaatgggcaaataaaatccaactcttggctggtttgagaaatgaatcacaggaaatgtaatggcaggcagcacagtgtctagtattaccccggtgtgaaagcagtcatccttccccttatcctagaaaacatcaaaccctttgtgcagttctccagctgacaaagctattcagatccaggagctcagctggtgaagccatcacctttctttgagatgcctgcctcagggcctctgcgtggggcacttgctcctgccctctgccagcatctcactgcctggctcctgcctatgcaccttttgcccctgggttcccaggggactgtgtgatttaaatcaggccgctcctcctgtttcactgtgtttttggcttttccattgcaacacttgtcactgttgataacacaggtctgtgatgaatcactggtgctggtgtcccccaggaagctgtgggaggcaaaggagccctgtctgcctggtccactccagcactcctcagggcaccctcaatacagagcttgctctgagcgcctcacttgcataggcccccactgtgatgcaaaccctcatcacttctccagtctttctaagatcatctcttcttcagatttcccgctttgcacacagccagctaactaaacttatctgaaattagttatttttaactaccaagcaaaatcttcagtgtctccccaatgttgagagtcaagagtagcctgagccaggcctccaggccctcctcgcctcttctacccacacgtgttcgtaacgctcagcatcagaagtgcttaggtcctggagggcttgcagtttctctgcctctgatccacaccttccatctatctcagtctctgcatgtcgggctgctgccctcccagggccgtcacctgctccctctcttttcttattaacattttactcactcttcacaccctgtgccatgatttcagcttttctgaataatctttctcagtcatcctgtgcaactccctaacttctctaagttctgtagcccttatccttgaaaccaagttgggcaatgccttattttatgcacagaacttttctttcccagtttgcaatcttcctcccattcaaagcagtgcatgagcacagctgccaccaaggacgcatcttgtgtaaaagacagcacttccggaaacccaactctcctgtgtgcagctggtgctcagcacctccctggtaggcaacaggaactcaacagattcctctcaactctaacatccaaaaagtagttttctttatagcttccaagagtgaaaaacgggagtgccctgggagcaggcacatgacagagggttgggaggtcttgtaaaaatatgtatatatttcgaagacacagacagaacatacacagtttcatttcacacagtgatctgagttgtggagtttgtgttgttttactcacctagacacagaaagtgcccgatctgtagtctgtagcttcgggaggacaagcaggtgaggagcacgcagagcgcgtggaaggtggccagccccatgagccagggctcagtccagtccgtctgctgtaggaacacaccagcagacactcactgtcctgccactcaaggccgggttcacggcccacccacagccttctcccagcgcaggaggcaggggcctctcactcctgagtcctcctgggctactcaccaagtatccagagagcattgccaggcctcagagaaacatggggacaggaaagggagaaggaaccaggaggatggaaacaggattctcccctcagtgcaactataattcatggaattcaaagttcaagcacacagaactgaaggcatctctgatgtgctcctttcgtttgtggaacagaatcatgtttttaaggtgggtataattaaaggaattaccatcctttacgatgataattggttatgataattggtgacgacaaggaaattaagacgattgctcaaagagatgcacttggctcagccccaaaggtaaaacatgaatcatcatttcagactccttagtcagcactgaagacctcagggaatcttgagccatcgccacgtgcaagacttgattttctccaacctctctgcaatacactgaactctccagacagtgccgcactccgccgcctcctggactccccgggaccctgctgtacctggggacagtgtctggctcagggacctgaagtagccaggctcagatccactgctgctcagtccccacctgatgctcagatgccaatcccagcagtcctcaaccctccccatcccctccttgagcgccctcctgcagaagacaagccctgccctccaagctgcagccccgccctgccctccaagctgcagccccgccctgccctccaagctgcagcccggcacagccctccagaactcctgtgtcactactctctgctggggaccgcagcggcttctccagagccgcgccatgacataaggacacaagcgcatctactcccatcaatgcacccaccagaagaccagaggcacggaggtgaggggagcacggctttctgcccagaccccatcgagtgcccatgtcaccccttggcggccacgtggggcgtgggctcccctgggatctgtcagacgaacccggcacggcgcacgccccgcccacactgggcagcgttcctccgtgccaccccacacgatcaggctccaccacgcacgccccgccgcactgccagaatccgcccacatggcccaagccccgcccgcaagacgctggactggccggcgtgcacctcccacacgaacaaagccctacccctcgcgctccgcccacacaactcagccacgcccgcacggtgcaggacgccagcccagcccaagcccgggccacagagcgccggagccagctcactgcgcacgctcctccacaaggccccgcccggccccgcccctccccgcccaacggcccaggaccccgcctagcgctcgcgccccgacgcccggccccggccccctcccacagggcccaggaccccgcccacagcgcgcgcccccgacgccggccccgagccactcccacaggtctcaggaccctgcccagcgcgcgcgctccgccacaaggccccgcccacggccggggccttcttggccacaggccgggtgctctgtggggcctaccctacgcctctccgccgtcctcccccgaactggtggttacgcgggccgcgagttaccgtgagcacggctgggatgctgacggggaaagagctgacagagaaggcggacggcatggtgttgggaagcccgctctcacagcaaccgccgaacccggcctggccagaatccacagaggagggcgccaaatcctctctcgtgagatctgcccttctcacgaaacttgcgcttgcttcctctcgcggtaatttcatggcattgctaggtccagatatcgcgatatttcctggtggtcgctgtaatacggaaaacttactacgctgctgtgggacttgtgctcgctccgccaggaggccgagggcgtctttagttcgttaacagaggagcaggcggaggcgggtggaatttaggaggtttgtttcaaaggctcagggcgctgtaccgccacgccagccctgtcccacctgggactccctagaagggtcagagcatcaatgaggacggtgtccgccccgagaccctgcaggagccggggacattgcccactcctcggaccctgcaggacttgggaaggtgtctgctctcgcgaccctaagggcagtgcactcttagtctgggtcagcttagggttatctgtcttcactttggagatttaccagatgttcttacgcttcacttcgttgttcaacgacagatacaaaaatataaagttaattttcttccagcgaattttttccctttattttaacatctataccccaactttgacattttcaaattaaacattctgttattttaacatcatgaattattaagtgtatatactttaattgcatatgttagctcttgaactagtttaatgtttctaaaaatagttctagtggtggacttttttttttttttaatagctttaacccctcccagatctttcttaaaatctttccacagtgtggtcatttctgcttatgctacttaacatgcattctctcatttcagtgtagaaggtcatggtttcttcttatgggaaaacatttctttcattgatatttttctctattcttcctgtattcaactccaggaacatcccgttaggtagatagtgcatcttcctctcttttgtgtttctcaaccttcctctcaaaacatcacgactgttgttgctgagtttgggaaatctcgggcttggctttcctggttttttttttttttttttaagacgatgtctcgctctgtcgcccaggctggagcacaatggtgggacctcggctcactgcaacctccgcctcctgggttcaagctattctcctgcctcagcctcccgagtagc

SEQ ID NO: 8854 - DNA, 6000 bp, Homo sapiens
ctgtgggagccacggggctctctggggacaggggatcggctcccacttcctgaacgtcatcgggggagtcacggggctctctggggacaggggatccgctcccacttcctgaacgtcatcgggggagtcacggggctctctggggacaggggatccgctcccacttcctgaacgtcatcgggggagtcacggggctctctggggacaggggatcggctcccacttcctgaacgtcatcgggggagccacagccagggatcctgcaggggacaggtgcttggtgatcagacccctgcctgcaggcagctggccccacagtgccctcattccagtgcctggtgcttcccacctgcagggccctgacctgagaagcgcccacaggaatcagaagctccaaagccgagtggggcccggcggccattctgggagtttgctcccaggcaacacccaccagggcagggcccgggtgagggggcatttggggcacgcatggggtctgcttgttgcaggcgggacctgcctggggggtctctcagtctgatcgcacaaaggcagacggagccgagcgtgagcacgcacagcccggcacagggaggtggcacagctgcagacagtgggaacgctggtcctccaccatgcaggagcggtcagatccacggccagccgcccaggccgggcacacggggcacctggatgcggggctaagggaaggagggaggagggagatggccggatgccggacaccacgcctggccagggcagaacgcctgcctacgacggggacccatgcacacccacgggtcaggcgggacccactgacagagacccgggtaaaggcgcaacactcgtgtaaaacccaagcaggccttgccccgacacctgaggcccaaacagacagctccacctccagccacctctgccctgggccaccggttcctgaaaggctcttggctaggacagctggccggccccttcctgctgctcccccaccaccagtgcgcggcttctgagagcagcttccgtccccaagaagcccctggctctgctctcaaagggcaattgtgcccaagcgggaagcaggtgcagacgccatgtgtccctctgggctgagcaggcacaagcaagacattctctctgcacttggctccctccccaaggcccggaccacaggagcaggtgtcagcaccccctgcagacatgaggcccaggcccacccctggggacagagagggagaggaggagactccagaaaccagctggtcactccccttgttgcacagaggggaaactgaggcccacagagaggacaaggctgacacacacttggcttggggcttccttgccacggccaggccctgggttccacagagcctccgtgtcctccatgtggccaggccctgggttccacagagactctgtgtcctcaggaggtccctctgtcttgggggaccagccgtgctcagtgtggccaggccctgggttccacagagcctccgtgtcctcagtgtgaccagttccctgggttccacagagcctccgtgtcctcagtgtgaccagttccctgggttccacagagcctccgtgtcctcggcaggcccctctgtctcggaggccagccccgctcagtgtagccagttcagcacattccaggggtttggcttgactgggacagccatgtcctggacattaaccagtgccccccgccctccctgacagggccctccttgggggtgtggagtcacagaaggggaaaccgaggcccaggggagatgggacctccaggagaacctggccttctggtccgtggacccctggaccggttgtaggggtcactctggctcagcagggggccatcacagaccaccccccccacccccgccaacccctcacagcccatcctgtgtgggcgccccaagagccttgaggtcagaccaggccctccacgcacaccctctggggtccgcacacaccctctggggtccacgcacaccctctggggtccgcgcacaccctctggggtcagcacttcttgtcgtgggaagtgtcaggtgcagggtaggaacatcttggcgaggggcattcacatgcacccacataaagtgcagaggccctttgcacagaatcccggcagggggccctcggcggctctgaccctcagcctgcaccgtgagcgtcctgggccctggccagggcgaagactccgaccacagacccttcacctggtagagcgtccccgaccagcccatctgcagaacgaccctgtgggctggggccggccccctgcattgggcccctcacaaccagtctgtctccatcccatgccctgaatctgcccccaggaaccctcagtgtcacacccaccctgtgggccaggtaagtgtcccattgggagatgcatgtgggacctcttgctggaggggccctcggaatccctgcagcccgccccttgtttgagagctgaggagccaccctggggttggcaaggagtgggactcgtccagcacccccagacagagggggcggccagctggacagatacctcaggagcgggtcctgaccccgggcgcccgggtagaggggtgagggtgctgggggtgcaaagggcagggactcaccagccaccttgggaaggctgcagagctcatcatgggtggctgcctcgcctgacccagagcagagacaagggcccactgtgcgggcagcaggccagggagctggccacgtctcagggctacgtcaggaccctggacactcccacggtggcacggctccactgaagcccagagcagggccaggggtgcagatgggcacccaggagccacacagacgcccgggaccagcacaggctcccctctgcaggtcaatgcactcaacactggggtgctgaggacacgggggtgcgccctccaacaagggctgtgctgggacaggcccagctgtgaggccgcagttgacctcccagagggacacgggtctgctgctccagagacgcggccctgccaggagggctccgtgagtgcacactctcctctgggcttcccgggtgcggggcctcccctggcacagcacagcccctcgcagcacaggcctcgctgggctctagctctgtatctgtgctcctggcaggccagcaccccatcgcaatgtcctgtgcctctcagggcccagggtgacccctccccagcacagctgccctgcaggactcctgccagtcccattcacgctggcctgcccccagcctgtccccgcaggactcctgccagtcccattcacgctggcctgcccccagcctgtccccgcaggactcctgccagtccctttcacgctggcctgcccccagcctgtccccacaggactcctgccagtccctttcacgctggcctgcccccagcctgccatttcagaggcagccttggtaaccaatgctcaaatgaccactgcccaggccagaatctcagaggaggccacaggtccccggtaagttctgatggggcagcctccgtgggggatccctgggccctgaacaccctcctttctcactgtccctccctcccctgcgaagggcatcctcagctgcttctgaaacctggggcgctgtggtgggaaacaggtaggtcacgtggtttccaggctgagatgataaacctgccgcgtccctccaggtcctaggggcctgaggggatttactgggggcagctgggaggggggcggcgaggaagcaggaggggtgggccccagctccttctgactcatctgaatgccccccgtggcccctcggccgccagagctcgtgaagacggttaaggaaagcttccccccagtggctttcaccccacggggacagagccccagaggtgcctgtgggcccagtgtcctgtgcactcacagccccaggaggggcggacccagtccaggcaacttggccatcgtacacatcctcctgctcacagccgagaatcctggggcaggggcaggtgggtgggaagggacaacctccccacccctcagaagccccaccccagcccaaccagaactgggtggcccatctcccttctcgtgtcccccaagtctgggactggtggagtctgaccagggccatcccctaagtacccaggcttacagggaaacgggacctccaagccccacgtcaccttgcaaagtcccctcctgggccaccctgagacacaggccaggtctggagcagggctgtctggccagggtgtgcccgcagagctggggtggggagcaggcctcactccctctgctccaggcttttcaagcccactgttttcaatctagagatttcacagaaaaacccgtgttttcagcttctcttgaaaagtcagatctgccctcaggtgccacccacttcccctgggcatctctgcctggacaagccaccgtctacccagggtatatgacagccacgggtcccaccaacccccaactgtcaccccatggcccacggctgctcagaggtccctgggcccatctggggctctgtccccgtggggtgaaagccacccgggggaagctttccttaaccgtcttcgtgagctctggcagccgaggggccacgctgaccccagcatcacacggaaggctgggacgtgccccctcccccaagagcagtttcggctactctgtgtcccccttttatgggctgcacgacgtggcagcattttaaccgccccttctcaatgcacagcccagacaggctgttctcaacactctctactgcaaactacacacagttttacgtcgccagaaagaccccaaatttctattcaaaaagaccgtaccagtttcagttcccgccaacctcaaaggcagagacaaaaggacggtgtgcccctcctgtaacttcatttcttcggtgactgtgaagctgagggcagagtccacgcctggggacagggctgccaccgcagcggccactgagtccaaccctcgctcctcctcccagagacgacctgcgttccgctcagggacagggctgccaacgcagcggccaccgcacccaacgctcgctcctcctcccagagacaacctgagctctgctcagaagcggcacctcctcatgctggactcactcgggcccacatgtgccaagggggcctggttttggggccggcgggttctgcctgatgctcagagggtaactggatgctgaaaactgtgagtctttcttcaactcaggggaatgtttccagggcacgccaggcctcactcacgcaggcctccgcgacaactgttcagcactgactgagggtgaagtgaaatcctgaaagctgagagccagcgccctcacacgagggctgggacgtaacaaaagcccatcaagagttttgcccagggctttcttgggccttgaagcatgacgagaccaggacccgtttaggattaagcaagttttactgggggtctgaaaaaactccccaggcctccacaaacaagtggagaaggaactccccaaacctccatgatttagcagaaaacaagataagggtaaacacctgggcccatttagatcaagtaaatttactgagtcttcagaggaagatcttcaggaccaaacctcagttagagatgagaagaattgaatcacgtacgtctttagacgaatgcacactgacacggagacacagagcttagaaggtgtgtaagctctggaaaaactgtaatctggagttggtctggcgatcatttccaggccttctccctgtaaccagttacagaaataaaatccctcttcttccccagttcatctgcatctcgctatcgggcctcgggaatgagcaacccgaccctgggtttggtccgggaacgttttgttctctgcgtgaactgctttctcatctgtggtcttttctgtcttctgggactcctgttgttggcacgtgggctcctcccgggccactttccctttacctggcaggatcctctcctgtgcctttcctgggctgaggggggagggagggagggagggagggagggtgg

SEQ ID NO: 8855 - DNA, 6000 bp, Homo sapiens
gttgtcttcttttctaatgcatcattgacaaaactcagaaatagcccctgcgtgttcaggaggtggacagagtggggaaagagaggaaaacccattataaagaaacaaaatgtgacttcattgggattgtctttcaaaatgtgccctgtaatttcccagtcgtgtggttcttctaaccagagccatcctggctttacattttttggatccaatctgaactctggcagaagctgcaaatatcctgcagcctgggtcccagccccaccacttcatcaaaactggcctccccagggatattaaagccactttattgttgccaaatccagtgtatacttctctgggagggatcccaagacaggactacccaaccaagtcacttccagagttctgatccatagacattctgagagatcatgaatggtgttgttttaagccactaaattttgggatacttttttttttataataatgaatttagttttttaaaaaaatgtgtcaagtatttgttaactcattaatgagggaaccagcaagatgacaaagctcattcaaaagaggatatgagaggctgggcgtggtggctcatgcctgtaatcccagcactttgggaggccaaggcggatggatcataaggttaatgccctaaagggcgataaaactatgacatttgcaactaaataatctgcaaagaagcatctaacccagagtctacgccctcctcaacagcaaataacaattcaaataagttggagttcccctggagttggatggctctgtgcaggcttgctttagactatactctagtgagactttgaacgtatatgtcatcatcttttgcctcgctaatgaagatttgatagataatactgcttgagataagacaccaatgaaattgtcattttatgcaatactatggagtaattcataaaattattttactcctttattcaacaaatatttattaagcacccactacgtgaccgaccctgttctaggtgataaggatacagtagaatacagtccctgcccttgtagaacttgcagcccactgtggattcatttcagtataaagtgtaggcattgtcccaaagccgtaattaggcatctcatcagaaatcagcccactcccccaccccaatcaagagcccctcctgctgtcctgctgtatgtgcatgaaacacaacattggcctttggggtgcacttctgagcattggcctttggggtgcacttctgagatggggggttccatttcttgttgttcttagaagtgggacacacttctgagaagggtgctaaatgccaccttgtttacttctttataaggactgcaacaggtgaaaatttgttaaaggagaagaggcagttttttttctttttaaagaagcacactgtatttatcaaaaggaagctgagaatgaccctggatgttacggtacatgtgtatagctagatgttggttaaaaatggaaataagaactgacaaagtctttgaaaagtgtaacagctttagtcagtgctatagtctcaatgtttatgtctccctaaaattcatatgttgaaatcttcacacccaagattatgatattacgaggtggggcatgcaaggaggtgatattgggagatgattaggttatggagagctcttacaattcagatgaatgcctcagagacccctccccacttctgccatgcaaggttagggtgagaaaatggctgtctaggaggaagtctccctcaccagacactgaatctgttgacccccttgatctcggacttcccagcccctagaactgtgagaaaaaaatttctgctttttataagccacccagtctatggtattttgttgtagcagcctgagtggactgagacagtctgggaattcctcttcttttttttttttaagatggagtctcactgctgcccaggctagagtgcagtggcacaatcttggctcactacaacctccacctcccaggttcaagggattctcctgcctcagcctcccgagtagctgggattacaggcacctgccaccaggcctggctaattttttttttgcatttttagtagagacgggttttgccatgttagccaggctggtctcgaattcctgacctcaagtgatccgcccgcctctgcctcccaaagtgctgggattacaagcatgagccaccgtgcccggcctgggaattcctcttaacaacactactgttggcatctggttgtgcacctgctgtagcaggtgaatagccatggattcaattccctgagtctaaggaggctgaccatgcctacatttggtcatagacttcaatggagtccccatctccattgaagagaataacacaagtagagagtggcagtgaatgtcaacaatttgcaagcaatagctcaatcaagaggcttctgtggagccaatttgtcagaagcttttaaccttaaaatgtagatggtaatccagtgtagcagacactgtggtgtgccacacagaacccctcttcagggccaatgcagccatcccccagctgctgagaacgtcagctgcagaagattcaccacagggaccctcccagggaattgccctcggccacaaggagctgtctcaccaaaggctagactctctggggcaatgactggctgatgcaggggcacaaacaccgactgtaggctcaaatgcagctaccctgggaaagaggaggagaaggatgatgtggagaacgggcagtggatgacctcagtgcaatttgtaatgtttaattccttaaaaaagaaaaagagtctgggaaacatagcaagaacgctgtctctacaaaaaaagataaaaataaaaataaattagccggacatggtggtgtgcacctgtagtcccagctgaggtgggaggatcacttgagctcaggaggttaaggatgcagtgagccaagatcgcaccactgcactccagcctaagtgacagagtgagactctgtctcaaaaaagaaaaaaaaagaaaagaaaaacgaccagataagatctgataaggcccgatgttaatacatgaacttttaaatattattctccagtctttttttttttttttttgagacagggtcttgctctgttgcccaggctagagtgcagtggcactatctcagctcactgaagtcttaatctcctgggctcaagcaatcctcccacctcagcctcccaagtagctgggaccgcagacatgcaccaccatgcctggctaacttttgtatgtttttgtagagatggggtcccactatgttgcttaggttgctctcgaactcctgggctcaagcaatcctctcacctcagcctctcaagctgctgggattacagtcataagccactgtgaccagcctattctctattcttgattgtatgtccaaaatataccatcataaaaaagcaccactggaatcaaagataggggcttaatgggcatttttgtgcttatttaatccttttcctgtctctaggcagtgtacagataggggaaattgtgtttcctgagtacttttatatgccatggaactgtgggggctttttatattttgaaatatgaattcacgtacatgttaggcagaattttatactctttcaaggatctttctaaagatttcacattggtagcagttccattcacagtcagatatcaatagaattcattctaatatcaaacctgtggctttcttgttacaacttaatctgtttcttcaatgtggagtttaactcaagccaaatcctttttagaatcctccttcccaagcttacctgagcttcctaggatgcacatgatctgcccgctctccacgtacaaggagacatctttgaggatctgcctggtccactgctgccggcaagatgtgatgtcccaccagggcctcacgcggtggctttaaaggaaaccccaggaaggcaaaggcagcttggggccctggaaggggccacacccaggtccccagcattgatcctacctgtgccccaccccagtagtctccggacaggctcctaacgtgtttcagtctctgcgccctcctctgtagaacctggcagatagcgactgaggctgtctgccacgtagggagggggcctgtgctggagttgctctgaatgtcctgtccgtttggctgcgaggtggctgtccctgcattctttcaccaggtttcaagactccttgcattcgcagtacccccattcccatccacagagggcaggccgtagacactgggttggcagggcactgctgccactttgtttatgcccaggcccttccctgggcagggggaggggccattcactgtcgctccatgtttcccagcacagcccttctccctctcctctctccacccgatccactaaagagggagcccgaagtgcccagactggcacttaaagagtgaagaaaggcagcagaggggtgagcgccgggccccgcactcctgggggagcagcagcagcaagggctctgccttacctgacgctgtaggaggcatggaggatgcccaggctgtgaggctccggggcggtggcaggagccccctccagggagctctgggagcctctgtttacttggagacccatggaccctccgggggtcaaagatgagaggtcacccatggccaacaggcagcaaagctgggcaaattttctggtggccggaccctccccagagtggcttcagttggggagcccgtggcagactgccctgcctgctccacctgaccccggagtcccttgggacagcaggactgggacttggccacggagaccattatctgatgtacctttagccagcgcgtccttatcttgacagtgggcagaacacacacgtttgtaggtgggcttgccagcaaggaatgctgggagagacgggcccagggcaggaggccgaggtgtccctgctccaggaaacagagtgaagacactggccctggcaggcagcagctgggtctaagagagctgcagcccagggtcacagacctgtgggccccatggccgggaaggcggcagaggagagagggctgccgaaaggggccactccccaggatacctcggtgagtgagcaatgggaagtcggcccaggcctggtgggcgggtaggagaaatcaaacctttctctcttccctcaggagccttctgtcctagcaccacccggacatcaagcagtgtgaggacatggccgcaggactgtttcctgcatgtcaaagggcggaggggaacagattcagggtcccagaggcctctgaggtcacttcctgccctaagaaatgctcttttagggaaatgatgttcttttgtgtgatgtgggacaatttcactttttcttttttcttttcttctctttttttttttttttttttttttttttttttttttttttttgagacggagtctcgctctgttgcccaggctggagtgcagtggcgtgatctcggctcactgcaagctctgcctcctaggttcaagtgattctcctgcctcagcctcccaagtagctgagattacaggcacctgccaccacacctggcaaattttgtattttttagtagagacagtgtttcaccatgttggtcaggctcaaactcctgacctcaggttacccaccctcctcggcctcccaaagtgctgggattacaggcatgagccaccgtgcctggccagtttcgctttttccgaatgagactccatcatagaaatgtgctcacacatgccagggactccactggtgtctcctccatccatgtggctgtcaggttggtctcagtaatgaagtgatgggtgagacagggtgacagacggcttttgtgggaacatcagcatgtgtggctctaacaggcaatcgtaagttctgcgagaaagctggaaggagtagaagcagccaggtggcaggaggtggaggtatgtttccttcctcattttacctgagaagtgtttactcaagaaatagcctttgactgaattcgggatgtggcaggatttgaagcaggaggct

SEQ ID NO: 8856 - DNA, 6000 bp, Homo sapiens
cagatctcaattcctcctattttgacaattcaatcatttaaaccattgaggcccaaacaaagaagcaacaggaagtcccccatcatttctttttctttggattgggtctcgctctatcacccaggatggagtgcagtgacatgatcacagctcactgcatcctcaacctctcaggctcaagcaatcctcccacctcagcctccccaccacacccagctaatttttgtattttttgtagagacagggtttcaccatgttggtctcaaactcctgggctcaagtgatccacccacctcagcatcccaaagtgctgtgattacaagggtgaaccacctcgtctgacctccattttttactgcattcaatttttcttacatttctgtcaggcaggaacaagtacactttcattaacaagttcccatagactttcctcctcaagctaccattctcacactatacattccttcaatcaaccatgcacccaacaaacacttatggggagcccagaacacccttcaggcttggaatttgggatgtgacaatgaaaaggccgttgaaaagcttagattttggcagatgagacaggtgattacgatggagcgagacagaccaggcagagagggaggctgacctcaagcatctgaccagggtttattttcactatgtacacaatgcacgcacatgctgtaggtgaaactaacatgacttatgccttacgtgaaaataacaaataacatacagcagtcttcttgtcaaagtacccctgcaatgatgggggccagaagttctcggaaagaacattccaggtcagtggaggtggagggaaagaaattcggtgacagtatgccgcaggcgtgctgtggggaacccttagagttctgggagagtatgaaaaacagcagacgaaagtgacttccattgcttaatgtttgaattatcaccataaagacccaaaattatacagaaaaaaatgggaaagataaacacctaattcaggagaggggttatctctggggagcggggagagatgaaaggagaaaggggacacagtaggagtgcggggatcaagcttcaaagcttttggtaattggtggtgtgtacatgagagttctttaagctgatttgtgtacgatatttcacaatatgttgtcaaattgagagagcaagccagtgagtagaactccagagttccattcccacctcaaccccagttgccaaagcccccaagcaggagggaggttgagggagaggaggtaagaaggtctgtgccccaagctcctgaggagattgaaagcagctcggacagatgctggactcctggcagatcagcccttcggccttgcccctcactcgccctctccgctgtcactgtgcacattgcttcattgtcccatttttgttgttgttgttgaatcatcaaaaaatcttagccattgccagctgtgcgcagtggctcatgcctgtaatcccagcactttgggaagctgaggagggcagatcacctgaggccaggagttcaagaccagcttggccaaaacagtgaaaccctgtctctactaaaaatacaaaaaaaaattgccgggcatggtggcacacccctatagtcccagctaccctactcaagaggttgaggcaggagaatcacttgaaccggcaggtggaggtgcagggagccgagatcgtgcctctgcactccagcctgggccacagcgtgagactctgtcaaaaaaaaaaaaatcttatccatttctaagagactcatgtgggctaacatgcatcttgctgttgttgtttttaaaacaaatatctgcaggagggatattagacaatgtaaatgagctgagaaattacttctgctggccaaaacatccccaggtcggatttaggcatggaggaggcgctgaggaaggaaggtcagacatttggagtctggagcaatgtgtggaggtaacctgcagcccaactgggttccactgtgtggtgctttgagaaggggagggagctggcagacagaggaggcagagcagaaactgggtaagaggaaggggagaggtgcctggttgcttgttccaaggctcaccccaagccccttcactgtggcctgggaaggcaggtgtgggccagccctgactccaaccaccattgagggattgtgccttccaggagttgcacaggcagctcatctttcggaggaagaaaattcgtgcctgggttggggacgacctctgttccattttaaaatattttccttggctcccaggaaggatttgttagactcttcctgaggttttgacaaactctctgtatttttcaaatacttaagtatctattcggctgacatcttaatcagtacgactgtcagaacatcacttgaatttctgacaggtgacacccaaaaaagcaaaagcaggtttatttgtaggtaaccagctctgctcatgctgggctacattgtaatttctcctcgtattaacttctgatcaaattcctgagtcagatgcctaggcaagaaggaaactcacagagcacatgtttctagttctgagatgaggagcctatgccccggggggagtgatgtgctgacactcacggctggagggttggcaagaggacacgcaggacttgttcctggctgaagaaattttatcgaaacattcagcctaggtcacacacagctctgcctgctgccagggtttctcttgtccttctctgttgctgctcctgcccatggcatgaggagtttgtgggttaagggcacttgccactccaggtgcccaagatgccagatattctctgtgcaaatggccccaagtccatccccagggtctgtacacctcttcccaggcccaacctcctgaggacttttaggccagagaagtatatgtctgtgcagggcagggctgcaatgcaggtaggcaggagggtgaccatccagggtgttgagggccccatggagtgggatggagctgagggggccagaaaagggggacaggttgtggctcgggctggaagtggctcccccgtaccagcgcattctagccaagttgccttagaatttctcaatttacacatggcctttcaggttgtgaggaagatatgtcaagataagaggatagaaactattttatttaactgttcttatagcttgactgatgacttttatatatctagacataggaaatgtgaccctcatcctcttgttccaagacccacaggtgttacgggcagaccgtcactcagcacctggagtgacaggatcggacagaagggaagcagaaatggcagggcctgcgtgcatttctggtgtggtcctagcatttctttgcctctcaagctgtggtggctgaatcgtcagccctcccaggcaggaagtgttcccaaagtcccgctgactttctattctattcaggctttaaacatttcccgaagtggtgggccccacagggtattcagagagcagagctggtcagatgtggtggttgcagaactgactagaaatggtgggctccttgggtctggccgagtcaagtcctggaaactcaaggccagtccaggttgttttccccattgggtgtggaatcctcgatcatgcttgtctttctctcctccctcctacccacaacaggcaaagatggaaaggtaggatggggtgaggtggtgggagtggggatctgcttctcgcttgtcttccagtttagcctcctgcttcaaatcctgccacatcccgaattcagtcaaaggctatttcttgagtaaacacttctcaggtaaaatgaggaaggaaacatacctccacctcctgccacctggctgcttctactccttccagctttctcgcagaacttacgattgcctgttagagccacacatgctgatgttcccacaaaagccgtctgtcaccctgtctcacccatcacttcattactgagaccaacctgacagccacatggatggaggagacaccagtggagtccctggcatgtgtgagcacatttctatgatggagtctcattcggaaaaagcgaaactggccaggcacggtggctcatgcctgtaatcccagcactttgggaggccgaggagggtgggtaacctgaggtcaggagtttgagcctgaccaacatggtgaaacactgtctctactaaaaaatacaaaatttgccaggtgtggtggcaggtgcctgtaatctcagctacttgggaggctgaggcaggagaatcacttgaacctaggaggcagagcttgcagtgagccgagatcacgccactgcactccagcctgggcaacagagcgagactccgtctcaaaaaaaaaaaaaaaaaaaaaaaaaaaaaaaaaaaaaaaaagagaagaaaagaaaaaagaaaaagtgaaattgtcccacatcacacaaaagaacatcatttccctaaaagagcatttcttagggcaggaagtgacctcagaggcctctgggaccctgaatctgttcccctccgccctttgacatgcaggaaacagtcctgcggccatgtcctcacactgcttgatgtccgggtggtgctaggacagaaggctcctgagggaagagagaaaggtttgatttctcctacccgcccaccaggcctgggccgacttcccattgctcactcaccgaggtatcctggggagtggcccctttcggcagccctctctcctctgccgccttcccggccatggggcccacaggtctgtgaccctgggctgcagctctcttagacccagctgctgcctgccagggccagtgtcttcactctgtttcctggagcagggacacctcggcctcctgccctgggcccgtctctcccagcattccttgctggcaagcccacctacaaacgtgtgtgttctgcccactgtcaagataaggacgcgctggctaaaggtacatcagataatggtctccgtggccaagtcccagtcctgctgtcccaagggactccggggtcaggtggagcaggcagggcagtctgccacgggctccccaactgaagccactctggggagggtccggccaccagaaaatttgcccagctttgctgcctgttggccatgggtgacctctcatctttgacccccggagggtccatgggtctccaagtaaacagaggctcccagagctccctggagggggctcctgccaccgccccggagcctcacagcctgggcatcctccatgcctcctacagcgtcaggtaaggcagagcccttgctgctgctgctcccccaggagtgcggggcccggcgctcacccctctgctgcctttcttcactctttaagtgccagtctgggcacttcgggctccctctttagtggatcgggtggagagaggagagggagaagggctgtgctgggaaacatggagcgacagtgaatggcccctccccctgcccagggaagggcctgggcataaacaaagtggcagcagtgccctgccaacccagtgtctacggcctgccctctgtggatgggaatgggggtactgcgaatgcaaggagtcttgaaacctggtgaaagaatgcagggacagccacctcgcagccaaacggacaggacattcagagcaactccagcacaggccccctccctacgtggcagacagcctcagtcgctatctgccaggttctacagaggagggcgcagagactgaaacacgttaggagcctgtccggagactactggggtggggcacaggtaggatcaatgctggggacctgggtgtggccccttccagggccccaagctgcctttgccttcctggggtttcctttaaagccaccgcgtgaggccctggtgggacatcacatcttgccggcagcagtggaccaggcagatcctcaaagatgtctccttgtacgtggagagcgggcagatcatgtgcatcctaggaagctcaggtaagcttgggaaggaggattctaaaaaggatttggcttgagttaaactccacattgaagaaacagattaagttgtaacaaga

SEQ ID NO: 8857 - DNA, 6000 bp, Homo sapiens; identical to SEQ ID NO: 889

SEQ ID NO: 8858 - DNA, 6000 bp, Homo sapiens
ggcgtggtagctcatgcctgtggtcccagctactccacaggctgaggtgggaaaatcacctgactccaggagttccaggctgcagtgggcttgatcgcaccactgcactccggcctgggtgacagagtgagatctcttctcaatcaatcaacaaaaatacaaaataaaagatgttttaataacaaatagtataagagaatttacctgccttctaggactttttatctaatccaacttaggagccaggatatgtttatatgaaaatataaccatcacgctaagaaggatatcatagatgccaaataaatagtacaaataagcaattccttaaggagttcaggaggaaacatcacatccactagggtgatcagtaaatgcttcaagagaggaatagaatctgaattgggcttgatgaataatccaatttcagcaggctaggcattgcacagtaagggacatttgagtggctcaggaagaagtaagcaggccaggctggacaaatgaagactgcaagtggcagaggatactgttaactcctggaaagtccacttcatcagtccctgatgcctgtgcccttccaatgccctggattaattttgactcttcctggtattttccagagttgtcatttctcctccatttctccaccaccacaaagccatccaagctctcatcccctccctctgggaagatctccaactcatcttcctgtgtacaatcttccctctctccaaatcacagaacacatgtaccacatgtactactttatatgcataacccatttaccctaaacacaaaactggctaatggctagccactgcctgcaaaataaaattattctccctggaattcaaggccttctgtcatctgctctctatccacctctcactccatcactggactcacgcttccataaacttcatatacaagtttcttgcccacgatgttccttttatcttaaaaaatctcttttattttgttcccaggcagggcacatatggttgtacaggttgcattaactagaatttatataaatgacactccctggccaggcgcggtggctcacgcctgtagtcctagcactttggaaggccgacacgggtggatcacctgaggtcaggagttcgagaccagtctgaccaacatggagaaaccccatctctactaaaaatgcaaaaaataaaataaaataaaataaatgacactccctgctagtttgggcagtgcacaacctctgcaaccttccaaccatggtttgtttccatcctccaccaccctgaaggccttctctgaacaacggaactctcagagatcaattgtgcctctgattcctacaccaccaacttgacaccaacttttctttacaacagaaagttacaatatttggaacaccagcagtgccttgaacataacagatattcaaaagatgtttgcaaactatgatggagtaagtcaagatcggcaggttgtcatcaaactgtaaagagccttgaaggccaagaaagaagttttggctttatttggcagatgcaaaatatggtcaaataatgagaatgatgttttagaaagactaatttcagcaaccacaagcaagcagggttttaacgactatacttaaagtgacaggttaagggccctctctgttgaagggcagaggggagcttcctctgtaatgagcagcatcctcattcggccatcctgcagtttatctgtttgggattgcagatattggttttcatatacctacactcagacagtgaagctaaaactgggccattaagctaagaaaaacatgcttttgcctgaaatatctaagtatctaggaaacagctctgacttgaataattatacacatacataaaatacatatacacaaataagcattacttttctcccttcacttcttttgcagtctccctcttttccatctctgtcttcccttttttgtttcttgtgtttctctccctaaaattactatgcatttctctcatttctttacaaatgctttacattaatgatctccatatggccctttccctctcccaaaacaccctccctccccctaagattatatttgaggtattttactggttttgctcatatactggttcagtcaactccctcattatctgcactaataataattcaattctcctgtttcctttgctaatgtagctcaaaccttcactaaccttagaattctacagttactggagaatcaaaattccaagtccattttcctaaagccctccttaaaaaaaaaaggcatttatgtatttaggtaaataaattaatttcattgtattgttggagaaccaaataagtaactcttatctgtaaattcaaaactgttagaacctaattcactaaacaaaatgagtttcctaatgaatttcctttcaaagcatgtatcttcgatttcaagccaagaagaaataatagactccgtggcactagacaattttatttacttcttagatttatataaaaatccttactccctacaggaagaatattatgtagaagtaatccactgcaatagcaaggccgccgttccgaacatgtacatgcctatcagtaaaacatgacagggcacaaccttaaatttaaaaaatgaatggaaggaggatcttaagacagtgtcaaacagataaactataatatgcagtttgggttttgtgccccaaaaggctgtcttctttgaaagtccatccttagtctgcttattcctcccactgaatatgctcacttgtactaaaaacaggaaagtgctatcaccacttcaaggtaagacagtctaagaaaagactgcaatattttcccattcatcctagtaaagtagaaaaaaaaatttacccaaatactgttttctggatttaggacagtttagatttttctttgttctcaaggtaatggttttttcccttcccatatcatagaccctctgaaagtcgcagtgtgaatctttgctaccaaacggtggacaagaggtttgctaactccatactttgtaggaaaagggggaagaaaagggcacagacatccattatttagagtctatcgataaattaacctgctttataatataacgattccattacagcacatagtatgccgggggcagagtgtatagaatgtgtggagagtgcacatttcaccataacaagaatccatctttccaaacactaccaaaaattggcaaataattcaaactgcgcttagttcaaggcttaattgttgaaccctaacaataaaagttcagaaaaatgtaattagcaggttgctctctgcgcaaaagtaaactacaaagaggggacatttgtctatctctacacgcccctccccatgcctgaggatttcgccctcaagaggtgcgtctagtgtaagggccagaccccgctggtgccccggacaacggggtaggagtggggaccgaccggtcccgtagttggccgcgcctgggcctcgctgggcgcgcaccccgctggctcggtcgcccggaggcggacaggacggagacgggacgtatggacgggacggacagacgcgacaggacggacgggacgggtagagaagcagtgcgtcctacccggagggctccctcccagggccggcggagtacctgctccggtcatccaggctgcggttgtcggcggctgcgttgcgccagtcgggcaacgtgctggcgcacagcaccaccatggacacgatcacgaacaccaccgacacgctagccaggatctgcgcggccagcgacgacgtgggctcctcgaaggtccgccgcatgcgctccagccagcgcctggagggagccgcctcggccccgccggggcgcgcctcgtcgcggcccagcacgcccggctcgtcggccgagtagaaggtgtaggtgtcggacatgcggtcgtcgaggcggcgctggcagcagtactcgaggtgcgcgccctccaggccccagtagatcatctcgttgtagaaggagagctcgcacatccgcggcgcgaagcgcagcttgccgtggccgcgcacgtagagcaggatgaagccgaaggcctccgagtgccggtcgaagaagtactcgttgcgctcgcggtcgtagtcgtcgcacacctcgagcacgtcgcgctcggagcggcagccgtgcagccggctcacgcggcgcagcgggaagtccttcagcagctcccgggacagcgaataccgggcgccgcccacgttcagcaccaccgaggccgccccgctgcgcccgaaggtcatggctggccgcccgggggactttcggcccgagggccccgctgcagccccccaccccaagccgccacgcggggcctgcctgcccgtggctgacgggggagcgcgccgtcggggcccgcgctccctcggggctccgctcctgccctccgctggcccgggggtccctgggctcgagtatctccggcgctgctagtagcgcgccctccgcccggcggtacctgcgggtggccggggagtcctcgccggcgccagcgctgagccccaccggctgggaacgcggctgtgtccgcgccgccgaccctcgcgcccgagggctgcgcacaccgaggccgcggtgccctctcccaagccgcggggccgaccccctgagggctgcgggcgccgaatggagccgccggggcggaatagctccccgtctccggcgctccctgcggccgcgaatccggcggccgccccgccgccgtccagaggcgagaggcaaagtgagcgggttcggaggcggcgaagagccggctcgcggcggcgggggcggggcctctgtgcagtcctcctcctcgcccgccggctccgcgcgcgccgctcacctccctccgcgccgccctccgcttcccgcccgcgcccgcacctccccggcttgctcgggctgggattcccgggcgccccgccctggacctcgggctccccgcctcgtgacgccgtcctccccctccgctccggcccgtagtggcggggaggggtccgcagggcgggggagcggggagcccagcgccgggatgcctgctcccgcgtcctgccctgggccatcgggatgaattgggcagtccccagggccccttttaacagccctggttcaaagcccagtgtggactcgggtgcggggacagacggcgtttggagagctttttccagaaactgtccggagcccagctcgggttctgacatcgcccctaaggatttctcagggaaggcatcccagccacggcttttcctgccgactttgctcttcctaccgccgcgcggggcgacccacgtaccgcgtgctcagagggcggctacacgccccatcccccagcctcggtgccgcctgccagcccgcggagggaagcggtccccgacccggccccggcccccacgttctggggcgcgagtcctgagaaggcgcctaacgtgtagcgcgcctggaccctctcgagatgctgcccttagagtgggatgaaagtctggggaggaacgccttgtcaccggcaaaaacagcctttctcttggtcttcgtctgcatcctccttttcaaaatatcttgatttcccccgcgcacccctgacccggctgcagcaccggccctccgagcgggaagagccccgtgaaggctccgcagagcgatctaccccgcgctcttgtccgtgcccagaaagcgggttccacttggcagggattattttaaactgctaccagcaattcattcacctgacacccgacaccggcagcccagcccgccggaggcgagacaggtgagttgtaaggcgaaccgtgttagatgcaaaacaaatactagaagaaaaaaataagggtggggtagggtgagatgcggtcatctgaccacagggtaacctggctggttaaagggaagagtttttcattgccctctacttttcgtaattttgtaggattgtccggtgcccgctagaggtcgccaaacggagtccttttgcgctggttcttaagtggattcctagtgaaaaggcagacaac

SEQ ID NO: 8859 - DNA, 6000 bp, Homo sapiens; identical to SEQ ID NO: 3695

SEQ ID NO: 8860 - DNA, 6000 bp, Homo sapiens
cttagccatgctttgaggtttggtcctaacaaacataagcaaggcacagtagtaaaagtagacaaaataactgcaaataaaaatgtttccaatgccaacctagaaaaaaaaaaagattactttttaaaaaagtgttaaaggtaaacatacacatacataatctttattatataaataaaatgtgaaatatcttcctatgctttactttgaaaggtaacatgaatgccaccaaaatgatgactataaataattttaccaccaacatgtagctttaaaaaacaatctagcaagtatttcgctttaatgatagatttcagaagtgttaaagaccctaggatccatgctgagactttcactgcaaacacaaacaaacaaacaaaatccatttctagatagttagctttctgctcaatagtctctctggaactttctctacaactagtggttcaatacactattgaaccactattgaaccactattgaatactagttgtagtggttctctacaactagtggttaacatatattggaaacacctggagagctggataaactaaagattggtgggggctctacccctagagtttctgactgaagcttgagtatttgcattttgataaaatgctgatgctgctggtttgaaaaccacattttgagaaccactgtgccagacacattcattctgctttaaaatggattagacaggaaccaccattttccattacaaaggtcttgttctctcccatctagaaaagaataacctgtcagtttagtgtgtgtacgtaaaactatgtataaatatatatatatatataaaatggtatacttagcaacacaaatatatgtgtgtgtatatgtatatgtatctcatcactcatttcaccatgatcattaatcactgctaaactgaagcttctcaaactatgataaacattatgtaagaaacattcatgaattttgtttctaagaatttgaaatttgtcagttcagaaaaagtgttaaattttacctttaaactataaacaccagcttattcagtatttgaatacaggaatctattgacttttgttaagaaaaactccattcaagtactttagaatcacatttataagaactgatatgctaattataacttacacatataatcatagtaagttctttcagaggttctaagggccaaatacttattggtatagtatagtttctctactctcccttctctcaacatgcaattggatactagaaggctaggtaacaagagtatttaataaattaagttattctgctgttttttttaaaaaagaataacactgctaatgatgttggtgtccttacttgatctattaatgatgcacatcatggtttttctctagttgctaagaattagcacacagtttggtaaatgaatgttttaaaatataaatttagggtaaaaatttcaaacttactctatcagtggtgctccatacagaacaaaaattacatgaaaggagaaacaagacataagaaagtagatacagcatttcaaaaatccagttacctaaaagagaaatgaataacctgaagattcaagataatgcttaaaggacaataaattcttccatttcatctacaaacacaacttgttcccataatgtgtaaaacagttcaaatgttcttgggtatactcaaatcagatcacatgtcctgtaccgtcacatacacagccttcgatacagactaaaaaagcctaaaaggcaaataccaccttccgcccatattctacccatccgacctacatgagtcgaaaagaggttctgtttccatggtaatatagagctatgtcattaatcaatatttatcaaatactgattgacatcagagagctaggatacaaaaaatacagtattatgcgatgatagaggaaatatctgcagaaaataacaatttttttcattttaaaacaaaattcctgggaaaactgcactgaaaaagcaaaatactaaataattcttgaaatcacactcatattacacaacccgtatgaaaaaagacctgaacatctacaaagaaacatgagatcttcttgatttggagcttaagaatatataaacataacacatacattcagcttttccaatcataggcagtaaatgacctaacagagcttatacatggtagaaaataatgttaagtgtggacattattagtaatagccaagtgaatatctactgcagtgaatattctggaaaattgattctaatatctgaaaattgtttagtcaaggaaggccatgttggaaacaagcattaccacaggcttatattgcaatttctgaaaatcccactaagtggctttcagaaatgcaaaaataataaaaataaactgcaatgtcttattgagtaaggtttaaagatagactgtcacacgtatttattttcaatggtgacataaaacaatgactatataggctcacaatattataatatgctctgaagaagtcataattccataattaatgcaaggcaaggatcaatcaaacattgtgggcagccttccaccaagtaacagcctaccaatttggggggaaaaatatcaggttccctttgctcactataaataagctaataaagacttgatgaatactttattcttccattaaaagaaacactagctccatccaaaaatcagttattgagacataagccttaccttgtgtgataatgaacttcttttagaggatgtatttggtttcactactaaatatagtactagattgacagcagttacaaaaccagaacagatgcacaaccatgtcaagtgtgtttccaatattgagaagttctccaagaagagtgatggaatgaagacacttaggataattgaaaatatgcataaaagatgggtatacagtagtctcttgatatcgttatctttcatggtgttttcttggatggctagctaacaaaaaacaagaaaagaagagcatatgcaataacgactttttccattgtcttaaatgttttgacccctaaaaataggtcataaagtcaattttctatgagcaatgtatttgtttcaaaacacaaaagatgcagacgtgtagatgcacatacagacttagctttctattctacctttgattttcttaatatggtacaaacatctctcagagcctaaaaagaacaaatttactaatttcttaaatattgtgactggtttctgcaaaagggtcatgtcctaggaccaataaagcaattcatttaaacttttttggccaatatcaaagagatgaaatcaactgtgtggattaaattatctactgcctgttgcaattataaccaaagtttatttatgcggtttctagaatgcataggttataattccaacaactccacaaatatacttaggctgaattgttggtatttttttttactcttgtctaacattacagtagttcacatcttctagcaaatgccaaatgacaccaagtgcacattccaatactcaaatggtggccagtggaatcaagagttcaaagagcaccacactaaaccaagggatcccaatgcttcagaaataccaagatgacaacgtctgttacaggtgttaaattccaaccaaaagtagagcacgaacggaaggaggaaaaaaaaattaccgtctctaaaatacacgtatttaaattacctgagagctgactaattgtactgctaaacaaggactttattaatttaaagtaacagtcaatatgttacattatggagaatattccagaaaatagaaatatctcagaaaaaaaaatactatacacacacacgcacacgcgcgcgcgcgcgtgggcggaggggcgcccactagtgagaaaagcagaaaggcgaacctgggccttatcctaatagctctcatttaattcacccaatgcttttcaaaggcagatattttactgataaggaaacacggcaaacaggtgaggtggtccaaggtcccatgcgctacagccatctctctggtataaggaaatacactaggcatgaaaagcaaacggatggcaagaagggacaaagggaaagtttcccatagattctatcttaagctgattgagggagggcaaggggatcaggaatccattctctcaacagatagcccttcagcgatttttctgagccaccctcggaatcgcagctgccagcagcagatgtggatgtaatacagtgagcaggacccaaactcaaatgtttgctgaatgaatgaaggaaccagagtaagcaaagagggaaccagcaccggttaggccctggcgtgcccccaggacgcctgcagaagtgccacgggcatgacccggcccacctcgctacgcaccgcagcggagagaaggctcttccgagcggcacccagaggagccttcgcgggcatcgccgcaccttcaccggcagccccaccccaacccgggtccctcgggattctgcccgagcctacgccggcgcaagcgtgggcagcgaggaaccagctgagaggcaggatcaaagagcatgggagttgaagacaagggaaaactgggggacagaggcgaaaactcggatccgaaagggggtctgtccatcagggcacgccggaagagtggcgctgagctgacggcgagcgccggcgggtcggggcgccaaggctcagggctgcttcggcaattcgcgggggtagcttgcacctcgtgaggcgagacgccgagggcgtccagcggggcttacctaactctccctcccgcggaagggaagcggggaactactgcctcctaccatcaggtacgacgggcggcccaggcccacgcgcaggcgcagggctgtggggcggagacccacgcctaacagccagtcgcagaaagggaggggcgggcaaaaggggcagcggctttccaggtttggggtaggcgggagtatgggcttagaagccggaagtgggttgacgtagcccggaaggggaatacttccaagttgtagtgttgttgttttcagcctgctgctgctgctgctgttgcggctaggggaaccgtcgtggggaaggatggtgtgcgaaaaatgtgagttaaggggccgcttctgcgggaggaggaggctgggagaacctaactgagctctcccgggaactttgctttctcgttgttttttcttcgcccacaggtctcagattctatccgctgtctttctaccctaccctttgaccatttttgcacctcccaacgaccatacagtcctatatattttgtactcagaatggtctcagttctgcacctccttgtctatttctgttgccttcccccagccccagatctcatcagctctcctcccatataaaaatgtgcagttaaaccccaacgacacctttctgtcttggcaattcttgatctttcctttctattcatgtaagaagtattgttctcctgccaaatgctagacactagaaccaaagactaaggactttgccttattcattctcattagtcattatgccaggatatggcttagagtaagcccagaagatgcttgaattgaaaatcaacgtaagtgcaaattattatttccctaacttaaaacctttaataaattctcagtgtgcagagaataatttggggattctatatttggaacctggcgttcaggaccctccacactaaggccccaacttatttttccagcttcatcttcactgaggcttatcctcttcacattttgaccaaacaaaatactctttgtgcccatgtgtactctaagctttctatgcctttcctcagaatgtgtcctttatctagtttgccttcatcctctttactcctttttgttcacagtcctattgccacatatccaaatcctctgtcttgccttctccccaaactttcttttcttggatttccttagctagggttatttcttcctgcatggaatttcttctagtactttagctgtcgattattatactttttattttttaagcttacattttggttgaatggttctttttggggggaag

SEQ ID NO: 8861 - DNA, 6000 bp, Homo sapiens; identical to SEQ ID NO: 3156

SEQ ID NO: 8862 - DNA, 6000 bp, Homo sapiens; identical to SEQ ID NO: 897

SEQ ID NO: 8863 - DNA, 6000 bp, Homo sapiens; identical to SEQ ID NO: 918

SEQ ID NO: 8864 - DNA, 6000 bp, Homo sapiens
ccaagcccagtcgaggtccctggcgacagcccgaacggaggcacccaaagggaggggagtgccacgcccctaaaggtacccgtgacacccaggaactgccacctcctgaggggcccctcaaggagcccatggacctaaagccagaaccccatagccaaggagttgaaggtcctccacaagagaaggggcctggcagctggcaggggcccccaccccgcaggactcgggactgtgttcgctgggagcgctctaaaggccggacacccggttcttcctaccctcgcctgcctcggggccagggagcataccggcctggtactcggagggagtccctgggcctggaatctaaggatggttcctagcaggacttggtggggggaacagggaattggggatgggagggaggcaataaagatatttggccttctttggctttctttgcttagcagcgcctagcctgtgaggaatggctctttttctcaattcctaataagattggggtgtggcagagcagcccccaactttgctctgaagtctgttctccgaagagctgggtaaagagggtctgacatctcatcagctagtatagtgagtttcagggaaaactagtgggatgtcagcatgtaagcagagtccttaggacccaccgttaacaactcattgtgtacacacccatgcctgtccattatttatatacatagaatgcctttaggtagaggaatttagtttcctgttttgtgtctcatctctttatcttaggctatgccccatcatttgtatatgtggttgcctgactgacccctgtaggcacctgtgattgcagcccgtcttactcaagtaccaatccagtgatgaagggagatgagagagcagagtagtgtggcagatgtttattgagctagaggaggagagctgagctgagcccagcctgatcacctcctcagagactcagcattgtgaattgcccctacagggtcatttttatacagcatgaagtagccctgcacctgggcaggactgatctggtttgtagctcgaaggacatgttctgcaaagttctcagctaaggaaggtgcctgccctggatagaacctctggaacatctgggtcagctgccagtgtgagcagtagcccacgtactccttcaggtccactcgccccgggcgtatcagggcagggtccagcctgagagaagacagggaaagcaggtcacactagcacccaacagagatggcccctcgacctcctgttcctcccaaggcactaggggaggaggtgggctcttgcctaagtctcaggatgcctggctccttcctacctgtcaacgtggttggtggtcatgaacacgatgcgggcctcggtggaagccacaccatccaaggcattgagcagtccactgaaggtgaggcgacctaggccttggtactttactgggtctggaggaaggcaaagataaggaagcatgagtagtcatagcccagcataaaattagcatgccccactatgttcccctacttatccatgtgtcttgtgggctcttgtcactaacccaggcatcttccaccagccctctggatttctgctttcttcccctgttccacagttacccactccacttcctccagaacccctcacttactctccacagccaagtctcgactgagaaaagcagcatccacatcctccaggagtaccaggctctgctgcggggccacgctcagcaggtggttgagtcggtcatcagagaggctggagtccgtgaggctcagcaggcagatgctgtgctccagttccccagccagggctgtgctatggagcatgggatggcaggaggtagcaggcaacctggaaatgcttcctcaggcccagctactctcctcaccgcctggggacatgtgtctcagaggcctgacttctacctcacaccctgatgttccacacgtttcatgtttatcctggtccccgatccccagattcatttccccttccaaccctatcagcctagtgtttccacaaaggcttcgttttgccaagttgagagaaattttgaatactcacataaaactgctctttccgcaaccagggggcccataaagcaggtagccacgtctgtaaggaatgcctagggatagagccaggatgatcatgtcttttgccccggatatctacgttcattcccagccctgccccctggaagcctgataaccttggtacggaaataaatcattctcatacacaacttttcattcctcttaatctctgggaattggactagagctttatatcaccccatctggctggagaccaacctgtcccttctaaaaatgtcaaaaacagcacagccaagaccccagctgcttctcacctctgtcagtgtaccacttggggttatcgatgaattcctggacgtctctgacaattcggtcagccagaccctgttgtagaaccacagaattcagtggtcgccggcggcgtggatagccaaagggacgccattcagagcccacagctgtgtacatcacggtcttcccttcctcctgctgcaaggctagctctcgagctgggaaggagaagatgagataaagccaataattctcttcaccatggctgattcttcaattaggtggagctgtgccaaacagcttccttctggccccctgttcccatgggctcaccccggcctgcttattccacttctccaaactgctcatctgatgtcaaatgtccccatccctgcaatgtccctagaaagcctgcctgtgccatcccacaccttcctccaggatgttgaagaaaacctttcggtcagtgcccagggccgtgaaggtgacagattcccaaggagtccccgtctgcaagtctatcatctgcatctctcgacttcgttctacccgaatccatttcccccgatacctgaataagaacgatcaaaactgagtgagtgaatgggtcaaacccagctcccatcattcttttctactctcacagccctccctagctccccaccttaccagataaaatggtttccagggctggggacaaattcaaacttagtggaaatgcggccactctcatgctgaaggtacgaagtctcgacactgaggtgctgagtacgggtactgtggcgggtgagccagctaagcaaccaggcatagctcctgtctcgagcagggacttccagtgtgatcatgtaatggcgccggaatgccaccaggcccagttggacacccttccgggccagggccagggctgtgcccacacccaccagcccaaatccagccccaaagtagggattgtccttcagagccagaataaagtctgaaagtggcatcttgaaagggaaacaccaaaccttacaggccctggggtgttacgaaaacctaggggtggggaacagtggagatgggacaaagcacagattagaaattggacctccccagccctggccacaggtcagcattactgtgtgggtcaataccctccttttgtggggtaagggtggtattggaatgcaagggtggaggctccaggtccctcatcccattttgtccttcattagtctactcatacctgtttcctaccagaggaccatgtctggagatgccttaaaccaaaaagagctatataaacaggcttcacatcagggtaatggatggacaggatttttgtggtccctgggaccagctatgataaaaaggggtccattggctgcagtcagcaagggagaagcgtccgttgacttgtcagtaaccctatgtcttgttatgagtaatgtccttcaaatatcctcccccttacgtccccaatatttaacgtcttgtttagacctttattacctcccacctaaactgtctttaaaatcgtagttcttgaaatggcattttaataggtcttcacctcctgcttcacggaacatctacacaagggtccagatctttcatcatagggatcagctccaataccatatctctctctgctccagcaccttcaatggctggctcccagcagacccctgaattgggtataaactcagcctggtactcaaggctctctacaatacggcgcccacctacctttcatggattagctcctaacactacctgtttagcaaatatgcaaatacgcaacaaatatgttcaacaagtaagcaacctcccaactccttgctcatgcagtgctcttggctcggaatgcccgttcttttctccctcattctccccaaatgaaaatctgcccatctgctactttctccacggatcgtcacatcgtagacaataagatcctgagggacaagagcaaagttgtttctagtacacctctcctccaaccccgaaccccggccactttgccctgcgcctggcatgcagggaggtgagctgacagcagtgacctcggctgagcctcagaactgggatccagaattccaaaacacctatgcatggaaggccacagacaaagctctcccgtccccggcccctccgcgacacccaggaaccccctcctgaacctcgcccacaccccagctcgcgcctccagccacatggtttggggtaacccgtcactcagccctctcaccgccgtgactctctggccctccgtctcgatggtttcaccgcgcctgcaccttggggaagctgcgttcggccccgccccgggtcctttcatctacttcccgccacacccacagagaagcccacgccactctaccccagagctctcgatggtgcttctccggcttcagggctggagtgggggtggagggcgggaaaaaccacagagacaaaacatagagtaccccggcagccggcaagaggaagagagagtggcttccacatccccaatatcctagaggcggctgagccggaggcggtcgcacaaagcgggccccgggggccgttccagccgcggccgaccatagagatgcggctcccgccggctctgggtctggaggtgagtgagcggctgcggggcggaactgggaagggaatgcgggtggagcgagctggaggcaaagtttttcgagccccgggatcagggtgggcctgggcgctgggaactctcggaaggaggtactgaagggagcacccagacgagctgggccccggcgctgcagtcgcgtcacggttctggaccccgcccgggtacctgctgctctcaggacaaaatcatgacgatgctccatcccaagccttccaggttacaaaccgcctttccagttcgctggctcttatgatccagctcctgcccgacgatgtggacactgtcatcacctccattttacagataggaaagctgaggcccagagaagcgaagcgactgtgtctgtccaagaccacgcggtgagtcagagccagaggcaggtgggaacctgggtcgctaggccggggcccgttgtttctccaggccttctctctgccttagtctgtcctttctcttcctcagccctcctgcccggaagataagcgtatttcttctctggtgcccacctgtctcctacctcaccctgccctcccgcaggtgaaggttcttaatcttgacggctcagcgtcctccttggctccccccggaggccatgtatggtcaagcttgaagattccccagaacagcgataatattcagtaagtggaggctgcagtttccagagaatccctctgaccacgggagtgcactttccagccaccttgtgaatccctgtgatctgttgttttgagtccatgggattctggaaatagggactatcagattgcaggatcttggtttttgtttgttttttttttgagacggagtttcgctcttgttgcccaagctggggtgcaatggtgcgatctcggctcactgcaacctccgcctcccgggttccagcgattctcctgcctcagcctcccgagtagctgggattacaggcgtgtgccaccacaccctgctgattttttgtatttttagtagaaacagggtttcacaatgttcgccaggctggtctcgaacttctgacctcaggtg

SEQ ID NO: 8865 - DNA, 6000 bp, Homo sapiens
ctaagcaggggctgaacggagcctcttgcaggccacaattcatggtcacaacagttttagtctttgtgatgaaaaaagacaaactgatcccaacccaagctgaacccacagcctttgctttcccaagaggccagcttctaaccattgatccaacaggcccaggatgacgatcctgtctgccacactccaggccttaccgcagggaccatttcacccttatcaggatgagggagaaggtggacaggggctccatataacacagttgtgctctctcctcctctcctaaaacacacaaagaccagcattccagggggcaaagaccaggtctccccaaccaaaatggccttgtggcagatgccctgtcttcttactccaaaacctttgctgctgcttccttccttccctcttctgatatatccaggtccattccctgggggtgtgatccacaccaatcgcataaagaccaaaaaggtccaaatgacccatctgaccccacagggaacaaggaaaactaactaaccaccacatcccatccctgtcttgggagttagggaggcaaacacaggacacccactggggagtgctaagaaggacgttgggccaggcgtggtggctcatgcctgtaatcccagcactttgggaggccaagacaggtggatcacctgaggtcaggagtttgagaacagcctggccaacatggcaaaacccagtctctactaaaaatacaaaaattagctgggtgtggtggcacatgcctgtaatcccagctactcaggggactgaggcaggagaatcgcttgaacctgggagggagagattgcaagtgagcccagattctgccactgcactccaacttgggcaacagagtgagacactgtctcaaaaaagaaaaaaaaaaggatgttgaagataaaaaccagaaaataaatcgcagagaagcatccaggatttccagaccaacaggaacatgacgatccatggacagttctactgagggtggggagatcattagtttccttgtgtactaccattacattttgttttgagaatatcctcttcaattatttggaagcctctggtgaaattcctcatttcaaagactgccccactcacacaagaccttcggaggctgctgaagcacctacaaccccagccaccaccatcacacaaaatggggccccagagtcaccaccacgctaatattttgagagcttctatgtatccagaactacattaaggcttttacagatggtgtcttatctaatctgtacaactctatgattattatcatgacctttttcaaagtgaggaagtgggataagtaacctgtctgctggtaagtcacagaacggggagtgaaatcccagtctccaggtttttaagccctgggccatccttccttcccaacagggcaggggcagctccaggcagggctgccagggaggagagctgcagagctgcgggcttatctgagcctggtttcaggactgcagaggcctctcaagcccagccctatttcttgggcctcttgcagcaaatagaatacagagagctgcaaagggccagctcattttgttgggaactctcgtactcttctgtgtactccgtcacccatggtcctaaggctttcctaggctctaagttctagactgtctcccccatcccataagaagctcttccagacattgttactaaaatctcccttcaccatcactgctctgcactgaccacctaccatgtacagggactgtactaggtgcttaagctgcattttcatttcatccctcacatcaaccatatgaaggtataaattatctccattttacagacgtgaaaactgaggcaccaagagtttatatgacttgccacaggtggcagttttgggactgggatctgtccagtgccactctgtagccccttcctaaccataagggtaccttccccagtcaggtcctctcttggcaaagggccaccacctgccctacctgagaccaccacagccaactcctggagttaaagaatggatacttttcatttccaccattatccaaagctgaggagggtacaccctggtcttctctgccttgccctctccctaccaggcagcgttcagactcagtcttggtagcccacaccagggtgctccaggaaataccaccaggaatgaccactacagccagaggtggggaccacagcgggggtgacagccctccccctctgtcagtgggcatgctgttaggtccagtaaactagagcaccaggccaacttcacagactttcctctgcccatcctaagtgaccctccccactcctgttccccccccggttctataaataaaccaggttgttgcatcagagaaaacagccaggtgggtgtggaaagatcctggtggaaaagatgatttctataaaataaattaaggttcccattcagatcaaggggtggtaagtcaaattctccaagacaggctgttcttggctgaaaatgggtccacctggacctacaagcttggccagctcagctaaggaagatccagaggccaagaggaaagcaagggcaggaactggaaaaaacaatcaaagaagctgctccctgcaggcctggagcctttttttggtctgcctcctcctgttcccccagcaccccctgaacagatgtgtcatctaacagtctggtcagagtagctgattggtggagggtgaaggactgggggaaggggtggaatgatttgggggataggcacctcttctgaaaaagaatgggctaagagatccaggagagagcttttcgccccatatacccacccccttgggctccaggaaccaggaaggagggagaggacagaaaggaggaaaaaaacaaggtccaagctatataccacatgatcccacaccctgccaccaaacagcaagtcatgaaggaaggcggggagcaggccaggggatggggaaatggagtcaggtcacagccatgcctggaacctgcactaacgccctccccatcccagaccacagagagccagccaggaaagtcattccacacccatgtttcagaaaacattcaaggtcagatcctttttacctaaatcctgctttcatttgggtttgcaccaggctcatccccctcctccagcaagccttcctggatttattcactcagtggatgccattccactggggcaaacctttccggcacctctcctgacctaaggcacagtcctgccccaatccccttaccctcctacccagatcactcccaagttaaccacttgagtgatccacagcaggctgtcagccccggggactggcttccagctcctgcccaagcccaaaacaggaaatggggctccaaggctgaagccttgatcttaacacaggcaaggttaaatgctgccaaaataaatgatttaaaaaaaccctggcccactgaggtggaagtgaccgggagataatctcctgctgttcattaaccatgccgctgcctctacctcaggcagggcagggcaggcaggcaggccactggaaggctgactcaagtgtttccttccttaacttagaagctcctcctatcctcagaccagggacacaggacacagagggacaggatgggggtgggggggtgacatctctagatagtggagggcatcttgagagcaagaggcagatgccccctgcagccagcttctacgtttagcggggtaatcaacattcaacctcgccctggaggaagacacctggctttccttcccccgtagggcaaggctgcgcctctccactcccctgccggacaggcgcccgcagttcccctcccctttgaggaaagggaggcaggcccggaggttctaagaacggccccaagatttcccttcttgaggtttccatagccccaaagcctctgaatctcattcctaactttacttgacaatctactcctaacgttcgccaccacttaaacctcccccaggcctcccagggaccaccagtggctgagccccacacagcgcacgtttgggaagcttgaagacgaccccgaaatgcgaagaaccaacgtttctgtcggtttacgcccttaagcacgaggcaagggctcactggcccggctgaagttcggggtcctgatcccccaccagccccgccctgttaggcctttagccgtttctgtgcccccgcgccccctactcactgcgtgtgctgggcgcggcctgcgccgaagacctcgtccagcgccaccgtggcctggcccaggaacttgtcgacgccgatgagcgagcggtgcatggtggtgagcaccagctcgcaggcggcggcggagctcgcggcccagggcgccgggcccgcgtcggcctcctgcgcccgcagcaggccatccagggcccccggcggcagctcgaaggagcactcctcacgccactcggggcagccgtgcgtcttctccaccaccgacgtactgtacttctcgcggcccacctggatcaccgtgtacgcgtcgctggtgctgcccgctcccgagctcttgccccgcagcccgcgggcccgcagcaccgtcacctggacgtgcgtgggcagccagcgggaaggccccgccgccggctccgcgccccgcaccagggccatggcggagaagcggggggcgaggtctggccgagccggtgcagaccccaggacctggtgacaaacccggccgcggcagaaggcggtcaggaaccaactctgagcgccgccgcagctgcgggctgggctgggccgggccgaccggccgccgcctccccgcctcaccgggccgctggccgcgggccgcgccgcgacgtcagcgccccgccccctgccccgccccgcgcccgccgccccaaccggcgaggcggtgcgacagggatgcgggcacgcagctcgcgccccggcagccgcagaccagcccggagcgggaaggggcggtgcgcggcctctgcagagggtgggcggagttcccgcggtggccccgcccctggctgggggcgcccgaagcaacccggcctcgcttgtggggagccctacacccgcggccaggtacgaaaaacccgctctgcgcctccaggccaatcccacgtcttccttctaaaagtccctgctccggaaagccctctccgtaaaagggtcccggcccgcagttcctgggatggccagcctcttggcgcggacttggggtgatggggacccccgccgctcccctgaccccgggccgcgctctcccctcctccagtccgcccctgcgggggaaaatgccggagtgaaactggagcgattgccgccccgccacgtgacggtcccgcatcggcgacctggaagcgggtgagctgccgccgcctccaatctctcccggcgcagggggccgggatgcggccatgcggcggcgcgggaggcccgagagcggggctcaccctcctcagactctgcggcggagagccgagtgatgaataaatgagtaaccacatcaatatttaagtgttcactcggagccttggggccagtgtgtcacgggttgggggaaattacaggccctggtggggggttaaataactacttccacccattattaagtgcctactgtgtgccagggcctaagtattaacgtatacttggtttattattgataataacgatgtttagtaattatagatgctgaatttcagccaactctggtcagtgcgcttttatatgcattacctcattttatcctcagagcaactctgtggggtgagtatggcttttatccctattttccagaagataaaatgtcagctcagatgggggagggttgtgaatccactagatgcccccagagcgttttttttttttttaactttcagagcctgtacttttaaaataataatttaaaaataatacacacagcttttttaaaaaaatcaaataggacagaatggcttgcaatgaaaagcaagaactccctctccatccttcaatccagggatgctgcttaaagccactggtgttttcaggtctgat

SEQ ID NO: 8866 - DNA, 6000 bp, Homo sapiens
ctgaccaaaagtggctgcttcttggaggggaatgagacaaatctttgtcttcttgctgcagtagaaaggacactgaatgtatccctcagagacagtgacacccagtttcctggattctatggtgaaggatagagaccctttggaactcagagcttgttctgaagcactggagagtacatggggcctgaggatggtatggaaatgtcccatgaaaatgggcaggcagatgggcattcccttcccagttacttgcagatcctaggagtgtgtttattgtattgtggccctttctgaattcaagggtttctcattcgcagaaggacagagggcttattcagaaactagccagcaggaacactaatgctgccaggagctttggtgccaactcttgggtcttgctgctgcaggtggcacgtgattaagtacgagcttggatacttcttggctgctggtgcttagcatataatggctccattcactgagcctacgatgccagcggcaggccatgcattagctcattcccttcttttatgtatccttctggctaggaaggaactggggagggccactggggttagggggtcaccgcctggccttgtaggggagagggagttgcagacaggaaaccaccccttattctgaacacatccaaagcctacgccaactacatcatttcccaaactatttttcagtggcctggttcccagcccctcctctctagatgatgctcctgctcagagatggtgcttttagaaaaggcataaatggtgttaggagaaaaagtaggtggcccggttttttcccattctggcacaggtcaggctggtttcccacacgtgccccattgactttgttttctctcctcttcccttacacttcataatgaagactctttcactactgggtttcacaaatgagagaaattgattagaacaattacctttcagctcattccaggcatcccacttggccttgcccgtgaagtccaacatcccgggccgttcttaaacaagggaagaaaaggcattagatctggttcaaattctaatggagaacttgatcaaccttcttgccataaatgccatcttctattacacctgttccttctaggctctgtcatggggttaaataggtctagtagagtgggttctgccctaagaaaaccaatgtatgccaatccaaacttaaaatctagagcaaataggaagaacagtattcttattacaagatagcctttgtcttacaagttaaatgactccaaaatttctcttttaaaaaaattatactttaattacaattaaaaaaaaaatccattcatatgtcttaaaattcaaaagctacagaggaaaatactataaagtttctctctcacccctgctgttagctacccaatttctctccctaatcattaatgatatcaggtgtcctttcctatgaactgtttatatcctagccccatttttctaccgaattgttagtctatttcttgctgatctgtgggagatttcaccgagggtaaggtttctttaagttatatgatgactttatgcttatagacctgttgtcatctgcagttgggaaacacactcaccatctccctgttgtcctatttcactacgatgcccagccccaaagccacagggaacaatcagagtccgtagcctggagcactgtgcctgagaaaatgtccctgagcgctttcagggaagtgttcccagggacagctgaaacaaactgcccttgtggtcatcatcaggatcctagaatagcactcctcgacagctctctccaagcggtggaaatggaaatgtacatgtatatttgcaatgtccaattcaggagccacttgccacaccaagtacctgaaatgactactgggcatctgaaatgtggttcctgtgaatgaagactaaacttgattttatttaactattttcagttaaaatttttttttttagagacagagtctcgttctgttgcccaggctggagtgcagtggtgcgacctcggctcaccacaacctctacctcccaggttcaagcgattctcctgcctcagcctcccaagtagctgggactacaggcatatgccaccatgcccagctaatttttgtatttttagtagagatggggtttcactacgttagccaggttggtctcaaactcctgacctcatgattcgcttgcttcggcctcccaaagtgctgggattacaggcatgagccatagcgcccagcctcagttaaaatttatatagtcatatgtggctactggctattatactaaactatcgtgtttggactatcatgttttataatcgtgtaatagggctgtatagtacagccctagagagagccgatgacacctctttgatcagtaagtgatagattcctatgccagtctatctagactcatgtgaaaatcggtaactctagtacgggcacaggccagtctctgtgaaaatactgtttgtcagaaaagcatcttggcacctctggcctcccccacttcacctttccttcccctccctggaaggacagagtttacgaactcactgtaaaactcaccttcgccataagaccttcttcaactaagtgctccatgtgaaccccagggtttgatatggtactgcctgtgatctgtcattctgggtactatttcctgcttccagctggttggcagccagcccacctgctccatcttccaccccagctactgcggaaatagggaccatgctcgccttcttcctcagcaggggcaggggagacctcccttctgtgctgccatgataaccctgagtccttgcacagaatgcactgcgctgttgcctcagtatccacccatgtttcagggacttagggacagaatgaaacctgcccaaggcaggaaagatgttattacagaacatgacagtccaaagcacagcctcaaaatctgcaccaagatttctgggcagggaaaaagttatcatcaggaaggcacagacttgttagcgaaatgctctgacctagcccaagaaaccaggtgcttctctgctcctgacatcaggcttggccaggctgtcaagtgctccaaaaagtgctccaactttgatcctgcccatctagggcagaagctgaacggctcaacaatgatactactgagctgagagccttcagcaagtcttttccaagctgcagcctttgcttcttccctagtagagagtagctgctggtgataaccagtaaagaccttctaaaaccaggatttgaattctgttactactggagacactgagaatccggaacatggtcttttccacctcaggaaccatcaccataccccacctgaagagtagggcctcaggcagtttgagagtgaagttcccagggacttccagtctgagctgctgagcctgctttgatgagcagatgcccttccaacccccgctctgcatacctgtatttatgtcgcccacagttgcttgtttgtagtggccatagatgaacagcatctcctcatccgatggcttggtcttaaggtgcctaacctcctctgcagctttctcaaactcagcctaaatggaagggagaggagaggattgagggcctcctctgggtgggagagggtaagaatcctactgtggcctgatgacagcccagttacggggatggagaggtgggaaaggtggcacccttcgggcaatgcagcccctgaagtgtgtctgcccctccctgccccaacagggcagctagaaagattcagcaacacaagaaggggaagcccctccagttcactcattcaatcgaaaaccatatatccagagctctcacaaacgcaggcatcaggtctggaaatacagcagtgaagagggcaggccaagccttcgcccccagtgggggtcccctctgcgggagaagcagcgcggccaactgcctggccaccaccgggccaggcactagggagtggccggggctgcagcgaagccctggcctgaggacagacggggcacagtatgctggaaacagctgaaaggggacagggcatgagtgccgcggtgtcagcgccggagcccgttggtcccctccctccccctggggcccgcgcgttcaacaccgacctctgtcccagtgcccggattggcagaggcaggcgggaggagccagaggtcgccccacatagctcggtctcagacaagggtctacactggagagaagggaggggcccctgggtcacctctccccgggccgcgattctcctcgtcccgcactctgagcagccggccccgtacttcccctgacctccaagctctcggccacggactcctcgcttccccactccgccgcgacgtcctgccctgtgcttcgggatggggactgagtctcctcgctcctccaatccgtgcaaccccttcccccatctctccatcaagcaccctcgactcccacccctctcccgctacacagcgaagtccaccccatgggcaactttccggcagttgcggggtgggcagcagatttagaaatccccaaacggaaaatcccgctcacaaggctctgtccaacgaatcagggctaggcatgggcccatgagcaagtgaggggcacggaaggaaagagcccgagagcttctggcagccggctgagcccccaacgggcctcccgcccgctgcaccttcgcagcctggctgtgcacgcgctgtacctgagacatcctggccgacttgcaagaactccagggagacagcggaggaggcgaggaccaggaagcgatcgcccagattgcactggcaagcgcctttagaggcgcggtccactcgccccaaccctgctcgggcgagcaccggaaagccaatcagaagccagctatgcgctaggggcgtgcccagcccccgccgcggcgctagccccgcccgagcccacgtgggaccgcttgcgcaaacgccgggagtagccgaaggggacgccgggaacaggtggggacaacggaagtagggtgcttagttttgctgccgggagttggtcgagagttgggttcagtcctggcccgttgtggggacggcacgcgggggaaggggaggggacggagaccgaagaacggaggtccttatgtttcttttctttccttaaatcttgcccggcctgaagaggccggaagttgcatctctggacaagtaaactctgagacctgggaatggcgggcgggacccgctcctcccttggggtctagaggagacccccggagatggtccctgatgagcagcgtgatggtggaaagctggactggtctcccgaaaggcgaagccgaggcttcttcctctgaacttttggcacgttctttgacttgcttgtggccgtagtgtcaggcctgtattgcacatttatgtctgtggtgcatttctccatctggtgcgttaaaggcagggacggtgtcttatttgtcttgatttaacaaacttggacgggacgaagtgctcagcaaatatttgttaaatgaatggctgtttattgaactcctgttgggtaacttgcactgttctagaccttggcagacagcagtgaacaaagcgggtgaatccctgcaatcttggaacttacaagtagggacagtagtttatacaataagttaaatatagagtactttaggggcttagagagttggaagtttatagttttaaatggaggagggggagtattgagggaaggtgacatttgagaaagttcctcaaggaggggagggaagattccaagcagagaacaagtgtaaaggcgtgggcaaggaaccaggggaagagtagaaagatgaggctggagagttttggcggtggcagactggctaggtgatgcagaagttggccatcacagggactttgactgtcatgctgagtgagatgggaaatcgtaaaagggtttgaaaagaggatgaggagacggaggggaacgtctttgcgagattgttacacagcctaatctccatgggaactgaaaggagcagcacaggtgtctggaagtgttttaggatc

SEQ ID NO: 8867 - DNA, 6000 bp, Homo sapiens
atcctaggcacaggtactgcaccatgcccaggacagcaggcaggcaggcaggcagagggtggaatagctaccatccgacagccagcttccccacacactgccccaccccagagtggtaggcaaaggaggaaacagcaacactcctagccaggaagccctactgtgcctgcagctccttcctcaacggctggctcatggctctgccacggcctgagcttcttggtctgactgtaccagagaatggatgtcgggccccaggggtggagcatcagggggttttggcggtgtctctggctccaagcccagctctgcattcagctgctccagctccccctgatccagcaactcaaagtcctcagtggtgagtgcctcttcttcctcaggggcaggcaggggctggggtgagtcctggggaacaggtgggagaatggaaggggagggggctgggtcacttccaacaaggcaaagtggaggtgacagggtgccgggcagagcagtgaggccaccactcactgtctcggggctcagtgtctccactggtcctccaggggagcatttcactccatctgggggggaccctgccccattgaagtgcgtgttcacaaagtggaggggggatgagagccgcaacaaggtttccttagctgccacatcctcttcctcttcctccgagtccagggcttgccttgacagagcttgaggacggcctagtaggtcttcgggaggggccagctctccctcctctccctcccctaggtcccggcttagggtctcctctggttcacttggcaggctctgctggtccaaatctgtgcagagaacaaagaattaagaatgggcctgctgctggtctgattagccacaacagacaatgagttcaaggatgagaactcaagacatggaaagctgggccaagccttaggtgttaaggtcttttaggagctgagagaattagagagtgagtgggccagagagcacagtaagtacccatggtagggaacacaaagattgtggcggggagcagggcagcaaagggctccccataccctcggagacatcagtcagctgcggagttgtggcccgggatacggagaagccaccactctccaagatagaagcctcctcatctgacagctctgagtctgtaatggccaaggccaatgctgttttcttcacatccacctggcaggagaaccaggatgaacacgacatgtgaggggataagagaaccaatttatcaggagcatcccctctcccaaaacctctggcttccacctcctttggaggtggcagctccaaagcagaaagatttttcctctggctttctatttgacacccccgctttccctggacctcaccactggggagaagccagccagctctgcctcgctttcactctctgtctctgccagtggctcatcacctcctgggggtgcattcttcccctgacgctctagaaaagcaagagtagtagagcaatgaccaagcatgaatgatgggaggggagacaaacacagctaaagaactggagaagatctcaattccagggcatctcatgaaccccaagccaaggccctcccgctctttcaccctcctggcttagggcagccccttactcctcttgtcgtgtttgtgatgcagggcattggcttctgccttcatgctgtagtccagctgcatgagcaggggctccaggcgagtgtacatcctctggatcagctcatgataaaccaccaggggccacagcaggatactcaacactatgggttaagaacgtgaactaagagctccctacgccaatttcctaagagcccccattcaactggtccctaaactgaagtgctgaaggtaggcaaggtcctttcccaaggctgtgccaacctcttcttgccacatccactgccctcctccccaggtaagtcttccacagttactaatactaaagcatccctggagatctccacaaatcagaaactgagcagagagagcatagtcttccctctgggtcagtccaaggaaagaagaaaggagagggctttaaatagggcagggacagaccctactcacagacaatgtaggaaatcataatccctggaacatagtgtcccaacacagccaacacagcacagccagagcagactcgaacgcagaactgcagagaagagcaaaagtctaagaacatcacgctgagatatgcgccccgctcggctgggtaagaaactactgctcagctggtagaaggatgggtatgtactcaaggaatggggtggtccagtttggttaagaggatgctcaagaccaccaattcaggaagctggcaatacataatgcccaccacctgtaattcacactggtctgccttggcaggagaaagtgtcaggctatcaaaagcttatttcctgaggtgagactgcctcctgcaccagggattagctgtgaatgttgcctcaagaaggcgcccaggcctcttctttcagggtctccaagcggggagtttatatcactccactcccatcccccgccacctctattccccttcagtgtagtgaactgttgtatgatgtaggggaggttacctgagctggattctgcctcttgtactgcagcagctcctgcaggtgaatctggaaggtgagccagctctcagccaggtatctgcacaactcgggcacactcagcaggtgcggccgggcgcctgaccccgcaccctcactggggagacatgacatgacccctggaggcctcagataccagcttcctagacacttaaatccctctgagaatgccaaagatatctttagtctaaaaaagcaaatgaccccacctctcaaaaggaggctgtcctggtcttagaagcaaagccaggaggacccaaccctctgccccaaaaggagcaggcacgcaaacacctacacaggagcctaggaccatgaaaaacccatggcttgttaccagttcattcacaatgctggggcactgccctgctccatggtgacactggcaccagcaagcaggacaggatgtgggcatttgtcttcaagaggtggcctgtactcacctgtcagagtgtggctcctctggggatgatgctagagagagaggaggggggcaaattattgagtggtaggggccctgggagacactccccaaggcagaaatagttgtccctcctctgcagccccagagcaccttcttcagatgccaatgggggagctgttacatgtttttgtttgcgtctgtctcctttagacattacccttctccaacataagaactagattttactcatgcttatctcccaagcaactcacatacagcctgtcacctactaagtaaattatatggataacaagaaaaacaacactgacgttctatttataaggcttatatgtgaaacactatcataagtatagcatgtgtattaactcattaatcctctcctcacctctctatgaagtaagttctatcatctgtgttttacagataaggaaattgagacaaacagaaattgagctacttttacaaggtcacagcaatggtaaatggcagaacagagaatggaacccaggtaatatggctgcagacttcaccatcttaaccactgcacctacagtagtattagtttgggaaaggggcaattctcattttagggaattccgtacaaaaaggaagtgggccatgcctgggaggcaggtggcctgctgtacgttcccctcgccacttaaccccacccagcggaatcaggcaccaagcaagtacccaatgggtgcttactgaatgaagaaacactcacctgaaacgtcagggagaaagcgaggctgccagagatccagcagaaaataggccaaaagtgagacgctgagtaggaagaagggccggagggacgaggaagacagcaaccttagggagagacaggcacctcagcagtgagtgggtgagacaggctcatgcatccatctcagaaggtggaaaggcgcctactgatggggtaatggcacctccaggcctaactcgcgactcacgactcagagatagaaaaaaatgggcaattcaagcggatgtcagcctgcaaaaactggggatgggtcatgcccccaggccaagtgataacccagaaaggggaatggtgctctcgacccctccctcccccgctcatcccggccccgccccctcctccgcggccgttaccagaagaggccgttgagcgcggccgccgtgaccaggctgtgcagcggcttctcccacaccagcaaccgctgcgccgccgccagcaccgcctcccagccgcggagccgcagccacagcgtcgtggccaggcgtcccaccgcctcggccgtggccgcctcctcctctgcctcactggtggcctcactcatgcctaggctcagacccagacccaggcccaggctcaggcccatccccggccccccacccgcgccagtgttacccccgccaccgccgctcgccatagccccgccgcagccgccgcccgagcccgcgaggagccagggctgcgcggccgccgccgggggcgcgtcaggcggaagggggcgccgcggaggacagcagaggttgcggacgagcgtcacgtgactgcggagcgctgagcccgtcacgtgacgcggcctaacccccccccccccggatagggcgggccgcgcatgcgccccggcggctgccgctgacactgcgcctacacaggttcgttttctggttgacgaagtaccccgggttccgagtccgggtctaggtccaggcagtcgagcccgttttcttatcccacagtaggcagggcggctagggagtgtggtgctgccccggtatccccgtgtggggcaggaagtgggcttccagattcccagtatccccggtagggtctgcttctgctcgctcgggaagggcggtggccgtcccattactcaaccaaccctcaacgcactggtcctcccagttccctcccctcagtgggtaaacaaacacacaccagcgcttgactcgacagactcgaaaacaacatctactcagaaaagttgtttctttcctatctccttaaactttcccacttccacatatcggagcttcttcccacctcggcctactcaagcatgagatcggaggcgggaggtgggtttcaacacaaaaccttgggtagatgcagtttacttttgggtggacgtgttgacacgttttgaggccttacattcgcttaagatcacagaatttcctcagtagccttaggtttaaaagttcaaattacagtaaaaaaaaaaaacaccctgagtttctcttccttttcatagttcacccactgctaaatttcctgtgtgtcctttcagacgcttttcatatgcattgctgagtatgtataatatctctcctaaaaagcaactgggaacaacttcctgttgtgcgtttcgtcttattcacattaacttctccattgctacgcctggcttgttcatcctcagtgcggcgtggtcccccctacgaattgtccccatttctcagaggcgcctggggcttggccacgttccgtgagaccaggagttcgagtccggttcctgcccgcgggtcggggcgggaggctgggccagatgggcggcaggaagtgccaggcgctgacttgcaggcggcacccccgcggcttgtaaacgccgggcggacgcggcacaggcggagtacgcgcctcgcagccgcatctcctttctgctccgcgaggtgagcgtcgcacggacgcttgacacctcccttcccgggcctagggcccccgcgcgccgcgccaagcccggggcggaacaggaagaggcgcccagttcagcccgggccccgccttccgccgccggggggagggagctgcgagggcgagggcgaggacggcggcccgccccggggaggcaggctggcaggtggacaggcgggcaaggacagctccgcgagccccctacaactcgtttccttccgttcaccttcgcagggcggcgactggcggcgcgatggacc

SEQ ID NO: 8868 - DNA, 6000 bp, Homo sapiens
ggccaactgccaggtcggctgctccagcagcacacacaggtctgtgtaggtgtaccagcctcgccaccgtccctgctgctcagccacactgggggaagtggagaaatgacaagagtatgcaactgtcctgcagccagcccagtggcaccctcataccactcaggacccaccaggaaacactgggaagcctgttaaacccagattcctaggctatctgctgatctagaaactaagggtgagaccaagacctatattttatttatttttatttatttattttgttaagacaggatcttgctgtctcccaggctggagtgcagtagtgcaatcatagctcactgcagactcaacatcctggactcaaatgatcctcttgtctcagcctcctgagtagctgggattatgggtgtacaccactgcatctggctagtatttttttctggtagggtcaggcatcttgctatattgcccaggctggtctcgaactcctggacccaagtaatcctccagcctcaccctcccagagtgctaggattatagacataactaccatacccacccaatacatgtattttaaataagctgcttctcaccttcccaaaggtgatgaagaagaggacagatgggtctgggaaccactatctgggcaattctctttcttgtctcctccctcccccagttacacagactctcatctctagctcctatggctgaggactcagcccccaaatccctcgagcccttcttcccaactcctagaacctaccagctctccaaccagctcagcacctcaaagatctcccgagggtcagtgtagagatgccaatcctgtgagtacggagagtggacatcaaaccagacttggatgagccacagtcatttaataataagagccatagcagcaactacaaccgcccctatggctaatgcatatttggcacttaccatgtgccagatactgtctcaaaagtttttacacattaactcattgaatcaccacctgcctggtttcacattatactctccactaagcaagaggggagaaaatgaccctgagaatggtctgtgtccacagggagctaaacatctaggggcagagaaagtatggacacaaatattcagaacccaataggataaactctgactcagagtgtaccctgtggggccctggaggaatagaggaggcgaggaaatgttctgctcttggccttactgctctacgaatctccaaaaactggttagtactgaagagataggaaaggaagacactaacacaaaggcaggaggaggacaggaagagaaatgacgaaccaacagaagactgagagagaacaaaggactaaaggacggttaaagatgggccagggaaactgagcaagagagagaacagctgctcaccatggcactcaggaagcccctctccaaggcattgagagtgggcacggccacacccccagcagctccccattcgtcgttgaagacctcctcctcctccccttcatcatagaggtacttactggccaccatctgcagaggaaccagaagtggtggagcagagctcatagcaggctcttggctctttagggagatggggagggggtgtcttaccatggagatcaggaacaagtcagaggatgacacatgctgcaagtagtctgggtttcggtgccggagccgttcaatgtacaccagagccagcatcatagcacatggggagatgcatgcctccctgggtggtagaaaggatcactaattaaacccaagggtccttcagctcttgcaagtcttatgatgctcgttcctgtctttacctcttatctttggaaaaaaactattcctggctgggcacggtggctcatgtctgtaatcccagcactttggaagaccaaggtgggtggactgacaccaggagtttgacaccagcctggccaacatggtgaaaccccgtctttactaaaaatacaaaaattagccaggggcggtggtgtgtgcctgtagtcccagctactggggaggctgaggcacaagaatcactggaacccaggaggcggaggttgcggtgagccgagattgtgccactgcactccagcctgggtgacaaagtgagactgtctcaaaaaaaaaaaaaagaaagaaagaaaagaaagaaaagacgattcccctttctctagggcccaaacactctcatcctatcctcatttccaggctcaccgggacacatgagctacatatttcttctggagtcggcgaatagggctgggggctgccttctggagcagttcgacagcaatgtctgcaagggacagaaggaaggccgagtgagcaaacaagcacccacacccaacacaccagtccccactgctagcagaagacccagatctgtattttctgaggccttggggacaggaccatagtaacaaaatagagatcaaattctcacacactgagacaaaaagcccattccaagttcgaatttcagctcattctaacaggaaagcttattgccctgtcacatcaaactatccagatttatctgtcactgctgttcatctgtggcataaacatgccttgtttacttggggaacatatgatggatatccttcgaaaattagcttttcaatatataaatcaagagtgatttgtatagatatatgtggcagcaatgttttttattcatttgggctaaaagaatgggaaatgcaaactgccctcttgaaccaagtaccaacgagctagcaatgaagagacagtgtagccacggggcaaacctcgagccattttctgcctgatgacaatcccattttcatgcttctcacttgtccagtcacacaacactgcctaacctgccaccgggctggagagctcctccaggctacagtcggcttcccagtcccagccatagtagagcctccttcggatccgggcactcagcttctggtgtcctgggaggaactgaaacagggcaggggcagcggagggtgaagggcacggaaaggtatgatgcagatcctggctctgggctggaaggcggggcaggggacaggccggcctcgctgctagggggcccgtgccttacccagacccgcgttctgtaaatcgcttgccaatggcagcctggtccatagagggaggaatgcccccacccccatcgagggttccccgggagaagttctccgagaagggccctcgtgtggccacccctacgcccattcctatactccgcggctctccctcccggcccaagcagccgcggcctcaaggaagcactgctcgagcagctgccgcccagtcccggcacagcagtcaggcgagctcgcagcgccgctcaggccgggaggggcgcgccgggaggccggggagggggcgggacccccactcaccgtgaagtcctggaagccggcgagggagaaggtgccttcttcgtccagcaggagcccggtcaggtccatcgcgccgccagtcgccgccctgcgaaggtgaacggaaggaaacgagttgtagggggctcgcggagctgtccttgcccgcctgtccacctgccagcctgcctccccggggcgggccgccgtcctcgccctcgccctcgcagctccctccccccggcggcggaaggcggggcccgggctgaactgggcgcctcttcctgttccgccccgggcttggcgcggcgcgcgggggccctaggcccgggaagggaggtgtcaagcgtccgtgcgacgctcacctcgcggagcagaaaggagatgcggctgcgaggcgcgtactccgcctgtgccgcgtccgcccggcgtttacaagccgcgggggtgccgcctgcaagtcagcgcctggcacttcctgccgcccatctggcccagcctcccgccccgacccgcgggcaggaaccggactcgaactcctggtctcacggaacgtggccaagccccaggcgcctctgagaaatggggacaattcgtaggggggaccacgccgcactgaggatgaacaagccaggcgtagcaatggagaagttaatgtgaataagacgaaacgcacaacaggaagttgttcccagttgctttttaggagagatattatacatactcagcaatgcatatgaaaagcgtctgaaaggacacacaggaaatttagcagtgggtgaactatgaaaaggaagagaaactcagggtgttttttttttttactgtaatttgaacttttaaacctaaggctactgaggaaattctgtgatcttaagcgaatgtaaggcctcaaaacgtgtcaacacgtccacccaaaagtaaactgcatctacccaaggttttgtgttgaaacccacctcccgcctccgatctcatgcttgagtaggccgaggtgggaagaagctccgatatgtggaagtgggaaagtttaaggagataggaaagaaacaacttttctgagtagatgttgttttcgagtctgtcgagtcaagcgctggtgtgtgtttgtttacccactgaggggagggaactgggaggaccagtgcgttgagggttggttgagtaatgggacggccaccgcccttcccgagcgagcagaagcagaccctaccggggatactgggaatctggaagcccacttcctgccccacacggggataccggggcagcaccacactccctagccgccctgcctactgtgggataagaaaacgggctcgactgcctggacctagacccggactcggaacccggggtacttcgtcaaccagaaaacgaacctgtgtaggcgcagtgtcagcggcagccgccggggcgcatgcgcggcccgccctatccgggggggggggggttaggccgcgtcacgtgacgggctcagcgctccgcagtcacgtgacgctcgtccgcaacctctgctgtcctccgcggcgcccccttccgcctgacgcgcccccggcggcggccgcgcagccctggctcctcgcgggctcgggcggcggctgcggcggggctatggcgagcggcggtggcgggggtaacactggcgcgggtggggggccggggatgggcctgagcctgggcctgggtctgggtctgagcctaggcatgagtgaggccaccagtgaggcagaggaggaggcggccacggccgaggcggtgggacgcctggccacgacgctgtggctgcggctccgcggctgggaggcggtgctggcggcggcgcagcggttgctggtgtgggagaagccgctgcacagcctggtcacggcggccgcgctcaacggcctcttctggtaacggccgcggaggagggggcggggccgggatgagcgggggagggaggggtcgagagcaccattcccctttctgggttatcacttggcctgggggcatgacccatccccagtttttgcaggctgacatccgcttgaattgcccatttttttctatctctgagtcgtgagtcgcgagttaggcctggaggtgccattaccccatcagtaggcgcctttccaccttctgagatggatgcatgagcctgtctcacccactcactgctgaggtgcctgtctctccctaaggttgctgtcttcctcgtccctccggcccttcttcctactcagcgtctcacttttggcctattttctgctggatctctggcagcctcgctttctccctgacgtttcaggtgagtgtttcttcattcagtaagcacccattgggtacttgcttggtgcctgattccgctgggtggggttaagtggcgaggggaacgtacagcaggccacctgcctcccaggcatggcccacttcctttttgtacggaattccctaaaatgagaattgcccctttcccaaactaatactactgtaggtgcagtggttaagatggtgaagtctgcagccatattacctgggttccattctctgttctgccatttaccattgctgtgaccttgtaaaagtagctcaatttctgtttgtctcaatttccttatctgtaaaacacagatgatagaacttacttcatagagaggtg

SEQ ID NO: 8869 - DNA, 6000 bp, Homo sapiens
caatggcagtcaagttcaggcagaaaaaataggaagacagggcaatctgttttatttcaggtggattacaaaatctgtttgcaacaagacagcctaaaattctccattttcatgattattttcttgcttagtcttagttctgaaatatgtccttgatagcagactctatgaatctttaatttaaaatccttcattctttattcaatggaccggtgtggagcccacgccaggttctagcattacaatttttgcctagtaaaaactcctaatctttcacccccattgtttttaatcaatggactcagccataaactatcaagcctgtgaaggtaggatgatttgtttaattttaaaaggatttgagagttatttcagtttggcagaagtcagttacatgttgtactgttttctttccaaagctgattcattctgactggttatttagggggagtaggagaatgtggccgttgacctagtaagatggaggcagtaatgacaagtattacaaatttgagaataaatgaagtgatgcttttttcagaccttataatccagactactcaatccccaaagattcttcaagattacagacacataaacttttcatatttagcaccattaatacacaggcttagggttttttggacacaagttcacatgactgtctctcagtgtgcaaaagaacagcagctgatttaagagtgagagcaaggtacagagccttcctgcagttcatgcaggtacaattagaaatgtcttctctctcatatctttatttattctttttttttcatctggaagcaggacaattgctcttaaattaaccttgtcaggacttcatggccatcacagtaataggcataaattctaatttggtccccggatcatatttcctgttggtattttagttttaaataggcatctaagtctgtgcctccaccagtctcctaattttgaaacccctttctgcccttttggtttctagttcttccatgacagagttatccaaagggagtataggatttctccaacaaagcgtaattcacttcataggccacagcggaaatctgaccccctcaccacaatcaacaagaatcaagccattaggactctcagaaagttgctaatcactccttttttaccctttggatcagagagcaactcaggacttacccctccttccagagggcttgctatccacccaagttctccctgaacagatctggaatccaataaggtaactgcaaaaaacaaaagaaaaatagatgaatttccaattgcaaaaagccaataacacaaaaaccatttgcctgagcgtttccatatgtgctgaggctgtgcatatccaacactgatcaaaacctaaacttgggctcacttatgtaaataatcattactcatttgatcttctccccctctttaaatctgcaggttcttatttattcaacttgcttaacatttaaaattccatcctaggactcacttgattcatttttctaaaaaggatgaatagagaatctgaagtacaattcaaaaagataaatacatctatgtagagcagttacactccagagcaaaatctgcattcatctctgtctggtatctactagaattatttgtttttgcaagtttcagatgaccacataactcatcagggtgacagagccacaagtgaattctctcttctatcagagagtatcctatccaaagggtcaggaaaaggctctccctaacattttcccttccacaaccaagtaaatagtccctgaatatggtatccgctgcttttttaaatatcaaagtttcagaaagagggaatgccagacgtgcagaatcagaatgcaaacgtaccgaaagtattctctctttctcaagatgtgttgggggacaatcagagactcgtcttccacccgtaggaaatcactggcttgaattttaggtatggagtgctgcctaacggctttagtgtgcttgtgctacacctgagtgcgtcaaagcttggggggaagggaggacagcccaccgagctgcggtaccccgctcaggctagaagagcgctaggtaaggggaacatccaaagggacgcaatgaattcaaaacctctctttcccaccgagatctgcagtcctgggggtcgaaaggcccacctcaaaggaaccactgggttattaatttgatcagccaggctggctcttcaggctgggggaggggtgggaatgggaagccgccatccgtgctcatgcgcaccccaacactcaagcttacccccagacccctggattctgcccactttccctctcatttcacctcaaagtcaatggagttaaaaatcagtctctttcccctacttttcccggggagtctgaattcctggggtctgttaatgattttaaaatgtagagccttccctgggtcgctcccgcctggagttcccgcccccttccctcctctcctctccccaccgccaacccccaccgcaaccattctcttctctctgtccctagagaaaagcccgctacatccatttggatttatgtaaggtggattagggacacaaaggaaacaataagacccaatttacaaaaaaaggagggagtagaaagggagggtaaaagagagaaaaggaaacgtgatgggaatagaaagcaacaaagtgaattaatttttaagggggaggtgggggaggggaggggaacagacctccctccctccccttcaacattagcctagggctctcagagcctttttgtcttgggctcccaagtttttctcccccccccccaaaaaaagagggggtttaaaaaaaagaaagaaaacagtctctacatctggggcgagagaggtctcaggggacgtcctaacaagtgtgtgaagtggccaggagaacgcgggatccacgattcctctcaggggaatgaataaccctagggaccgaggggcggcgacggccgagatggcaccagaaccaccagaagccacgtcggaaggagatgggagatccagagggcgagagagggcccctttcctcccaagcgatgtctgtgggcaggtgtataaatctctcagagcctccgtctggagggctccgggtaccggctgcccagccaaggctaagttggtttttggctccctccttcggaacagagaaaacgatagattacacagggatggatggacggatgtctggagagatggaaagatgaatggatggatggatgggtggatggatggatagatgaatgggtggatggatggagggatggatggacggacggacggacagatatatggatggatgcattatggatggatgcatggacggacggacggatgcacggagagatggatggatgcatggatggatagatagacggatggacggacggatagatagatggatgccggaaaggagaagaatgagagacggatgtgagactagatgcacgcaggccagagcaccagcatacgctggaacagagcacgagcatacactcgaacacacgcgcacacactcaggacatctgcgcacagacatacaatcctccgcgtccgcttccacgcaggcattcgcgcacctacatacacgcagttgcacgcgcgcgcacacacacaggcacacacacgcagacatgcacacacacgcagacatgcacacacaccacacatgcagacatgcacacacacgcagacatgcacacacacaccacacatacacacacacacacacacagttcgcctctccctgggtttctcagaaactaaatgatcaccgcccccccgccccgccccacctcccgacacagacacacaggcacatacaatcctcccagcacgtccgaacggatgcacagaaaactgagcacccagacgggtcccgtcgaccccgcacgttagctctaaactgtgtgcaattctggggcgaaaagctaaaactcgactgcgttcaacttgccggcgggttccccaagtctgcggggcgaagagctcgggcccctcaggcccgcaatcgcaccctcggggcgctgggcttggcgaggagaaaggtgtctgactccgggtgctagaaatcaggtcactggcgcctgacgagcggcgccacgaccgctgcgctgcggagcaggccccgcagcccggtcccgagaagcgcagggctcgggaaactttgcagaaaccagagctcgaaaggctttcgctagaatccgggagcaccaagccttcactgtgctccaggctgcgttttcccctcgccccgggctggctcaggagaggacgtggttcttgtaattttttttttaaatcccggcgttgtctcccgtgcatcccctcagggcgcctcgagcgggcctctctggcggatgctgataaactttggcctttggttacaaacttggacagacccgccgcgtgcacgggtcaccgcctcggggcaggctgtccggcggttccccgctgccccttcgccgatcccctcgcctcagcccccttctcccgaatcgggacgcaccattcacactgggctccccccgcaccacctggccctgcgctcctgaggacccctcacccgcgatggcccctcgctgtccccgaccacagaaaggccgtcccgctcttaccttcattcgcggggtataccctggaacctgtgacagcgtcgcaaatcccgaagagacacgaaaatagggcgaaatagaaaatcccagccatggttcgccggtgccaacgctgctcctgccgcttctatcccagtggaataaatgcttaagttaggagagcagcgggctgaagacattgccaagggggcgggcccggccggtgacgtgagcccgccagtccggggcccgcggccaatggcggcgcagacagggcggccgagccccgccttcaccgagcagggcccgccccagggttccgccccctccgggctccacggggcgcgcggtctcccggggctctagggggcgagcacggccggtccccgcccccgcctgccggagggagccagcgggatcccccacgttacctcgaaggtcgagcccctggacggcggagggactttggaaaagctcggaattgaccgaggggagccagagaagaggttggaaaccttttctcccaccacgggcggtttaagatggaggaaaacgctcttttattgaaataaaagaagtctaagctgacctgcggttgcttctttaggagagtcgacgtgtctgcgtccagcgcgcccgggctgagctgcagactcgcgcctgccaccgccaccctctgccaccttgccctgttttgtctttatggcgcttccccctctgaaatactctttgcggggagttttgtggctctatcactcgcttcttccctggctccccagatgcctggagagcggggacctacttggtccccaacgtccagtccgcagcagggctccgtcactgtctccagagactgaacgaatgactttctagcagtaaggaagtccccgctggccccgtccccctgcacacgccgtggacctcgcccagggcccaggacgccccgagatggccttgggcagggaaccagttgtggatttcccgggggcagggttgggggcagtccctggaaccgggcctagcccgtctgggagcggtggggtagaagtgaaaggcttaagtgtgggtgcggggacttgcagccgcacagacaaggcagaccgggactgggaagctgcccggagcggctgctgcgactctccgctccgacctagccggggcagccctccctgccccgggagaagacggcgagcaggaggacccgcagagccccgcccggctgctccggccccgggggcactggcaccatcgggctgtggtcttttcccgatgcccgagccgtggacgcggccacctaagagcggtccggcgaaggcagcgcagccggtgtcccagggaccggtccccaacgccactcggtgcatttccccaggcgctggcaggggcactgattcctagcaatgaggcctcc

SEQ ID NO: 8870 - DNA, 6000 bp, Homo sapiens
caggagttcgagaccttcctgaccaacatggtgaaaccccgtttctactaaaaatacaaacattagctgggcatggtggcacgcacctgtaatcccagctacttgggaggctgaggcaggagaattgcttgaacctgggaggcagaagttgcagtgagctgagatcatgccattgcactctagcctgggcaacaagagcaaaactccgtctcaaaaaaaaaaaaaaaaaaagctgataaactagcctgcaccctcctcccactgcaatgtctagttaactttgtaatcccacaggttttctttttgctccattgagaaagccacttttaatattttaaagttgctctctgtaccacccccaccttccccccatgcctcctaaggaatcaaagttcaaaccagactctgagtgggggatgggtgagattatcagaccaagttagttctttagattgcttagaggcccagaagggtttcaagccctttgaaggggtatttgggtggcacctggcatcctttgtttctggcaacagagtgcactcagcactcctggggggcaagggcttcctcccatccttggcttatggaaagccatcccagatcaggccccccaactctccagaacaggctacaaacatgcaaattagaattcttttaatataaaaaaaagtactaaaatacccacgtggttctgctgtgttatttgccctaaaggaagtgaggggcagagtgaagaatcccagtgcagctcagtgggcccagaaatgggcctttccgtaggctaaggcgtgcccactccacctccaccagacttctatcccctctgctgttcccagcccccaattcctgcagcaggaaaccccagtggtctggctttggcactgggagtagaaggcacctgaagggctggctgggtgagtgaggacaggtgacctttaaaaacaaaacgacaccgtggggtggggaagcaggtcatgcagctgtggcagctggcagggcccactcctccatggcacaggtgggcatgggatggccacttctccagaagtgaggaagcccagatcccaacagaatactttctcaaaattgtttttggtacgaaataaatggaaagaagatatggggtggggtgctgtggaggccgggccagccaccctccccagaccttagatcatagcgatgctctcgggggcacagttgaggtgggtggaggtgctgctgctcccggaggacttgcaggcccggccaggggtaggctgcagtgcagccaccagtgtgtctgaggagactgccccaaactcgtagctgaaggtgccatagaaaatgaggatatcgatgacacacacccactcacacagggctgccccatgttgcagctgagaactctcatggacaaagaagactccacctaaaacgaggctaaggaaatgttcagtaggacatacggaaacctggcaacaccccttctgcagtctcaggcctcacctctccaaagggagaggtgttagtcctctcccccacatggcagtgttaggcctccaccccccatcctcttgggagggagaaaggttgagctagaggatgagttcctggctgccccgtcctgaaaggatactgaggaccagggtgataaaggcgatgacagccagcacacttcgcagataggccacagccaggtccagcggggcggtggccccttggtaggagagagcacagtgcaggcaaacaaagagcagccccgcagggaaggccacgccagctccaacgtagtgcagagacctggcatgatccacctgggcccagagaagggccagttggtgatgtggccatggccccacctctccacccctccttcaatgaatctcctctctccctcttccttcctctccctctttccagccccaaccttgaggtgccacactgcaggcagccaggccttgttaggtaaagtttaaggtttgcaggggagaaggggaagcacctgaaagttgccaaccaccaagaggcccgcagcgttggtgcagcctgtgatgagtgccgtggtgttaacccaagagtgccgactctgctccaggagctgcccgtagcgcaggaggcagatcagggccactgggggaggagagcacagttgaggccttcctccagccctggccctgcccagcgagcctgtcagcttcccccagacgctgtggtgctcctgccccttctgaggggcagaaaggaacagacaggcgggtggtgaactaggtttcctcaggctccagccagcagggtggctgtgtgggagtcagcttttggccttcaaggaaggggagaagctgcctctattgccttagcccttggtggggagggctgcacagaagggcttcctgggcctttctgtgtggggatcactgggctgggcacgcagggtcagggctaagggtacaactcacccatgaaagcacccatgttgccaatgaggctgaagaggcagctttctgggggataggagccacacttgctgcgaggagggggaaggacagagtaagaggggtgcaggaggcccggggggcccccattttggctcactggctctcccctgctttacctgcacctgctccttagcaggcaggccactgatttatgtgaagatccagggtccctcatgaacaactggttccaggctgggcccccaaagcagagctcatgtgtgtgagagagaagggagtgcccaggagtgttcgggcaaccctgacactctttgctgagccctgcggctggtttggctatccttgagccagaacacgggctgggcaatctgagggctccagcttaaatccaggtgcctccgcttattagctgtgtgacctggatgaggaagactgagcctgtttcctcacctataaaatggtgaaaacaatacctgcctcactcctgggaggatgaaaagagacaatgcatataaagcactcagcagagtgcctgccccacagtaactgtcaagtagtgttgttattaagtggctcttaggatacttattgttcctgagacccaaggacagctctttgcttgaggggctgtctgggaggcccttagatctccctgaccggcccaatgtccaggccttacctgatgagggggacatcgtccagggtgcagcaggtcttgggacccccttgctcagcagggtcaggagggcaggactcgttgtaggacctggcaggcaggacagggagtagactgggggaagggactgcccccaggcccttggcctatagcctcaggcctcaaagaggactctctcccagacctcccctacagggacagaagatcccactccccagtgcccgcctgaagcagtaaccaaaggggcaaagggatagtgggaagtgggtaggtggcaagaagccatgcctggggaccaatttcagagaagagcagtgaggctcagggttgcagtctggctcgtggcagcctcaggcccaagaggggacagagatgaaggaagctttagagcaaggttgtctgcagagtccttcataccagttctccacagggcatacatggtggttcatcacagccatggcatacctgtgggaacagaactgtcaccctggcagccttcccgagccccactcaacccaccccatgacccttctcttcaaccttgatttctggccccattcagcctcattattgttgctggggactcaagttgaggtccctaaggcttgatgccacaccagcacctgcagcatgcccccagctacaggccctctggaaattgccctggctagaagtatatttgtcagggccaccctgctggacagcagtggtgccagcttgtcccaaggggctgtgtgcccaggcaccaagtcaggcttttgagacacccagagtgaccctgggtaccaccgtggctatgacaggacaagagactttgtgtgcgtcatcaagctcctgttgccccccgggcacccccctttactcacacagtccatatgccagtgatggagaacgctgacaggctgacaggcaggaggatccaggcggtcatgagggaggggagccagggtggtggtggtgttggggggaggacaagaggtagatggggaagtgggggcggaccagctaccttgagatgtttctgccacaaccatcagctgtcctggcctggtggagagagatcaaagtccaggagtgggtaactggccgggaagggggaggggaagggggtcaacaccttatccagcgctcccgttgggtctctgagcgtccaaagtttgggctgagcccacggcagaacgtgaacaccctctggcactgggggcctccgcggtcaacccaaatgccaccggcgtgctgagagacgcaggcggaccgtaacatctggaagggagttaccctccttctgagggaccagggctgggagaagggctggacaaccgaagaggccacgccaaggagaggctgggtgccggcccagtggagcggtggcgagtcggcggcgcgcaggcaaccacctgaccatcggcgccctgggcgaggggcgggttcacgcggaaagcccagcccggcccggcccccgctcgcctgggcgcggggaccccggctggggccggaccctgcggccggcgaccccccaggacccgggacgcgagagtccccaggtgattcctggaagcccggaggaagggaaggagcccagtacgcacctccccggagcgccccgccgccgccgcaccctgctcggccccctcgtggcgccgactctagctgcggccctcggagcagccctgaaaggtttaaagggccgagcggccccgcccctggaggccccaggcctcgccgcgccgcccgccgggacgtggagtccgcgcagccccggcctcggtgcccgcgccctgcccgagactacaactcccgagcccccgcgcccgcgtcacgggggaaacgtgggcggtgtcccaacttcggaggacctgggcgcggagggctgtggcgtgaagaccgctctaaaaccgagatgactagaggttccgtttaaccgattcctgccggggaagcgtcagcaggtggggatctcggggcagcctgcattccagctctacctgggattgtcgccgtgcacatggctggaggagcgtctctccgccactgcgcacattttgcagcctgcaccggccaacggtgagtcctctaggaagctctctcaacgtggcgccccatgcctgcctctggccagggctgcggtgggtccagagaagcagacacaaagacttggctgtttcttaagaaatccaagcgcctgggatttggcttatggttcctgtggctcagcaaactccggaggagggctgctttcattagatactttttgctttcctgcatacaagtacacaatgtactagccagaaatcagtgtccaagacgtgtttcccgactgatcaacacttatttgaaataagacggcagagaccagaggacatccattctaaatagacacatgtaggtgtcagtgtagagtaggtaaggattaacatggccagtgttggtaagcaaagaggggaaggtgagagacccggaggaatctgggaaaaggaaacaggatagtgtgggaaaaattactgaccagcttcaccaaaaacttacaggctatgagtgcattcctggatgtttcttttttttttactttttctttttcttttttttttttttgagacggagtctcgctctgtcgcccaggctggagtgcagtggcgcgatctcggctcactgtaagctccgcctcacgggttcacgccattctcctgcctcagcctcccgagtagctgggaactacaggcgcccgccacctcacccggctaatttttttgtatttttagtagagacggggtttcaccatgttagccaggatggtctcgatctcctgacctcgtgatccgcccgcctcggcctcccaaagtgctgggattacaggcgtgggccactgcgcctggcccggatgtttcttaaatt

SEQ ID NO: 8871 - DNA, 6000 bp, Homo sapiens
ggatagtgttgcttgaattgaaaaatcatccaaggcatggatgaacagaattttgaccaaggagtccagcaggtggccagacttctcatccacaagctccagagggcctggggtttacactgctccatatcagtcagccaggcagggtcgagaagaaagattgagagatgagagggcagccgttcctcctccagaagctgcccagagcccaggcccagtacccaccgtaagtggggaagatgtagctgagtactgcctggagctcagaggaggcccccagctgctgcaggacctcagccaggctctgggtggatgcttgaaggaatggagagaaacgagtcagcagcccacacctgtcgaggagctgaaccacgggcaatgggaggaatttcaacaggatggcatgaggggctccactggataccacctgggggagtgaatgaggacagcaggcctcacctctagaaccgctttgacagaactgctatccccatagcctggaccagcccaagaatccagcaacacttacccctgactgaactttgctgaatttgaatatttttaaaaaatctatactctgtgaatttttcccatcctacactcggatgagtcctttttttgcttttaattttcctgctcaaattccttttcaaaaatcccaatctggtctcggatgcagtaaaaaggagtagtgatctgatgtcatggaagccagcctagtcagggaggagagcagggcatccccagaggccagggtgacagcagcagccgtggagccaaggctccagagagagagagacagagaactggatggacttgggtggaggctgagctaagaacagatgtgactcttcctcccttcctgcctcccgcactgcactctccacccccagtgcctccactaataataaagaaacccagccttatcgagaacaaactctgggtcctcagcatgtccatgttaccttaaccagctttatatacttgtcaatgatagcttcctcctgtggaaacttctccttgaggccctgaatgtaggctttctctccactgtacatggggtactcctttcggccattgggcccttccagtaccatgatgtcaaaaggagaggacaggggagcccagtccagctgcccttcagtgatctggtccaagataaaacggccaatgctgccctcttccatacgcccaatgtaatggattcctgttgggagatggaaaaacaaggtagtaaagggatatggggattgagccctggaaaggtggctgaggaagtgaggtggaagagtttatctggcctggccaagttcacgcccagagtgagctgctcactctgtctgtagggaggtgtcacagcagaaaccgccagatcgctgcccgattcaactcccagtagctatgctgtcacataagaaaactgcccagaggctgggcacggtggctcacacccataatcccaacactttgggaggcagagggaggtggatcacttgaggtcaggagttcgagaccagcctggacaacatggagaaaccccatctctactaaaatacaaaaaaattagcggggtgtggtggcccacttggtgggattactgagtgtaatcccagccactcgggagactgaggcatgagaatcacgaactcaggaggcagaggttacagtaagctgggatcacaccactgcgctccagcctgggtgatgaagtgagactctgtctgaaacaaacaaagaaaaaaagtacccagagagaagatggcacttccaaaacaacagaaatgctcagtatcaccccacaagggctgctccaagcctcttcaacatacagccatgctcccaacccttttccacacaagccttacctgtgtcaaattcaaggccattctttccaaaggtatgacagcagccccctgccttggtatgttgttccagcaccaggactcgcttgccagctttagctagaattgcagctgcagccaggcccccaaagccactgccaattaccaccacatccagcttctccggcacttggttggctgaaaaagctacagcagaagggccaaagggtgggtttctcaggcaggggcagggaaatagcaaagatagggaaaccaaagaagacttctctagcttgtacagtgcaagaaacctctagagtggtttggcacagaactcttgactaacatgtttcaaacattttacctgggaatactcagaaccagccaggcagatttggggttttgcttatttgttttttgagacaaggtctcactatggcccaggatgaagtgcagtgatgtgatcacagctcactgcagccttgaactcctggcctcaagcaatcctcctgcctctggttcccgagtagctgggactacaggtgcatgccaccatgccgggccattttatttttatttttatttttatgtgtttaattattttttaagacggagtctcactctgtcacccaggctggagtgcagtggcgcaatctccgcttactgcaagctccgcctcctgggttcacatcattctcctgcttcagcctcccgagtagctgggactacaggtgcccaccaccacgcccggctaatttttttttttaatattttttagtagagatggggtttcaccatgttagccaggatggtctcgatctcctgacctcgtgatccgcctgcctcggcctcccaaagtgctgggattacatgcatgagccaccgcgccccgcctattttatgttttatagagccaaagtcttgctatgttgcccaggctgatcttgaactcctggcctcaagtgatccacccacctcggcctcccaaattgctgggattacaggcatgagccaacacaccagcccacaagccgggtttctttggaagatgcagggtctgcaagcaatagtggaatagctgggtcttatggtggctcttccaggtcctgatgaaaaggcttgggcaggacagaactgctcagaggctgcagctctgagaaatcacagcaccagcccctcccatagggaaggtctgggggcagtgctgagggaggcagcaccttctcagaagacaaaactggatagcaagtggtgctatatgggtacttccgacacaagatctgttctttaacaatcactggcaaagaactgagatctgggatgtttcaagatacaagagaacttggcaaactgcttatttttttaatgtttttagagagatcaatagtaaaaaaaaatttcacatgtaagtatataagataaatacatgaaacaagtgtcacaatgcaatacttagtggaactatgtataatgcactctgatattttctattctactgcattctaaaatactagttgtggccaggcgtgatggctcacgcctgtaatcccaacactttgggaggccgaggtgggcggatcgcttgaggccaggagttcgagagccttgacaacatggtgaaaccctgtctctactaaaaatacaaaaattagctgggcatgcccactactcgggaggctgaggcaggataatcacttgaacccaggaggcggaagttgcggtgagcggagatcgcgccactgcactctagcatggacaatagagcgagactctgtttcaataaataaataaataatgccagttgcaactcactaaattgatttcatagcccactaatagatcacaatccggtttgaaaagcagttaagctagtcatctcatttttagaccagcccaggtaggtgctaatggttatgcagcaaattagtgacagagtccaagctaaaactcagttctcagaagtccagatgattagtccttccacttagaacagtactgtctccgattgtgtagcaagatatgacacggagaattctaaaatttacaagtgagagggactccgtagatcaaacaggtgatccattattttttaaagcagcagaactctttaaactctagaagcaaccacaaaatatgttttaaagatgagagtggagagcaggctctgagcctgaggcgccttgttgaacctctgccaatgtttcagaactagggttcaatccttacgatttgggaccatgcaaagcctgttaaatcaccggacgggcaaaacgcaatttcctacgcatttctgtgctgctcccccacacccctgagctcgcatgggagggtaggtgaaaaagttaaggtcctggaaccaagtggaggaatgagtcacggggattatcagttccacgagccacggggattacaagtggcagggcgggtgccaacaccttgcaaaccaaggacaatgaccacacccttgggactactattcccggggcctactagggcaaaggctatcgacagtgttgcacactaaagcggggctcctccacgtgcaaggaagccctcctagtactttacatatggggaaactaaggcccacgtctggtagcggctgccttggcaaaatgagaacccaaatctgtgagaaagcctcgagtgcagccccggaccccagggtccctcctgctaccttgtttgagaaccttcttcctggcctccttgtcagttaccaggggcgctgggggccgtttgacatcttcggagaaaggattcggggagctgccagagaatagtcccaagtaaactttgcagaggacggccagcagcagcacagccaggagcagcaccagcggaagccacatcacgccggcgtcgggtcgggtaaatgggacagctccgactgcgctcagcctctaggactgtggctccgcccgggctagttcgctctccagtcaggaggcggaggcagctttgagcactgattaaccagccagccagcgaagagccaactctcaggtgatgattgaccctcccggctctccgtacttcttttgggtttccattgcctactgggaaatgtagttctcggggccaggggagccggcacggaagcggctgtgcgcatgagcagatgaggcctagccgaggcggcgggacccccaagtttggaaagctcttttaacggtgagaacgcgttaacacttgccaaggggagtggttggtgcctgtgcggagctagcagccggcctgaggagggagggagaatgtgatccggtggaaattatcactatggggcgagacaaggccgagagttgtaagactgaaagagaatcccgactgggagacaggagtcctgagttctggtcctggctctgccctggactcgctgccttgaggtgttaaattgctttcctcgtcttacgcctccaggctatgcgaaagttctgtccaaaggctgctcacagcccctgtctgactggttgtcatgatgaattgagctctctgttacctgcgcatcacaaccggtgagcgtctgtctctgtgcccctcaaagtggcccatagttttgtcctgggggcccgcctgggacggagtcctctatggcgggtccctaatgacaccccatccgtggggaacctgggggacggggagccgcccatggacaagcatggtgaaaggatcagctaagggcccatctaatttaaattcctatgcagagaatctaacctccagcaagcagttgaagaatcataccccctccttgcctaaagagggtgcataatgaatacttgattggagaaggatccatttttacaggaaggccgtttccttaggtccaactatcaggaatttgcctttgagtacttccttgtttaatggaattgttgctcttttcttctctgctacagatagtaactgtccctactgaaggccccaggagtgctccagccaggtgtggaaagctggtcacgattctatgctacttggttcattttctacacagcaacagaagagccctcctgagattgctattaccatacccgcctgtcaccttgccaaggctggccaatgtgtgttttgtcataggctgtcatggaggccatgatggaggaaaaggaaaggggaggcagatgttgaggccccagaggccacagtgagagcagtttag

SEQ ID NO: 8872 - DNA, 6000 bp, Homo sapiens
caagccccaaggactcacccagcctgcatggggggcagccactcacccacaagaaggccagcatggcccttagctgggtcatagggacacttgcccttcccatcttcaaactctccatgctccaaagtgaaggtgagcatgttctaaggacagagagagaggtgatgaggagatgcttaagggcagggctctgtgggccacatccacgagtccagagaagggtgaggagggcggggggctggggacaccgaggtaggagggcagcactcacgacgtaggtgcacttgggctggaaggcgtaggtgccacagacgtacaggtgggaggcattgtagggctgcaggaagcggatgaagttgaagcactcggtctgggggcagaaaggtgtccggttagtgagagcgcgagggccagaatgggaggagacgtcctggggtgaaggcagcaccaggagcagcgtccaagcacccacctggttgttcttccctttctggatacactcagtcttcttctccacgggggcctcccaggagatctggggaaagggaaggggatgtcagccacgttacaggtacggactgagcacgtgtcacaagcacagcctgcagcagcaacacagggacgcccagtgcagaggcatggtccctattctctggggacttcctttagtacagaatggaagccccaaaccaccccactacacagaattcagtaagtgccagagaggagaggaatgccgcatgctgaccccaaccagagggcaggccccggatgcccagcagcacttctgtgggggcagccaggctgagggaccacctagccaagcacagcccctctgggccttgccctctggcaggcccgactgcctcccactgccccacctctcaccgctccttgcagctccagggcctccatgctgaaggcaaacagggcctctcgggcgcccacgtacagaagcccagtgggctccgtcagcgtcagtgtcaggaagtcctggatgccggtctgggagaaccgccgtactaccgtggccagctctgcaggggtaagcatggctgctgatgggcaggacccctggggctcgacagccctcagtcttgctccacgagagccagcaccccatgccacaagcagatgccagccaaaccccctgattggcaataaaggacacttttgaaacagcctttggccctgacagccccacctgggcctccctagcctttcccagcctgggaggaggcaaatccaggctgctgggaggaaggaaggatatctcagccacagcttccggccagaggaagccatcagactgatggctcttgctctcagggtcaatggcacctccggccgcagggctgggcacccccaccccaccttcgcttcctcggcggctgcttccttctttgccctgctgcccactgcctctatcagagtccagcagagcaggaggcacagacggctatgagtactccctgcctcaggaaacccttcactccagcaggaccccaatccaggctgccagagatgcgagcacagcaggccactaggacaggtggggatggcaggaggggagctgggctgtgagccaggccagggaggtccggagaaaccagaggctcagagagcggagatggggctggggcctgggaagtcttgctgccacccggcatgcagggcactacgacatttatacagtcacgtgattcctacatcagctgccaaatatggctgccgacctgtcctcagggtccccccaaaccagccttagtctttgcaggcaacaatggatccagacacagaccggcatggcagggcttcactggcacccgagtggagcctgtgggaggtgagctcatcccaggtccccagagcgcacggctgatacaaacacctgacatcacctttcacacgggtgtgtgcacagggagcactgctgggtccccgctgtgccccggcaaccatgcgagcatgtgcacatacacacacacttccagggccaccagagtgtatgatgtgtacagggcagtaggaggtcttaggggggcctggggagccaggggagagagcctccagtttatatttatcccggttccagtttctctttaggctcccagcgccagtgacaattcaagaagcgaggcgtggagagggcgaggcagaaggctctccccctcccacacctgggcaggcagtctggggtggggagttggacagagctcccccagaggaggctaatcccaggtcccaacccacactgcccgttcttccaactcgagtttcttagaaagctgtgccacacacgtgagaataaagccagcacactatgggggcaactcctcagcagcctgtccctgacttcctcctcacccctccaggcactcacccccagaagacactgtcttacgcggcacaaggttccaccacacctcagccccaatgcccaggccccacagccttgctgccagcagccagacagcccagtgtggggccatggcgcacgccccggctctgagcttcaggccagctgtcctgctgagggaaaagacatggtcagaaatcacagccagagaaagcaaaccagaggggcccgcagcaggagaggccacaggactcctcatcaggccttccaggagccccggtgccctccttccccttctctttggaggtggacctaagtccccacacttggcctctgcctaaaagaccacaggtctccctgggaagcggggaggagttgagttggctgaaggctaaacaggctccgggaagccctccctggcctccagacccaccactacctctgcgcaacaggaaatcatttgagaaataaaaaggggacccccgcccaacatacacactcaggcctaagaggtttgagtttcttgaaagaacctcaggcagcaggccttgcagccactggggctccggaccctgccaacacctaattctgggaggaagactccttagggcgacgagggcatgcggtggggtaggcggtcgggaaagccccaaaggggaaacctggtgcggccggctgcgagcggaggtcccggtcccggcctgtccccttccccagcgcagacaatagccctgcagaaccccaaaccccgttccacatcagcagggcaggagtgtgagaagggccgggagcgaaggggcccagcttcccgaggcccctttgttgcccaagagggaggcaggaagtgggtgggatgggcgtggaaatgaccagggcctcatcctgttcctcgcactgcctcctccgaaacaccagccctctggcggaggggcggtggggggaccgagctcgggtcgagtcggggactccggcggcgcgcgcaggcgacggggggaggtaggggcggggacgcgagggggttcctcccgggccgctggcaacgcgccgcgcacggccggcacccgctgcgctcccgcgactctgacgaaccttcccaactcggggactgcgccccagggaccctggcctgggcgggccagcgggattggcttcccctgctccagccttcccgtgccaggggcggagacgcagaagctggggacctgctcacccccaaacaaagggtccccgccaagaccccgtcccgggtccccccgggttctcccctcccccagctccagggatttgaacgcaaacaaagcggcggcgcggggagcgtggcgagcccggcctgcggacgccccctgtcggcccagagccccggcgcgggagagcgggggctgcgccccagaccagccccccaaaacgcccgcggcctcatctcggctccttacccgaggatcgggccgcaccccgtggcgtgctccgaggatccgcccggcagcggtgctcccacccgcagctccccccagggcgaggaaacgggcagccgggaggaggggttggggggaggggtgcgggatccaggcggggcaccccacaccctcgcccaccccgagcggccagccgtggaccgcggccctccctgcagggcgagcgctccagccggggacggcgcggcccggctcggcccgggggcctggctttccgggacaacccgcctccccagcggaatgggcgggcgggcggggggccgcggcagggaaatccgatcccacaacatcggcctccctccaagcccgccccaaactttccatcgggggtgggagcgccgagggcagtccaggagcctggcgaggatcccggccgcggaccggaccgcgcgaggaaccctcgctggcgcgcccctccggccccggggctgcggggctgcaggtgctgtgcgccccactcccgagaccctgcgaagcagccgcgggggtcgcaggaaggatccccgcgtacagccgtctccgccgccgcggctccccgcgccccagcccctgtccctcccgcgtccggcagcccctgcccaagcaaagggacaaagcggcggctccggggccccgcggctccagcctcacgcaagcccggcctcgctcacctattgcgcgcagctccagtccccgggcgccgccctcgcgttcggctctgaccgccgtccacccctgcccccgcgtcgccgcctgcccgcgctcgcccgccagccctccgcggcctctctgccaccgcccctccgtccccgcccggctccgcgcccctaggctcgggctccccgcgccaccacggcgggcgccggctctttctccagcgcggccgcggctctccgcccccttccccttgacgtcaggctgggggggtcgagcggaggccgggggcgggccgcgaaggctcgctcaggagggggctgcgacccgcagcgacctgtggacccgcccgctctccgcccgggggctcggacctccgcctctctgggtgcccggacctcaacccctccgggtgtccagcagccccggggctcggagtcgcgggctgcgccacagcgcctggagggaggtggggcgggggagggactccgggtatggccacgggggaatcacactcacccgatctttctgaagtgtcccccgaagactccgggcgggctgggctggggagagggactcccgaccgtgcagttgcaggaacgaccgcgggcgagccacgtcgaggcgagtatccaggggaggcacgctgggggaaccgaggcgtcttttggggcggaccagaggggtctgccgtttggcccccaattctgcctctttctaggccccgaggaccactggtccctgccctcaagtctggaaagggcttcaccagccaggaagacccttcaatcaacagaaagggcctgctcctgcttctcacgctttgggcaaagcgcctatccccagaaaatgactcctcgtgccactggaaggctgattaacaagtggcatgagccctactgttcagatgaaaggggctgtggggagccacgctgcagaaccaccgccaccttcagaaccaccagcctccgcccacagccactcctagaagcaacttgtagctctggcctcatgggcggtgcagcgtctttcctgccagctggtcctctgagctgggcaggtggttagaagaggtggtcctcatggaggacaccccacgggcacctggagacagatgctacctcctggctaggggcaaaaggcagaggtgaaggggcttgacgtcctgaggtttggaggtaactttaagccagggtgcagtcctggaggggaggaacacttcaggctgcgtcagcagatctggattataaatcagtccgacagcagcttttgttctgggttaaaacttggcatctgaaaagtggagaccagaaaagtggtggagataattgagaaaagcagcccagtttggtttcagtaacaatcgggtctttgctggtacacataatggccccttctcccttgctggccaaagccacgtttcccagctcttttccactaggaaaaagaaaaaaagctgtggccttggagatgctggagataatgaccatggggtgggcagggaaggcctcctgcttcagctgacaaggtgggaga

SEQ ID NO: 8873 - DNA, 6000 bp, Homo sapiens
caaggacaacagcaattccatgggcaatctttaggggtgatggaaaatgaattttgatgattgtggtcacatgactgcatgttacttaaaactcaactatacctgaagaatggccaattttactgtaaatcatatttaaaaaacaaaagcaccccaaaactaataagccaaagaccaacttttatatattgcatatgtgagcgtttggacctggaaaggccctccagtaacagcaaaaacaaagacgcataaacagtacattatagagctgttttctgacccgccacaaaggaagggcattcaggggtttccacagtgagaagcgagaacactgtactgaggaccaggcttcctgccaagagtcacgctccctccccatgctcaccttctcctccgccagatgcaggagctgcttcttggccttctccacatccgaggaagggcccctgataacaacggtgtcgcttcctgaaccttccacgggaaagtgaatgtggaccccgccgcactcctccatgatggagcggatcagacggcccttggtgccaatgagggagttgtgcagcttggcagggatggagacctctacctcggctatgttggcctgaaaccaaacacagggcaggaggaggaagtcacatttttgtggcaaaaagggcagaggaaaagataaactatcatctttggtggtgatgaacacgcaggcctagagccctggagatgccacttacaagcactgaccaaacttctccaagccatttttgacctgcacgggggaggagagtgcacgtcctggggagagtggggtgcgcccagcagagcaggcgcgctgggaggtgtttaactcaacaggacccagagtcctcgtgaatctatgctggattgggaggtgggagcgtggtaatttcagaccacacataatgctctatttcttcagtcaacgctccggctctgccagaggtggctccatatgcctatggatacataaacttttcctattaaaaccaaagattctgctttcagccaagatgcagtaccagggactggactgaacttaccgcctaatggtgactttcaagaccctggagacaggaaacaaggtgagccctacagctgccccaagttgctgccacagtacgggaaggtgaggaaacagaaccatccggagatcagagcccaaagagactggcatcgagaacctctgagatccggagaccagccactcatatactgatacgcgtgaagaaatcaccctgggcctgggaaagaatccccagaaggatcacaggaaacagtgcctgcagctcagctgggcctcatacagtgcctttaggtcagtcagggccgggtatagtggcctacagctcagacaccaggaaacagtgcttttagctcagttggagcctggtacagtacctgcagctcagacaccaggaaacagtgcctgcagctcagtcggggcctggtacagtacctgcagctcagtcaccaggaaacagtgcctgcagctcagtcggggcctggtatagtacctacagctcagacaccaggaaacagtgcctgcagctcagtcggagcctggtccagaaccgtcctcagcagtttcaactttctgggacgtggagtactcagaaggatcttatctcagcagtggaaatatttgggcctgaactaaatactgctctgatcctccctaataaacgttaaaagcaagtcctaaaaggagcaaaatgtttcagagtgacttcacaaacacaaaataatattcagaggaatacaaaaacaccctcattaagaaacaccagaaatgcaaagaatagggggaaaacccataacgaggaaaagaaaatagaaaaccacccagaaatgacagtgttagaatcagccagccaaggacagaaaaacaggtatttaactgtattgtctatggccaaaagcagaaagactgaacatgttaagaactgaaaatacagaagatactaattcagagtgaacttctagggaagaaaacaacatctaaaatgaaaatgatattagatgaaatgaggcagattagaacactgcaaagaattaatgaatttaaagaaactcatggagaaaaccaatatcgctcctcccctcaactcaaataaacagagcacaagtagaagacaactaaataccctggtcaccagagtccctgacggggagacagcaaggggctaacacaacaaaatgctcatagtgaccaaaaattgtccacatttgatgaaattctgaacacatatattcaagaagctcaataaacaccaagctaagagacatgaagaaaactacacagagacacatcctaacttgctcagagacggtggtaaaaccctaacagcagccagagggagaaggtttgtcatggacagaggaacaaagccaggggcaccatcagctttctcatcagaaacaacaggagacggcaatgaagccaagtctggaaaggaaaaaaactgccaacctagaaacctttatgcagcagaaacagcttttcgaaagtgaaggaaaaaaatacttgcagacatacagaatgtgaaagaagtcattaccggatacacactacgagagatgttgagtggtttccttcagacagaaggaaaatgaagacaaggatcacgccaagaaatgaagagctctagaaatggcaactgtgtggataaatacatacattttttcatattatttaaatctctttaaaaaataatggaattttttttaaaggttaataatgtaaatggtggactgaaagccaatcatataaaatcatgacatcatggtggctgagcacgtggggatggtggtagttgctgtttaatgggtgtagtttctgtgtaagatgatggaaatgctctgaaaatggacagggtgatggttgcacaaccttgtgaatgtactcagttgaattaaccattaaaaaacgattaaaatgatacattctgctatgtatattttaccacaattgaggaaaaaaattacagtaagttatttaaccgtgtttgttaaacatatgtaataaatataaatatgtgatatataacatatataatcacaactgtaattaaatgcaaacatcataatcttttttcttttttttttttttgagacaaggtctggctctatggcccaggctggagtgcagcagcgcaatctcagctcactgcaacctccacctcccaggctcaagccatcctctcacctcaacctcctgagtggctgagactacaagcatgcagcaccattactggctaattctttttgtagttttagtagtgacggggttttgcccaggctggtcttgaacttgtgagctcaagtgatccgcccacctgagcctcccaaagtgctgggattagtagatagatttaatttaaaaagcaagctgccaaaaagaaactcactttagtatcatataaaggaggctgggtgcagtggctcacacctgtaatcccagcagtttggaaggccaaggcgagaggatcacttgaggagtttgagaccagcctggacaacataacaagacctcatctctactaactaaaagaagaaaaaaattagcctggtgcggtagcatgcacctgtggtcccagctacttggaaggctaaggtgggaggactgcttgagtctggaaagccaaggctgtagtgagccatgactgcaccactgcactccagcctggacgacagcaagacctcatctccaaaaaaattttaaatataagggggaaaaaaataacatagactttggagccaagcatactaccagggaaaaggcatcattttataatggcacagattacatatactgtgaaagagaggtgacgtcagtattgacagcaaaaggataatgcaggactattctaaaaaacttcatgttaatacatttgacaccttggagaaaatagaaaaccccttgaaagacactaattaccaagtacacacaaagaaacagatgatctatccctacagtgcaatattatcctgaaataaaaaagaacaaaccaacaatacaggtgacaacacacacaaatgtcaaaatatcctgcaaagtgaaagcagatgggcccaataaagagtagatgttatgattccattcacacaaaagcgtagacaatccaaaagcatctactgtggccgaaagcagactgggggttgcctggggatagaagtgggggtggggggagtgtggttttcaggagctgccaagtgggatggagggagactgtaatacaaaatggcatgggacatttttggggtgatggtgggaatgattccatggatgtatacacacgtcaaaactattacattgtacactgtaaatatgtacaatttactgcatgtcaattttttttaaaggaaagaaaataccgtaaataccttcagataagattttcaggtaacaagaagaaaatgtctaataagacaagtgcccacgtcaaatgttactgctgcagggtccaggtaagtaagtatcgtgagagacaaaggcagaaaactgctgaccaactcatcagtagcctggattgaaaggtgcaatcttccacatcagcctgcgctggcccaatgaccctgcgtgactcaaccccaggctcaatcttagaggctgttagagattttactggaggatctccattagaaaacatctcccattaccaggtctttctgaatagacagaatcctgctccgggcagcttcgcagttggctcgcttgcctgtgatgataatggtctctgaattgctattctctgctggaaggtcgattttggtgttgctttcttcacgaatctacagggagagagatcaccatgagaagctgactagagctctcccagagttgagacacagttgagcacagggctagaagtaaggaagagtccctcctagtctaaaaccaaaatggtgcagggctacagaggacaaggcaagaagaagcaagatgcagcggacaagttatcacctttttaatgtttgcgcctcctttcccaatgatattcttgtgaaactgtttgaagatcggaacagaaattgaatagctattttccaccttaaagacaaaaaacacagcccgattcaccacctgtgctagagagtaaaatacagtatcccttctacccctaagggtagcatgaacacgacagagcactggtatttgcaaacaaaccttcagaggtttgtcatgagggtaagtgagatagatcatttgtccaacaactaacttacgttgcaaattacagtcaatcgatgcaagtctactttttggctaagagagagttcatgtcccatgccaggatcagagctggttaaggaaggggctcagaacacacatggagacagcacggacccctacgctctgggcaattctgcactcacggcagtgatgtgacagcagctcacagtgctggagtccttcaccatcgcctctcccagggcagccatcagctaaggtgaagcccacggaaatacatggctgcctgtggccttctcatccactactcactacactttctaaacctgttcccacgtcagtttttgagaaaaataataaatcagtatatgactcctcatgtcacctgttatacctcttatcttactggatgggacaatttctctaagtatctgaagactcctcaaggaaacaaggtaactgggcatgagaaaaggcaaatctccccacctgaattccacaaacactgcagtcttaacaatgactgccaatctaaacatccaggtattaagtgagaagccgtcaccactttgtcccaagtccctgagatggaaggccagcccagggcctatgtgctttccccagagcaggggtcctgtgggggtcaggacttctgacaggacgcatgccccacccaccccaggtgctgtcatacaagaaaggatgtgaaacacccctaccagatctgccaccatcttctgcatgtattttgtgcatttttccacctcattcttaggtcctctgagctggac

SEQ ID NO: 8874 - DNA, 6000 bp, Homo sapiens
gaagagacaaggtacggaaggtggggttgttgcctcgacccctttgccctatattagaagtgagattcaggggttgtgagcttaagagacagttcctgatttgtcaatgacagataaggataactgatgcccaggaatacacccacacctcccaatacgtcttagactatgggctaactgcccaacttcccagtcttaccatagggatgcgcagagcgtgcaggtagaaggagtggatctcccagtagcagcaaatgttatagatgaacttgataagccggtggatccagaagacaccagcaatgaccaggatggtgataagggagccattttcctgaatcctggtggggaaaaagaaggggaggagaggtggccctcgaggaaggagtcttggcagagacgctgctatcctgaagtatttttgctagaccaagcctgagtcagttctggagtatgagttgctgcctcagactccactctattacccacctgctagcagaactcaaggctatggtgtcctcttgacttgcagcccttacctggcactacagacttgagcaggcaaaaaggcgtctggcagagtgaccttgacgggttcagtagggtgaagactgtggttcaccatcttgttggcaaataggatgtcatagtccacgcagctgaccaggaaggtagtgaaggcaaccacaaagaggaactgcctggggagttgggaagaaggggtgcagtctgagagccagagaggctccagtgaaacccagtgggaagaggagagtctggaggtggcagaacaagactgggaactggaagggcctggagaactcccagtgggccctctctgctcctcagccccacaggactgtctcaggcccactctttgctcttagcctcagctgccacagctgcagcctactttcctcacctcatggtaacctcagccaccactactggactctcgaaggtttcatcctgtgggtctctgatctccagtctctgatttccttttgaggttgtagttaaaagcccttgggggagttttctgattgagggagggcttcctaaccccttccccttcggcaatgctatatggcttctctctcccaggaggctctctgcctaggagcaggccatggaacaggcaaggcagaacagaggcttttctctgtggctggcatctctgagacctcctgactgaacaatgtacgttccattggagcgttgagatgatcaaggtcaaggcctgcattctttttttttttgagagagtctcactctgtcagccaggctggagtgcagcggcacaatctcggctcactgcaacctccacctcccaggttgaagcgattcttgtgcctcagcctcccaagtagctgggattacaggcgtgtgccaccacacccagctaatttttgtatttttagagcctcctaaagtgctgggattacaggtgtgagctgccgtgcccaaccaaggcttgggttcttttcatggaagagataaggcttggaaagcttttcttgtaagaaagcttggccgggcgtggtggctcatgcctataatcccggcacttcgggaggttgaggcgggcagataacccgaggtcaggagttcgagaccagcctggccaacttggtgaaatcccatctctactaaaaatacaaaaaaaattagccgggcatggtggcacatgcctgtagtcccagctactaaggaggctgaggcaggagaatcacttgaacctgggaggcagaggttgcaccgagccaagaccactgcactcctgcctgggcgacagagtgagactcactccatctcaaaaaaaaagaaaggtgaagctgtaagttttggtgccacacccagtccctgaactacaaaggtttacggagttttagcctaggactgagttgtactggcaggttgggccaagtgtgagtgcaaggagaggaaagactaagatgtattctttcaccacatcatctgtcccttcttatacttacatgagctcaaagatctccccgatgagcatacatgtgaagccattcttctggtgcagattataaacgtgtaattgttaagaaaaagtagtcagtaaagaaagcaggtaagagcacagactttggtgtcaacacactcaagcttaagtcctggctctgtgactttctagctgtgtgactttaccaagttacttaacctgtctaaacttttgtctgtccatggtggtacattaggaataaataacacttgtctcataggagtattaggtctaagataatgcatgtaaagcatttaacacagagctgacacagaatgagtcaaaagacgttacttattacgattatttacatcccatcaaaaaggaggctcggctgggtgtggtggctcacgcctgtaatcctaacactttgggagggcaaggcaggtggatcacttgaggtcaggagttcgagaccagccttgccacatggtgaaaccctgtctctatgaaaaatacaaaaaatagctgggcatcgtggcaggtgcctgtaatcccagctacgtgggagactgaggcaggagaatctcttgaacccaggaggtggaggttgcagtgtgttgagatcgcccctggactctagcagcaacagagacagactccatctcaaacaaaaaaaaaaggaggctcacccttagaaaggcttctacaaattaacaccacaaagtggacacaggcacacagatcttggtaaatgtgggctatcattacttaacgatgatttcaccagcctctttcagcctcaggatgagctccattcccgtttccaggtattagagtcaaacctacccccacctcccaccagagccccggcttagagagacattaaaggtcccagagctccaactcagaaacacaaaggatattcgagagaagaagaggtcaaggttttcaatatggtgccaaggtgctgtgggataggaacagagatgtcagagccctgggagaacacaagccccttgctctctccatgttcttccatcaactctccctatggctgtcatatccaagaactcacacttgctcccctcggcgacgtgcaccaacaggtcctcctcccctgggggtgaatcactataggaggcctctaggcgctggtattcagtgtcaaactgcgccatcaccaccgccccctgtccaccttgaccacctgccaataaggaggaagaagagaccctgattcagttccagctgctgcccatgggctgccctgcctactgccaaaaggagaaagtacccttgggctttgtccactaccagcctccttggctcagaggcagaggagtagtgacacaagaaaggcagtaagctcagggctgggggagccttaactctggccagtctgggtgtctactgctgctttcctggcccaaagccagaatctgtccctttgttgggggctgtttcatcttctatttaacggacagaagagtccctcccccgcccatcctgggaaccctggtctcccaagagactaacagtttggaagcacttcacaaacaaatgtttgagaaaagcacatggccctaccagctccatggacagtatgtgctcctctccagccctcgatgctctgcagctgctggaggagaagatgtcaggccccagagagtgggcagtggggataaaaaggaacccaaccctcccagccatccacaccccaccaagaggaggccaagcatggggcaggaaggctgcagtggggaagaagcacccttccagcccaggactacgagcacttcctctggctgtgctaaaccgggccactcttccaactccagggtctcaagaagtaacttagggaccccatggagaatgagtgggtacagacctgaggccaggggcgcctctggactatttctccattgccctaccttagcctcagaaatgacatacttctcagggtccacaaaacctcaagagtctttcctgaagaggacctttctggtcaaccccttctcttacttccctagcaccaaagatccagccggtgagcaaaccttctggatgggaaaccttgactgggtcagtgtagacccccgatcctaggtgaatttgtgggttccctaggtcctgtaagccaggcatggtcgaggtggtactcacctgtccgtgcagcccctgggggccgtggatcttggcccagcctggccccggtgggattccctgggctagtgagagccctgcccctcagggaagtcaccactcacagggtcagtgtggaccagggcccgtggagccccggccggctgggcctgggctcaggggttcctgcggatgttgcagggatcgagtcagccttacagctgatagcccgggtgggttggcttgcctccccacacccagccgcggcgaccgtggaccggagtccacctcgccccagggtcgcccggccccaggccaagggctggcagctcccaacagcggacaacctcgcgcgcggccccggcgcccgcgcgcgcccccgtctgcgcgcgccagcaatcaaaacattccggctgcgcgcccccgccccgccggcggcgccccttcctccgttacccgccgcgagctcacttagggctccgcaggcacccctgggcaaggccagacacggggcctgggattccaataaccggtctcacgtcttacctcaggaacagcgacccgggtgattccagaggctccgccggctccgctcggctcggctcggctcggcgcgacccgcggcgctaggccgggtgtctgccactcactgtcacccgcagccaggctggccaataagcacggggggcggagacacaacggccaattctcggcttcagggacgggactaaagtctcgaggcgggtcttggacagtcagcggcccaatagtgtgctctacgtggggcggggctcaggtgcggacgccgccggttgtcctcttcgctgctccgtagtgacggggattgttgtgttgcagaaatccggcaatcgacctgaggacttgcgagccgctcagctcccgggacgtttggtgcgtcttctaagggcgtgggcgagtttacgcgggccagttgttgctggtcgcatgggtaacgaagaaagttcggctaggcaagctcagtgatttttaactctgttggactcgatttgggagccgaatgcctatttcattcttttgtgggctgagactgggggtttgagaaagtggacgggggccaaggtattcatctcacagttggtagcaggatgagagacgagaagtcttgcggtgcaggagaaaccaagtcaggcaggcaggagacgcagcagtaggatctcgtttgcaggagccctgtttcttacacgctttctactccaggagctgctgctaaataatttctgctcagccatgtcgccggctccagatgcagccccggctcctgcgtcgatctccctgtttgacctcagcgcggatgctccggtctttcagggcctgagcctggtgagccacgcgcctggggaggctctggcccgggctccgcgtacttcctgttcaggtatcctggaaggtttcgtgtgaaacgtgacagggctccttacagcgtattgcccgttcagggaacacattcttattggtattcccgagcttaggaggccaattgatttatctttctgcttgattaaattcacttaatctctgggtaatgtccagcacagcccttgttttcaaacaagtctttttgccattgcatgtatctcctcacgttaacaccattcccttcaaaaacactttaaactttgtagagataaaattctcagatgtattccacatttaaccaggccccactcaaattattcctttttgctgaatatgaaacaatttattatttgtttcgtatagctttattttttgagagtctcgctctgtcgcccaggctaaagtgcagtggcacgatctccacccactgcaatctccgtctcccgggttcaagtgattctcctgcctcagcctcccgagtagct

SEQ ID NO: 8875 - DNA, 6000 bp, Homo sapiens; identical to SEQ ID NO: 2134

SEQ ID NO: 8876 - DNA, 6000 bp, Homo sapiens
tggctcaagcctgtaatcccagcactttgggaggccaagacggacagagcacctgaggtcaggagttcaagaccagcttgaccaacgtggtgaaaccccgtctctaccaaaaatacaaaaatactagccgggtgtggtggcgcctgtaatcccagctactcaggaggctgaggcaggagaattgcttgagcccgagaggcggaggttgcagtaagcccagatcgtgccactgcattccagcctgggcaacagagtgagactccgtctcaaaaaaaaaaaaaaaaggctccaaaaaacccaacccaagactcccacccccaaaaatttcctgggttttaaagacattatgtggggacttctcaatagattttcaaagatatttcgtaatatgattatccataaatcaaattgtaattgactagtctgaagtagcagcctgtgtatttattatcctgtatagcatagcccaattaagtattccctgaggtaaacaaatctgaggtattctctacgcaaagttgttggggatggggtagggtatgaatgacactactataccaatagtttattgtgaaatacaggttcatggttaaaaaaaaatcaaaagttccagagagtctaggaagaaggtaaaacaagaaaggtctcatcattgtagagatccacctaacacacaagtaaaacttcacctggaaataatgtgaatgcctcatcgtctagtcatgtgggacaggaaaggtcttcacaaaaccccccatcttcaccagaatagttcacttttacatattggatattctggttttgtctaaagaaaagggaagacatcctaaatatatttctaactaatgagaatgccaaaagccctattttctttgactagaatttaaaaatactcaacaggagcactgaagcatattccttctgtgcgatgccagtcctaaatagaagtacctcacctccattctgtctgttcccacctatccccaacatgcttggaacaaacattcagagaatagaaaatgtttaaaagcaattttttgaaattaaaaaaaaaggtcatgttaatcttaattttcaagatagacatttaagagttggaatatatcttaatggtcaaatattcagattttagcagttaagataccaaaagcttaccagtctaaggatattttcttgaaatttaactcctaaaaggaagcagaaatattcatactcaactgaaaactcctgttactgagggattggcctgcaagagtgtgtgtgtgcacgtgcacagagtgggggaagatcctcaaagtcaatattgttttaaacactatgccaatcattcttcatcatttgatcatgcccattcccatacccatataggaaatatacaattaagaaatcagttaccgtatctaacttcagccctcaataacaccgtgggggtatgcattcctcaaatgagaggttctgggcacctgagaatccctctttgcacctcagagcaccaccattccccttccggggaataagtgttttgtggaggtgaaacacacaaaccctctccaaaaacaaaatgatctgctactcaataatcaacacagggccagcataaacctttaccaagcaggaattcacaacaggagatcctactaatgcttctgactctctgctaagtagcaagatatacagttctaatgaaaactctaaaaaaaacaaaaaaatctggtccatgactactggtgagcctctaatttaagcatcccagtatcatacactacagttgtagggagtgggaaggtagatgcttatcgtacctgtctgctgaataaaacagtaccaaacttaggagtccataaatatcaatgaactgtttactctcatattataccaggctaaagatatttcaagttttcaaagtgttaaactgctatattctgccagattctggctatggaaaacagtgattagtgaatcactttactagtcatagaatttctacagagaagagacaaatctttccctagagaagcttacaactagaccagacaagtgggtctgaatacattcttacctgctgggatttatgctatctccctcagatttctacagtttaggaacacttttaagaacttacaatggattgttaagagccattcaccttagaaaaaggacaactttgtttcctgagaaaaatgcatttatcctcactgtaactcagtcctatgccaacataatcccttgtcaacatttattttgcagccagcaagacttcttgataaaagaaatgcaaactgggtcacttaaaagggattttcaaatggacaggaaattaaatggctgcctgaagtttttttggggggcgggccaaaaactacctttaactggttcttttcaactattctgagaaattggagtcaagtcactatgggaggcagagtcctcatctagaagcttataaactggttatgataatcagcacggcagagacccatttaactggcagcttagttaaaaaagccacaggggacactgtcttgaactccaagtttacgtattatattagcctgaatataacagtggtttaaacaaataatgtgtatacagctacacaaaaccacgcaaaataaatttccttatttttttgctcccagtttctcctacttcttggcacatcatagtattcaatttttccttcctgactgccctcttgagtattaaaaactcgctttcagagaactccacaacatacaagaaatgcacagaacaaagagctttttaaaattttccaaggccgcatacctatacaccaatcacatctgcaaaagtaccactgggtttgaaatcgattgggtgtgctccatgaaaggtcttcatacgggggagaaaggttaccttatggaggatgaatgcacgaaccaggaagaataaaattccagacataattccagaaagcagtggggacacgaaccaagacatcactggaatagaacacattaagaaaaaatatcaaataatgaaaatcagaaaccaaaaaccactttaaatgtttaagagttcaaaattcttgggtctgtccctcgacgttagaacacatcctcccatacctaatgccatggtaacatatgacgaaaacgaaaattaagaagccgtttggaattaaacataccaatttttatcagttcagaccacttgacaccctcctgcccctttgccacgagggagaaaccaatagttgcaccaacaatacaatgggttccagaaatagggagcttcaaaaacgaagccacgagttgccacacagcagaacctgaaacatagtaaagttttattaagtaaatatcaaaattccattatgtaagtggcacattcagaaaggttaatcggaaaggttatgcacaaaaatggaaccacccatgatacaaatttgctcacccaccacgaagaggacaaaacataaaaagaacttaccaaacatagcactgactgagccggccatcagcagcccttgagtcgagttgtacatctccacgtcaatcaagcccttccggatggtttcgctcactttggcccccagtaagacagagcccactgtttcaaagatgctagctaggatgcaggcttgcttcagggtcactacacctgagcccacagctgtaccaaaagaatttgctacatcattggctcccacggagaatgccaagacaaatgcaataatgaagcccaggatgagcatccataggtagtccaccaaaggaccagaagcggcggtagcagctgtagtactggtaatcagcgttgccattctctggagtagtggttgtttagtaagagaactactgagcgcctttcaagatgtgtaaacagaatatgaggtatcaaaaatgctataataaataatatatattatataaaattaaatactgtaaactacggcacagaaaccgagctggggagttactgctatacgctgcgtatgggcatctgttgtctggggtttctttggctcaggagggctaaaagcacggagcagaattccatggcggagaagagaaaggacgcaagttcatcctgcgggggaggggggaaataacaatagctgcgtgcccctggggggccagtggggcaccccgctctacccacgcgcccggggtcccgcaatagcctctgccggctactccagacccccatccccagtaggacgcgcgagaaggagaggcacgtggctccgggtcctccgcggcccgcgcgcgcccagcccagcccctgcgctgccagcccgcgcgcgccctccgcgcgaaaatcggaaaagggccgttcccgcgcgcgccgcccggggaccgccaaaaaggcccgcgggcgggcagacgggcggagtggaggcggccagcggcgaagagagaagccagccgcgccgcccacggcgtccgcctccagcgccacggcgtccgcgcccggccccggggagaagaaagagcctttacgaggcggcgccactactcaccagggaaaagggagggcggagcgggagacgaggagatcgaggcgacagcggctggagccacgggcacacggcccgggtcggcggcaccggggacagctcagcgggactcacgaccttcccaggaagcagccgcgggggtttcagcggccgagaagaagaaccacgcagagagcgccggcagccatcactccagcggagcaccccgccggcccctacttatagcccgcgcagcgacccgcgtgaccccgccgcgcctcgcgccggccccgaagccccgcccccggcatgacgcagccctcctcggcccggcgtgcccagccgggtgagcccgacggtggcgctcattggcccggcccgcttcggcggccacgcccccagcggggagccggtccacgtggggcgggacagccccctccctgcggcctcgccctggagtctcggcaccgtctggccccgccggctgattacagccagagatcgagggggacctcgctgtccccctagaggccgtcatgcggggttacagaggctgcgaccaaagtcattcctagctcctctctcggggctccggaaagccgtccgcgcctccagccgcactttcagcgcacgcaggacctgccgcgcccggtggccacacccgtccctctgccgggtgacgctgcgggagatcttgcgccctggggctccggatccagttctggcacgttgttgcacctgtgacttgtccttggcctggcactgtccctcgcctgggggaagcgggggggtgggggggggatgctcacgtggtcgctttgctcccgcagtcatgcacttgggtgaaaacagactgaagagtcacgggaaccagcttgtctccccagttatggcgcagagctgcaaggatggctgtgggtcattaatttctccgtggctgacctgtgtttgtaacgccgcagctgttgcgagggggaaggacactgcttcggattcaaattctgactccttgctgcagtgtgtcaccttgagccagtcccagatctctgcgttctcacaattgtaaaatgttaacagaggctgcctaccttgtggctggaattaaatgaattaacgtgtgtgaatgtgactagaattcagtacatgttcaggaaaagctgatttccgctttgctgttaccgtgaatattactgttttagggtgtagaaaagggtggaaggggatgttattgcatcctggaagcttatccttttgaggtaaagattgatttctggtcccctgcgtggtatatagtgtagttttgacattatttagatgtgttatgcacatttgggtgttgattatatggcttacgatcaagactaaccagtcatgccgtgggagattaaggtcgtggtctcttgtcaggattgtagtgagatttaaaaattccagccagaaataccaggcttagaatgctctgaagccctccccacatttttgccatctctagcaggagggcactgcatagcagaaacaaagacgttgtaaattgt

SEQ ID NO: 8877 - DNA, 6000 bp, Homo sapiens; identical to SEQ ID NO: 886

SEQ ID NO: 8878 - DNA, 6000 bp, Homo sapiens; identical to SEQ ID NO: 862

SEQ ID NO: 8879 - DNA, 6000 bp, Homo sapiens
tattctgtaatacacggtaccaccacagtcaccctactgtgcaagaaaacagcagaacttacttctcctatctaactgtaactctgtacctgttgaccaacctctccctatccatcttctcccatcctggtaaccactgttctactctctgcttttataataccaactttttaagattacacatataagtgggatcatgcagtatttgtctttctgtgcctggcttatttcacttaacacgatgtcctcttccaggttcatccatgttgttgcaaatgcgccaggcacggtggctcacacctgtaatcccagtgctttgagaggccgaggccgaggccgaggcaggaggatggcttgaggtcaagagttcaagaccatgttgtcgcaaatgataggatttcattctttcgtatagttgaatagtgttctgttgtatatatctcacattttccttatttatctcttgttggacacttaggtcgattccgtatcttggctattgtaaatagtgatgcaataaatacaggaacgcaggtatctcttcaacatactgatttcatttccttcgaatatatacccagtagcgggacggcaggatcatgcagcagctacattttcagttttttgaagaccctccatactgtcctccatagtggcaatattaacttacaatcctaccaagtgtgagtgttcccttttctgcatatcctcaccaacacgtttttcctttgtcttttcaataatagccattctaagaaaaacattaattaaataaacaagtaatagccattctaactggagtgcggtatttccttgtggttttgatgtgcctttccctgatgattagtgatgctgggcatgtttgatgtacctgttagccatctgtatgtcttcttctgaaaaatgcctattaatgtcttttgctcatttttcaatccagttattagatttttttgctcttgagctatttaagttccttattatcccactcacttgaagtgcttcagagaccctgggagagagggcagcaatgttgtgtgttctttctctgcacagtctctttcccacatgctaacatctccgggctctttgttctcccagagctggctgaacttgttacaagaggttggagactgtatcaaagtgaacactgtataactttatttcctttccagagtagcaatatcacttccgcaagcagaagtttggaaacatctcataatcctgaattctgccatgctatgctctaacctgaggaaaagatgggcacctccctagtagtgctcagagcccaggagctaacaatggcagccacatctgtgcccgccctttctggccaccagagaagttagtgtgatgatccatccccctcaaaagagggagctacaaaaaaagactggaggaaacaattgtgtttcccacccacacccctccagctttccataatggtcagactgccaggtaaacaggaagctgagaagagacaggggttgttcctgttccaggcaatcagtccgaaatgctgggcctctactcccacccaacttttaagaaaaaagtgggatccatcatccatgcatacagtcacccatccattcatcctacaaatgtttcctgaacaaatatgctgggtactatcacaggtaaatacctgccctcatagaacaggcaatttagcaatgaaaaaaataaattggtatattgtaagagaaagtgagaaggaactatggagagaaataaacctggagatgtgaagagagggagagaaaaagagagagagagcatgtatatgcatgtatgtaagcaggagggccgattttaatcctcaaggaaacaaaagctgatagtatttctgaagttaggcaattaagattacttcaaccaccagatctcctctgtctaaactcctactaatacaaattcagcatcacaataaaggaaaagagatgtttattgattactgctctcttacattttacttccaatcccccttaggccaccactgcttgcttccctccaaacaaaagtctacaacctgccagaatgtgtatcactgtagccctcattcttttcataaactcaatctaggttttaaactcttaaattgctaacaatctgccacattagaattgcacattttccaaaaaccgccaccaccacagagctgccctgtgtcccatgggtcttgactttaccacaatcctaagtggtcccatgaagaccagccccccacagcacacgtggcaggtcagcgctgcttcatcggcattggcttcccagctaaatgctcaaaggtaaagtgtctggctgcacatgtcatccttttcaaaatcaacagggtctccaagaaatacatcaagtgtcctctttttgtagacttttccctctttatggtcgatcttgttgcatttaagcataagaaaattctgcacattcacagtaagtccaaaccgaagtaaatatcaaggaatgccagagccacaggtataataataatatgggacctgcttgattttggaatgaaacagggagggaattcactgagttcatcacagagactctggacaacagagtcagaaaccctctggacaggaagcgggcttgaagccaggcatcctatggccagctctgccctccgtgtctggaaccatctcacccactaactagatggtgaatcggctgaaggtagccggccctcaccgcctgctctcgggcctctttccagagcagcgagcagagtatcctacatatgtgcacggaactcagtgaatgaatgagcgtttacgggacaaactgtccttatgtttctcacttcacaaatcttcaggccttgtcctcactctctactaaatgaaacatttatagaccaggaaccctgctaaatgcaccataaataaagatacactgccctcaaagaaagggagggacgacaaattcctgcctcttcgcctcttcccagggcaccacccacctccatttcctgagagcctgggcactaagcaccagggtgcgtcacggggcccaacaaggccactgtggcccctgcctcctgcacaactccctcccccaaagctcaaaacagctcctggagcaggcccacgtgctgcccaagttgcccaagttgagtccttgttgccactcaacaggaccactggttaccaaagcaccgcctccgtccagaatcctaactacactctgccccttccatggggaaccctcagctgcctacagctccctccatgcagcaacctgccaactcccacccactcacccggtctcagtgtaagtctgcactcctctaacaaacccaaccgccagctttctcagaagctaaagtccagcaaaatccagttcctttgcacttggttctgcggtttccaggcgtgttagtacatctcctaccagactcaacctcaaaaaggccttccctagactggtctgagagcagaaagagccgccaaccactaacccggggacctaacctaggtcctttgacctctctctggcctctgtcttctcctcagtagaacaggaacaagacaggagatctaagctctcttttattccgattccaaaattggaaagaaaaatataggccccctagatacaaatgaaaaagtctaattgttccttcactgacctttaaacaggtgtcctagctactgcaagttggcgtcaatttcaaagagctttggaacaaaacttttagaaaaaaaatgctttgttttatcatcaactttacgagcctgggttttttttcctatcattccttgtaagacactgaaagagaggaaaaaactgatctgttcaatttctctactgagatcacgagcttgggattcgcccaccctcagtttcccctccgggcgtggagacagttcccgctcaccgcggcctccaagagctgcgccccgcgcgcatcgccgcgcgcccccagccacgacaccacctggagcctccggcgcctccagatggccgagtccgggctggctcggcgcaccccgctgtcacctggccccacacagcagcctcgctgctccagggcggccccgagccctccggccccgctccacccggcgtttctccttcgattcccaagtcgagtccggcctccagctcaccgggccaggcggcgaagacacctgcctcgcccggaaaacgcacgcgcccgggagccccctctaccaccacctcgacgggagcccgcgggagaaacgcagaaaaaaggaaaacaagcccgcggcagggccgtccgggccccgcgtctcccaagaaatcgcctctggcgacgcagcccgggactgggggccgcgggcccggcggggtgcgaggccccgggcccggccgccgcgcccgccccggcgagccccttaccggtgaggcggccgcccccctcgccgtgcccgcggcgccgctgcaggatgaagtagcagctgctcttctgggtcacccagagcttcagcgcgttcttcagcagcacctcctcgggcttgagccacatcgcggcggtccggccgcgcccgccggccccagctcacatctccccggccgccggtcgctgtgagccgagcccgctcgagaggcgacggcggcgcgcggggaccacagcccggccggtgcccagcgctctgagagcccgcggagcgcagcaggcgcagctagccccgcgcacccagcgcggccctcacgtggccccgccccgcacccgcccctggccccgccccgcacccgcccctggcccctctccagccgccggccccgcccccgaccgcccctaccccgcggctcccgcggcgcctcccgggtttccgcgtccaaggcgctccggcgcgcagttccggagtggagggaggaagtccaatcctgcgccaggctccctccctcccgcctctccgcgctctcagggggaactcgggagagctgccgtccctgacctcgacctgagacgtggaggagggacagggaaaaagccttcttctcgcagctgcaggttgccccaccgagggcatttttccgcaccgagggggcggggggcagaatgcacgccagaaaacctaagtgcgctgggtttaaaatagcaacaacaacaaaaattacaaataaccaaaaaacagcataagaattaaaaacagttatattccaatgtttttaatacttggttcacattttggatgctctccccagggatccgacggcgctgcggaggcggcagcgatgtttgggatcctaaagaaagcatcagaccagactcaggtctggacgtccctcaagtggcccggaggtaccgatattagtgtcaccgccgtcagtgccctgcccagaaataaaacctttgttctgagagaaattgaaaagctggaaaatatggagtaggcgatgtgaagagaaactacagggaatgtagaggtcgggttttaaatgcgtatttcctcaaggatgttgtggaagcagagacaaggtggctggcctggagcaggctggaggacctccaaggatctccacagggaggcagttacatttaacaccctacctagcaaaagaagaaaagaacaaccccatgaaaacatccctggggttttaacaaaggaatccctgacaaaacgtgactgataactaggacagaactgaaaagtggaagtaaagtcaatcccgaccccccaggacgcctgggaactcagggaagcgcctccagaagggaacagctcagaaaccctgaccagacctggcggacaagaaccgtgtgggcgggggacaggaacgcccacccagaggccgggagagcatggtccaggactggcagccactaacagcctctgaatgaaactgaggaaggaagtcaatggtaatcgggaccattagggtgcaccagggcatatagaacagtcggggacggtaagaaaacattccttccagagacattcactggcacctcccgcgcagacacactgccaggcccgggaatcgcagagatgaactgggagacttgtctgccctggagaa

SEQ ID NO: 8880 - DNA, 6000 bp, Homo sapiens
ctgtagtcccagctactcgggaggctgaggcgggagaatggcatgaatctgagaggcagagcttgcagtgagccaagatcgcgccactgcaagcccttagaggaagacagagaggaggcagggctcacctccttcttggagactttctcttgcagagatttgagttgccggtgctgttccttggtgaccaagatccacccacgctcaatatctgataccgtctatagtagagacaaggggcaggcagtaggaggtcccagtcagcaatccaaggaaagcgtctaccattacctctgtccagcctgacccctagccccacacttgagcgacctctctgcagtaagtccttgatcttgtcagcttaataaaagtagggagagtagatattgtgccagcagcactgatagtattctaggaacttccccacaaattgggaacaaagacacgacagcagttttcttgggagagtgagtcacccgttattttcttcaggggaagggttctgaggcagctccaagctcacctgagcataaagcaggttcaggccaacccggttctccatgacatcgtcatcataggcagagtcccaataactgtgaggccaaggggtggaaaggggtaatggggctaagctgggttaaggcaagaggtagaatggaaaatgggcaaaacaggagcaatctggaactatcaggggctaatggtatagtgggaggaagcttgggaggcctggcagaaacacccagcactacacccccttgtccagattattctgtctcaatatgtggcccaataatccaatccagcacagcacctcccacccctccccttccaggcccagccctgacctcttccttagcacaatcttatactcttgactccgaaggctggtgacagacacataaggcagctcaaactcttgcaacttccgtacaactacaggttaaaaaaaaaaaaatgaaaatatagtgagatttaaaggaagggaaatcaagaaagaagtgccctgaggcaatgttcattctgggggtgggggtggggagttaggggggctgcaaactctactgaagtacccttgtactgcagtcaagtccagagaaactcacaagaaaaggctccatcctctttttctcgaactaagaatagactaaagtatccaatcaagtcatctggaagatccagctttgcagctacagcctggggatagggatagaagtacagctcatcatactggctggttccaatcattctccaagcccaggaccccaggatgtaggggaagaaggggcagtgctgaacaagcgcctcacctccaggacatcctcagtctgatctgaagttagcacgttgaccagaactttctgcccgttgctgagcagcacttccaaggacacttcctctgtggggacctgctgtgtctcctgttgtgagcacacatggggatgggaagcactgccttgtcccttgccttgacctatgcccaactctatttctaggtcccttgtgtgtctttattctcagctgcttaaatataggctgtgatttctttgatttcataagaatagaagttccattccattaaaaaagatgactcctctgttattaagatgacatggcctggctgggtgtggtggctcacacccgtaatcccagcactttgggaggccaaggcgggtggatcacctgaggtcaggagttcgagaccagccaggccaacacggcaaaaccccgtctccactaaaaatacaaaaatgagccggacatggtggcaggcgcctgtaattctagctacttgggaggctgaggcaggagaatcgcttgaatccgggaggcggagattgcagtgagctgagatcgcaccactgcactccagcctgtgcaaaagagcaagactctgtctcaaaaaaataaaagacatgaccttccagcaaggtcctttccttaaatcttggtcccacccaaagccctacctgttgtgcccgacgcaggaaactgttgaaagtctcgctgctcccaagcaatgggtcttgccgaactacgaggacaagagaacattattacaggaacttagcactcactcttggctccccagtcctcctctcagtaggttcccccgaccccatttcctgggctgatggtggcctgccacatcccccagctggcctcacctcactcactgtttgcataaattcttcacctgccccacccttggctgccatctaggtgagtccagtctatagaactagggaaataacaatgatgttaatctaaagcacatcagatacaaattaagttctctccactgatattaagactagtgttatactagtatttctcatagatgttagtgcccaaattgttttgctagtacacagagttacacatcctcgtacactatttactttgctaactgcataacagatcaaacaagagccttcctagatctagaaattaaatcaggcccttccacagaaccagctgtttttaagtctctccccatagtcctcaatatagtcaacctagtttcctgcaaccactcaccagcttgcatgtacttctctaactgctctctcctctgttctacctcagcaggagtcagagagaaaagcttctttggggggaatgcaggaagcacattggccccatactccttccgaagctatttagagaaagagatacaacccttcacataaacacagaaaatgagatgaggcaatctacatatgctcataatgttctcttgggtgcccctcccttccctcagtccctgttcccctgtctaccctggtcatctgagaaacaattcctttgacagcggtagcacctcaagggagctgtcctagatataagttgtgctctattttactgtgtacaagtcagcccctccacagtacggggaggatttgtactgggccaggacctatagggagccccttgaccacctagcaagactgttcactgaacccttaaaggaaggaaagggctttataaagtgcacagttaatagctaagtctgttcacaaaatatcttaggacttaaagggactttgcagatcaaagaatccatctttcagttgtagaaactgaggcccaaagaaatcagtttctacaggcctcatgcctgtaatctcagcattttgggaggcaaggtgggtggatcacctgaggtcaggagtttgagaccagcctggccaacatagtgaaacccctctctactaaaaatacaaaaattagctgggtgtggaggcagccgcctgtaatcccagctactcaggaggctgaggaaggagaatcgcttgaacccaggaggcagaggttgcagtgagccgagatcgtgccactgcactccagcctgggcaacaagagagaaactccgtcccaaaaaaagatatcaggtaacttgttcagggttgcacaactaattatcagtggagctctactgagttaaatagagtttaagatctggtaaggaaggaggagaaacattgcatcacagatacataacgataattggcacagctaaacacactgaaatgagccgaagaacacaaaaggaaatcggtgaatcgtttgtataagcagggaaaagaatttcaagttgccgctcagatgacagaaggaatgtgctttgacagcctgggtggaggtagtggggggaggggttggtttgtccatgcaggggtaaaggctactagagcagtaagactggacagaaaaccagaatataagaacaggaaggagcagttgttgcgcggacattaagcttcttagggagttcccggaaatgtcagacaagataaaccagggccctaccctgtggcagtgattaaaggggaactacagcctacgggaacaagaagagcgggtaaagggagacactgatgtccacgtgtagggaagggcttgaagctgtctcaaggcaggggtgctagtcccacctgctcgtgcagccccaggagctggctgtagcgcacccgacagtgcaggactccattcacgtgaatgttataggcctgaggacacaaaagtagtcaagcattttagggttgcggtctgcgcaacccccctgagaaccctggccggaagttgcctggcaactcgccggagtaacgcgctaatctcccgagggatagttcgcttgttttcgccagggccaagtcccaaagctgaagagccagtccgggggaaattcggacgcttgtgttgcagtctcactgcccaagaggccagtgacgcccaccagggcagctgcggcctagctcggggaagcgacccggcctaagggcctacaggagctcgggcgaccactgcacgaatcacacacatgagataagctcccagagaggccgtcgggagtcggcggcccaggaccaggcccgaagggtggcggtcaggcctcagaggccgctccgagatggctcgggcccgttatccccgcccctgcccggcccggctcggctccggccgctcctcaccacgtaggcggagccgccgctgtccccgctgcgggactcggtttcgggaatggaaaagtgcatgttccctacggcacggcacggccgggctccggactgtgagggccgcagcggctctgcacgctccccctccgctgctcagcgagtccccgcagcctcactcgccattttgggagccctgcgatccgatgtgggaaggcggtgggacgtcggttctgggacgcaatcgcctgggcatgctgggaactgtagtctaaagggcaagagccacctgtccggatagggagcccaaagtggagttggccctcattgcaacccgtagtgcggggcggggcctcggggcccgtcggaaattgtagtccgattggggctgcgcgcttcgcttctgcggctcagcctccagcccaggtggcgctgtggaccctgcagccgcggagcgaggcagcggggcggctccgtgaccacggcgggcggagcctaggactgagggcgatggctgctgtggccgtggctgttcgcgagggtgagtgaagagccgggcctgcctactggtacgcggagccgacgagctccggacagctagtgccgggccttgagcgcctttgggccccgccgctccgttccagcgccacgctgggctccggtctacacagtctcgagcgcagtcccgcgccgcgcaccggctggttgctgtgaggagggtcggtgacccctccattcctttgatccgccgcgcagtgcgtccccacgcggatccctggctcgcctcgcgcctgccggcggatccgtggtcatgccaacccagcagccggctgcgccgagtactcgtgcccccaaaccctcccggagtctctctggctcactttgtgccctgttttctgatgcagactcgggatccgggatgaaggcggagcttccccctgggcctggggtaagtgaggcttccctcccaagccgcctgccaagcgctacgcaggaggctgtgccagctttattccgccccagctcccatcccgtgtcggtttatttctcagtaaagccaggagattttacagaggtcttgcaaccctagggatatatgattctgtccctggaggagaaacgtcagcctctgtggatgtaagcttgcaacaggtagcttgtggaagttaggaagaactagggatttaaccatgtggaaatcttgtaagcatccaatagtatttgttcccctttggaattgttggggaagagcagtatcctatgtctgtgtctcaggcagtggggagggaaatgaccaaagaagaaaagctgcagcttcggaaggaaaagaaacagcagaagaagaaacggaaggaagaaaagggggcagaaccagagactggctctgctgtatctgcagcccaatgtcaaggtgagtgaggggtctcttttaaagggctggggtgtggagctggtagagggatgtggtgggagagataagggagagacaggacaaagttgatttgagcaagtgtgtaaagcaaagaggtttacaaggagagaa

SEQ ID NO: 8881 - DNA, 6000 bp, Homo sapiens
gatgtcagtaaaaataaaggcaaatatccttaaagatcatatcatggcaaagaaaatcctggatctaaagcaaatataattaaacttgataccttaaccaatcattcattatgtccaggaacatgcagtcttcatgagcactctatcaaaatcggtgataggagagtttatccataagtcattggaatattttattatagtataaaatattatactatactggtgaattctcaagcatttcatcaaggatgaaagaatgtgcgtatctatagtctgtttctctaatttaatcatattctaatttaaaagataatgaaaagataaaaatctttcaatacaacgttacctggagatcatcaataccatgtacttgtaaaatttagattactaactttagggggaagagagcagagcccttttactaataaactactgcttttaaaatttaagagtttagaactgagtttttcctttttttttaatttgtattttaggtttgggggtacatgtgaaggtctgttacatgggtaaactcgtataatggggtttgctgtgcagattacttcattacccaggtattaagtccagtacccaatagttatcttttctgctcatctacctcctcccaccctccatccttgagtagaccccagtgtctgctgttctgttctttgttttcatgttttctcatcattttgctcctacttataggaacatgtggtatttggttttcttagaacagggttttttgacctctacactactgacatattgagccagctaactctttgttgtggaaggctgtaccatgtattttaggacgattagaagcatccctgccctctacccaactagatgccagtagcacaccccgtcccctgttgtgacaaccaaaaatgtctccaaatgtcccatggatggggatctggggaagtagggagggggactcaccccagcttgagaactgttggcttagatcataaacaggaaaaaaaaatagaaaatgaatggagggagaattttgtttcattttgtttctagtctccatgtttcaatgtattatatttgaatttgaccacagacaccatttataagagattctgccttttagaaaacaaagtatttatcatccatcacttgttaatcaaagttcaaaagaatcccaaaagattctctgtaatgctaactccccctccaaccacacatacattcacacatacacagtactgcctagctgaactgaagaaaacataattaccatatttccatttcctctttcatcaaatacattgaccatactgctccagctcccacaaaatccaaaggaattctcaacttacttctatgcaactcaaataccacaatagctgcataactctagataggataaatctaagtactaaagcaagtattaaagtcattctcatacttcaacaaactgtggggaaagacacaaataaaccacaatgctataaaaagaaaactaagatttatgttttgaaacagaatctgagaaagtatgagaggaatgaaaaaattcaaaatcaaaggtaatctgaaggcactccaggataggggcaaaatttaaaatgtttcccctggaatgagagagaggaggaaattatacacttggccatatcctacaggaatagtctgcataatcagtctccagaatacataccatgggatggaaactgaaaaatcagagtccacgaaatagtaaacatccctcctaaacacctggaacaaaactgttccttactattgtttcccattttgatttttaaaaaaaatcaaatatctagaaatgaaaaactgacaacctgagaatttttaaaattctcataaaaatagtcacctcatgcttccaacatgtcagatcacacattttgtagaaaaatcaattagttggagaaacataataatccttttttagagtgcatctgatccataacaaaaggcttttaaaaatcagacattttaagtactcaaattgttcatgtataaatatggattaaggtctttatgattatttcaattatcttcaacagaatcacatattttagttcaactgggaatgttcatcttaaaaagcctatgcaacaacataatattagtttaatataagtggaatatctatatgccctacagcaacaaaatcactttatttcaaaattatagctattaacctcctggcccactgaaaataatcctggcccaatgaaaataatcccacaagaaactaatgctcaattatttttactaccaaaccaagcagaagaagctgtaagatctgtagcgacagcctgcttttcaagaagtaataccttgagactgctcaagaataacctccttcatcaattagtgtgactcaggtgggtttgagagggaataatgtccacaattccttggtcagtggccatgatgcccctcctcctcaagggcaagagatcagaacaagggatttgaacaagaggagttcaccagccacaacatatagaagcagaggaaaaaagagtactactggaaagataaaaactacatggttaagtcatgtcacaaaagcaagaggtttaatgttatcaaggccttcattcatttcagacacaccattgtttagcttccttcccaaaccgtgcacaaaaagaactgtcagcctgccttaagcatgttccttcttccatttaaacagacatgattcttttggttaatctctggcaatgatcgccatttcacaacacattcagcccacccggaactgatcaataccactacagacataagactagactttatccatttattaaccacaaggaaatgtaccattcagcaaaattctatacattacaaaagattatatttaaaggggggtggggaagacggacacaaacacacaaacacacacacacacaccccacagaggtacacaaagaagactaccaccctttaattttcctgtggcaaacgagataaagacatggccatgaaacctgtcaattcgcccccgtttccaagagtcccccgtaattctatgccacaagcttgtaactgaatattaaattttacaataaatagatccaatgagacttatttaaaatgtttcatctattgaactaactctcctgttatgtacatctgcacacctttcagctagatgctgtatttatttatagaatttcaaatacaaaagactagatagtttttccaaccactggttgcaaccatagaacgtcctcacaaaatcaaaatttccaatataaaatggcccgtttattcccccaaccttgagctaaaacctattttatgagtgtactatatttaacaaaaacaatttcacatgggttgttctaaaccgaaaacaatgcttcaatacaaagcgtttaaaataagtattccgtaggtaagcaaaatctatgccccaaaagagcacacaaatggtggttgaacgccagcacattaccaataccaagcggcatacctcttctgcactgggttatagttaatactccaacaacaactacaactatttttaacactgctggacgctgaagttgaagaaaacgtgaggggagacccagattaaattgctgataggatgtattgtttcccacagccaaaattaagcagcaactggcttgatctatgtcgtgatattcaccggtgaagcactaattaaacgatgacaaaaagcaacccttgttttggaggagcccacactaaatactcctttcagatctcaacctttgcataaattgtcacttgtggtatttgcggcttaattgcaacccaaccagcgctgtcatccagtgttatggccacaaaacatgactttctcacttccacaacaacacagcactcactcttatcagctcgccgacccaactcaaaaagagaaaaatgcatggaggtttccagatcacaatcagacctgggggcggggggggggggcggtggcagccgaggggcgcagggagtgggcaacctccccaggctccactggactctccgactcaacaccagccgcggcccccagcagcggccgccgcggccgcaggagcagccccaccgcgccgcgctccctgcacctacctgaagaacaggagataagaaagacggcaaacgccaactttgcagcagctcccattttcccgaggcgccggggaatccggaggaagttctcgctagatatccagttccctgggtcttcctcggagacaaacctcctggtgtaaaatcaaccgtcataaaacatattcggaagcccagaccaaaaaaaaaaaaaaaaaaaaaaaaaaacgctcactgggttaaaaaaaaaaaagaaaaaaaagagcacaacgataaaaaataaaatgcaccacgggggaaaaaccgccacacacacgcacaacacacaaaaccaaacaacgaaaagccaacaacaacaaaagcgggtttaaatcactgtcaaaatcactgtcagctccgctcgcctctcccgtctctcggaacaaaacgccaggctgaggcgacgaagaggcggcggcggcagcggcgtccgctgccgcccggacagtctgggaactgactgggtccgatgtccggaccgaccttcaacccagacacctaaagtccgaggaccactggcggccgagctcgcggcggtggcggcgaggcggctgcggcgcggggaaggggcggcgggcggcagcggcggcggcggtgcaggcggcggccaagttctggtccaggctctggctccagctccgggctccgggctcggccgcgttttcggtctcctggcctccgccgggctccgccccccaaacttccggttccggcccgaagctggaagccaggcgcagcggaggaacgctcggcggcagcggcggcggcggcggcggcggcagcggcggccgggcgcagcgcgcgtgccgggccgggagcgcgaggagattgtcggggaagcgaggcgggagcgggggaggggtgagagagcgagggcggggcggagtggagggcgaggaggcggggcggacggaggctcgataccgcgaggcctcggcgtccggcctgcttgggctagagataccgcgacaaaggggcgcgggcgcctcaaagtccctaagctgtggctgggctgtggccgggcgagtagatgcgggctaggccgggcacgacccgtttccaaatcgcgtccgacgggcctgtctggagcgcccacccaaagggtcaggagaagcccaagaggaagaggaccccgaggtggggcgagtggccagggacttctccaaggggcgtctgcggcgcccagtctttcctctggggggacgcctcgtccgctctgataccgaggagtcggtggaaggcggacgtgggagctgtttcgccgcgcccgccgagctgcccaggcgagctcgcgacgcgcgagctggtgtgtgcgcccccagacttagcactgcgtcccaccgctgcagcttctgcacacgcgtgctgtcttggtgactagaaaagaaaaagaaaaaactcacggaggaagggctgtccacccgctcaggatattcacgccatttatcacgatgcgcaacttgaatccattcccgccgttccttttacacacaaagcattgtgttgaaaactgttttgcacgtaataggtgcgcaaatacttgtttactgcgctttgaagaaaaaaatgaggatttcgaacgacatatttgatgatcagacaagtgattacttgtcaaaattttagctatttaagggcctgtttttaccccttaatccatgtcgattgcttacaagctggtgtgctaggcacggaatgggatccaacaggtaaaaataggatggatccctacctcaagtagcttttagtatttgctgtattcagttggttgcagaatacaaactagagactattgaaggtagttgctctgtcatttaccacactttagtgagcttcgtgaaggtagagatcttgattttttccttattttattccagcacccagaagtatcaa

SEQ ID NO: 8882 - DNA, 6000 bp, Homo sapiens
cgagactccatctcaaaaaaaaaaaaaaaattagtcaagcatggtggctcacatccataatcccatctactcagaaggctgaaattggaggatcgcttgagcccaggaggttgaggctgcagtgagctgtgatcaaaccactgtactccagcctaagggacagaagaagaccctctcaaaaaaattattttcaaaagtgcaaattgaagatttgggtgaaaatatgaaaaaccatgtctattacaaagaaactaagtttaacataacccctaaatggccctatgatttcaattagaaaagtgtactcaatttaaacaaaaataaacaggtaacatcattcacacaagtttttcactcttcttcagtgtttccatattcttctcattaccagagttctcttatacacctgaatgttatgttgccaaaaaaaaaaagcccaacgaaaaaataaactattacaaaaccccaaatagtatattatttaaatgtgattacagaaaacatttccaaatggtgtaatttttttaaataatgcattttttccaatactttatactaagtgtatacaaaaatgctaattatctagaactaattttctagtagagcaacattatacatgaaattacctacatatcctaatgattctaaagtattcacagaatcactatgtatttttaacttatgttgggtgactattttaaatacaaacctactccataatgtgatgtttccaaagtaacaacagctaaaagatcttatatacaatctgagaagaatccattattaaacctaaatttgtagggaactgtttatgacttagttacatttaagaacaaagttcctgataattatattcatgcagataagggaaatatggtaaaaaaaaaaaaaaaattagtatttctttccccacaaagaagcaagcaaacaaaaacaaactaaaagtgatcatctggtaaaaactcggtataaagacagagattaagagctgcctggctgactgagaaattaaatttacttaaatgtctaccttacaatgtctaaggtataggaaacatcttcaggttttcaattcaggacaaatgtttaatttgcttctccatcaaaaaagacacacaatattttctaaacagagaaaaaagctatgaattgaatattgaaaattttaaagtatttcaaataactgattaagaatgtgttatatacataattgttctaacagtaagactttgtaataataagctgcacaacagacagaattttattcctccaactacgaagtacttgtttctgggcatccaaattttcataaaccttgaagtgggcactgacgctgtaaatgtaatcctaaaataatttatcttccttcaaaaatctctgccatcgtgactttacataccacacacaaaaaagaatacctggaaataattcaaatgtataacaacaagtgtatgtcatacataagaatactatacagagtttaaaaagaaaactagatctacattgttaacatgaacgaatattcaaaatgaatgtgtgaaaaatgcaagctgcagaatacatgtaagagtatgacatccactgtgtaaagtttaaaaacacacaacagactacatattatttatggatacatacatatgcagaaaaggtataaaagcatgtacacaaagaatacacatcaacttcagaatagtggttacctatgtaggggatggagaatgtaaacaacgggatggatacaaacaagctttaactctatccataatgttcaatattacaaaaatatttgaaacaaatatggcgtaacattaacattgttaaatctggtggtgttacagtagacaccgattattctctgtacttttcaattttaatatatttcataataaaaacaaaaacattcacagaataaaaaagattgaatcactgctaccattttcagattaatcaggcgtgctaaaatacaatacacattttctttcccaaataagacaatattaacagaagatgttacatacttggtaatgtacatttttataaagtatccattgattactatattaaaaatacacaacaattaaagagcaggatttaatgcttctacttcaaaacctctacctttacttgagtcaaaggatttaatttcacaccacaaacaggctttccttgctttaagagtatccctttgaattttgttctatgtcatttcctttaaacgtgactcagaataaaaggtttcatgtacaaggtatagaagagacttggctaactacagttaaataatactaataaatacatcttagaataaaccgacagtggctcaatccaaaaatgataattatcaccagtacaaaaactttttttcagtctgaaacttttaacctgcaagagaaatacacatgatctttgtttaccaaacatgtttttttcttgtcaggaaagctttcccacctttgtcagattaatacttccttgatcacagatgaagtctttcaaattaaagataaacaactacttgcctgttgtttctgatatgcagtatttggatttatctttgattccaagagtagtgatcctgaaagataaaaaataatacatcataagtctcaaatgataaaaccctgaataaaaattagaatacacattaaagccgggcgcagtggctcacgtctgtaatcctagcactttgggaggcgggcagatcacgaggtcaagagatccagaccattccagccaacatggtgaaaccgtctctactaaaaatacaaaaattagctgggcgtggtggcgcatgcctgtagtcccaggtacacgggagggtggggcaggagaatcgcttgagagagagggagaggaggcagaggttgcagtagcccagatcgcgccattgaactccagcctggcaacagagcaagactctgtctccaaaaaaaaaaaaaaaaaaaaaaaaatacacatttaaaccccgccccccgcccccgcaaacttttcaagtctttttaccgagttggacatcttaataaaatgtattcgaattcacattttctctccaaatctaggcttcacatttaatctaaaatatttcaccctattcccatacacccttaaaggaaaaattaatctaaaaccaacaatcaaaccaaggaatgaggagactagatgactattaaaattttattgaaataaaaattttaaggtctaaatgaccacttcaagccattcgttttaacaaaagttgttttattgcattcccagtttaacaaataatgcaaattacaaaacaaaaacatcatgacagggattaaatacttagtatagaaattacagtgctgcatttatcctttcctcattaagaacaaaagaacaccttctgtagaagtgatgactatttaaaataaaagggaacaagcaagaatacaaaatatgtcaagactaaacctaagattatttttctaactgcctatatcagttgttcaaatcaagtccagattatactataaaaggcattttaattacggctctacattttgtaatttaaaatacttcacatgactacaataaaccaaagaacacagcagtttacaacctgctttggtgtcccaacttgcttagattgtaaggcattcactttctcatagcgccttctacaaaggcagcccgaagaaatgcagactacagatgtatgtgcttgtgtgtccatgtatcgtggcaacagtcagcaatacagccaggaaaacgtgcctttcggttttccccagcacctgtcgactgtggcacctggggcccgttggtacaattttttttttttaaaaacactcggaaagaaaagtttccctaaaccgtttgtactagacgtataatggataagtaaataaagggggaggaaggtgtcagctcctagggcgacatcagtacctagtctctcactacttcctcccttctctctcacactctcccctcttcaaaagaggagggactggaaaggaaggagtccaatccttaagagagatgggagaaggacagagagtctcggtctccgaggataagtccagtcaaaagtacagtactttgtttttgccgtacacaagagccagttcagaaccaacgcgctgtcccgaaggagtagcaacggtaacgggcccagggccctaaacccaagctgtgccccaaccagaggcactatcccctattctacagttccgataaccttaccgtcggactctgcccgaaccagcagcgacatccccttgagctcctccacgtaagtggaggagacgtgcccggtgcctcggtcgtcccattgccggtcttcgttcagggtatagaccttcactcgccgccgcgtatccgacatggtggctgctgtctccaccgctctagccgccgcctcctcgcttacctcgtccgcgctcctcactcttaggagacggtaaaggcagtagtggcggtggcggcggcggcggcttcggagaggcccgaattcaccatggctccaaaggttcagccgcgagaaggggtgacaagagccactgaggcctctccgcccggagccccgttacctctcacttcacccgcgcatacacccactctcccgtctctttgccccccagggctcgcttgctctcccgccgccgcggtaactactacagatccgccatcttgtaacccgactctctctgcctttctcttcctcctccagcaggctcgcacgggctgtcctagcaggggctacggcggccgacaagtcccatgagcagcacctccgcttctgcacgcgcttcccaggccggaatgctcggcgctctcgcgaggaggggtaccgactggggcgggagtacttcggcgagacttcctcctctttcggcccgacttcctcctctttcggccccgcctcttggcgcggggtcgcaattgggcgggaggttctcgcgatctccccgtccacgcctgcgccgcgagaggccgctaggtggaaggggacttcggttccgcacgtcgtcatgttgttggatggcaccagtatgtgacgttcctaggaacttagctctgaggaaaaaacaaagcaaaccggggaagtacgtagccttgaaccggagtaaccagggacagaaaggaaggaaaagggtttcataccttcacggaacgacgctcacttcgtccgcctgaggaggaaaaataagtttaaacctttctgtgaaaaagaacgtggagccctttctgccgaatggaaacccgctaaaccccgttatggagtctgctacaattaagcatctaaccaggaattgtctatggacacaactctccaggcaattcatgcagaaagtgtgttgacgatttcctgtttcttgcagagcgcttcaccgttaaggctcttagtagctggcgattgtaaagcacattttccgcttcatgaaaatacagtgctcttcttgtgtttgtaaccttggaaagtaagtctgctatgataagtttagggaagtggcggggagctactttcctaacatatctgtgattgttttgatacttctcagtttctcgcgggcatttcctgcgttctctatagggctctcttgcactgaataaggaaaggaggaattctctctgcattgaggctattatcgcacattgtgcggtggatatagtcacgcgctgggtcgtagtagcgtgtcgtttatttcagtccagctcactcttggtagaatccctttattcgttttgttgtttttgatagtctctctctgcttcccaggctagagtgcaatggcgctatctcgactcactgtagcctccgccttgagggctcaagcgatcctctcacctcagcctcccgagtagctgggaccgtagacgcctgctccccatccccgctatattcgttctttaatacagtctctcagcttgttcagctgccacttctgtgcagctcattagcctgatcggtgaaaactaggcgagacgcgcacactgaccctgcagtgcatcttgggagttgtagtcata

SEQ ID NO: 8883 - DNA, 6000 bp, Homo sapiens
cagagtcttgctcttacccaggctggagtgcagtggcacaaacatggctctgcagtcttgacctcacacctcagcctccccgagtagctgggactacaggcatgtgccactacacccagctaatttcattttttgtagagacaggatcttgccatgttggccaggctggtctcaaactcctgctctcaggcgatcctcccgccttggcctcccaaagtgctgggattacagctgtgagccaccatgcccagccaggaaaagcaactttgatattggttacagttacatcaggaaatgcaacattaaatcactttatgcaaaatagaaataaaaatcatcaattaacttttcccttggatactattccttttcattctttcctattaaattatagaaagttaacccaataagcaaaaaaggcagaaaccttcttgtcctacaggtgtgaaaagcacttttctcaaaattttcagacacgtcacctagttctcaaaattttaagggccttacttctcttcaattgagtcaagattttagcaaaatatactatgacacattggcttttcagtcgagatactaagattcagtaaccctctcagtttcacattctatacttggtagggctaagatatacacacctctcagaaatgtgcatttttcttgaagttttgaaatacctttaagtaaaagctgacacaaagacattcccaggtgccagcacctcacctcccctctctattaagcgtagttaaggagatgaccttgcctcccagagtctgtgttacatatttctttttttgaaattaataataataaatgcattggaaactaagattcatccttgccagttgcataaggacagcatatactatacttggcaaattaactaacctacatgaagctgcacagctcacagaactcccgggacagttctactgtcatagcctcatgataaccttgtgacatatccatttgctctactgatgctttttaagggcataccatatgccacacactctgcagggctctaagctctccctcaaggggctcacagaaggtgggctgtaatctgccttttacagatgagggaactgtgacctgcctctcaagacgatttatgaataagataacctgatcaattttttaccaaaaactgtattctccagagagaacaagaaaatctgcttactatagaattgaacactatttgactgtcttcaaaggtcccacatacagcggtctgcacagagagtttcctttcattctgacctgggtgatgcttttcagagaaactacgcacctgatgaaggaaaaagaacgagcaactcacgcagcagtcagtgaaagctcctgctgcaacccaaagattctccgtatttggagaccccactctaagtccacttactaggggacgacattaggccacttgcccaagtctgaccactgagcccaagctttttaatcagcctcatcatccaatttacttctatatttttgctttatttgtggggtaccaggaaaatctgatttattcattcattcctggatagtcagtgagcacctaccaggtgtcggggatgcatcagtgaaccaaacagagcccctgacctcagggagcctgttcttagcgagagtagacagaccaacaagaaaaacacacatgaaacatattattaggaaaccactgctatgaggaaaactaacacaagttgaggagacacagactaatggaaggaaggggtgggtatttcagaaaaagatgctgtagctctttttctgaaagaagtgcgggcagccataaatagcctggaggcaatgccgtgcgggtggagaggggcccgagggaacagtcaaggctgtccgggagcaggaggacagcaatgggcccaaagtgccacagaaggccaggcaggccgcggtaacagtggactttagtttaagaggaatactctgaaggctttttatttattttttgcttatctgctgtgatcttctggaatggaggcttttaaaaagcagtttagcgacacaatcaggtgtcttctgttttttaaacgatgaccctggctgccagatagcgaactaactccactggataagggtaaaaagtgagagatgtgttggaagaagactgcgggtgattgctgcaaaggggaaccttaccagcacaggacacttgtcagtgagagatggcaggagagccttattccaaggcctgcacgaaactaggttaacgtagcagcataaagtgccatgttaatggcgctcacgggttaaaatgttgatgtgtaacatatttaaacatcagatacttaagtatatataaatacatatttatatataggtaacaattttaaatatgatttgaattttaaatcaaaacttattttaaaaacaaaatgtgattctactgtcagtggaatcctgaagtgtctcctcaaatcccttgatatgaaaatcatgacacgacaatgccttagcaactccttaaggctttcttttcatcatcaacccagcggcttaggaaaaagcagcatttattaaagtctttgatatctgctgcaattttgatgcatgttctcaagcaaatcattcttgcctcaaaattattcatgggtggctcacgcctgtaatcccagcactttgggaggccaagtcgggcggatcacgaggtcaggagatcgagaccatcctggctaacatggtgaaaccccgtctctactaaaaatacaaaaaattggctgtgcgtggtggtgggcgcctgtagtcccagctactcaggagcctgaggcaggagaatggcgtgaacccgggaggcggagcttgcagtgagccgagatcgcgccactgcactccagcctggacgaaagagcgagactccgtctcaaaaaaaaaaaaaaaaaattattcatgcatcaaaatgaggccaatgatcctgattggcgattggatgctccgcaggctcatcaaatgcaaagatgtctcaagctgaacccatcatcctcccctccagatctgctcctctcctctcctctccctgtcaggagattctattattgctggaggaagccagaaaatcatgatttccttgctgtccttcaggccccacatccaatctggcaccaagacccactgtataccccacctgaagagctctctgagccagctctccaccagggcccccgtcatcctaaaccatgggcacagacactatttttttagaaactgatgaatgtgatggatcctcaccctataaaaatgcacatccatacaaagtttggcatgaatttaaggaattcacaaacccaaggatatttcgtggataagggaccttgtcctactggattccctaacactttaaatctacccccacactgcagccaaaacgattaaaatgatttctttcaaacatgaatctaatgccactagcctgctgaaaatctttcactggttctccaaagtcagagaccaaagtcaacgttcttcagcacgacacgccaggtcctccaggacccagctcctaatcacctttccacttccatcctccacaacccgggcacagttcattgatctcagcaaggcaaagctgctcctggttctcagcgcgatgctccacgcgcccctgctttgcaccgcccgggacgtccttcacctgtcaggcacttggctacttcttacctttcaaggcccgtttcaggctgcaggccttcctgggatctcaaggctggggtaagggacccacagcttgagtgtaccccctgatcacagcgccacgatctgctgtggtctctgatctcactctcccagctgcacgctggtcaaaggcggagctcggtgactcctctgcattgccagggcgcctggcaggggacgcgcttactgaagccgagaactttctggggaggtgacaccccaacagcgattcccatgtaccaaacgcctaccacgtgccatgcacggtgctaggtgcacagatccctctcaccctcaccctcaccgaccagcaaggctgcaggataacagcccctttcaaacgaggatgccaaagcgcccgaagagtcagtgacctgcccagggtcaccagagtaaggacggatgcggccaagctcggggcctagggagagccggctccgaagttcctcccagacgccagcctgcttggcacctgtctgtcaccgtgatggagcaccttccaagcgctgggtgcggaggatgtgacagcgaaggggacagacaaccccgaccctgagaggcgggaggcggccgaagcggggcagaggaagaggcaaggaaacggcccgcggccgcccgccttgccgcccctccggggcgacagcggctcgggaagctgcagtccgcaagcccacgcccgatctgcgtggttccaagctcctccacccgcgccccgggagcgcggccccgcccggaaccaagcccgagcccaggcatccctcctccgcccgccccgcggccccacccatccttcctggccgtccgcgccgctctcgggaccgtgttcccgtcaggcctccgcgagctcggccccaagcgggacgagggctgggcgctcacctcgcagccgcgggcccatccccgggttgcggacttcggggtccgcgtgggagtgccgcggcctttggcgcccaggcagctactcccgttcccgctccagcgccggcttttccagccctcctgcccacgtccgccgggccgcgcctccaagactatgcgcaggcgcagtcctgacgtcctacccccggttccaagaccccaagtggtgggaagcctcgcgagcggcgtcccccgaccggaagtcgaggggaggagtctagtgccgcgggctccggagtgacggaagttgtgctcttggtgaatggggttcttccttttttatttaccggtggctgtgcttccaatttaggaagaccccggcgacctgttcctcacccccgcttcgccctcacactttcgggatgtctgcgattcctgctgaggagagcgaccagctgctgatccgacccctgtaagggaccagcgagagagggaatgaagccacgggctgtgaggggcgcgaggggtaaccggagactggcctcctccgtcgcccgcgctcccacctaccccggcagcctgcctttggtccgcgcttgcgggccaggcttctcaggctcgaggggttggaggaccgttgatcggaaggggcctgctatagagtgaacgggattttgctttttcatcagtttcaggggagggtatgttggagtcggaaaaaaaaaagttttacggggccaccgctcgctttcgtacacgctaagaagcgttttcacttagcacaagcacggatctctgcgcgtcagggcaagctgtgagggagccggtgaagcttatgaccgacaggatgagaggaggacctgaatgaggctacagccgtgcagggaagaattaagtctgtttcttaacaccagggcttcacatgtgccagaagttagaaaatattagggacttgccgtgagtttcgatcttctcagctcaggccctagtagaataaggaaggtgtaaagctggagaagagaaagtgcagaggtgttagggacaaaaactcagccctcgactgtccataaggagagtggcctttcagtggacacgatcctcatcagtcgggaatgctgctgaaggggagatgcaaatgtagagaacttgaattcctacagatgagcatttcgaacccacaacatgtttattgttagatactagttggcacaacatgaatatacgctttccaaaaggtagaaagtatctcctttacacaatcattcagtaaggcttcattgagcacctgcttgggacatagtccgtttccttctgcttagttcacacctgtcatgtcttcctgtgatgagcaaacactgagcaagtgtcaagcaccacacatggggatatagacgcaacagagggcccagttaattgctctcgctcttttggagagaattacagtgcaca

SEQ ID NO: 8884 - DNA, 6000 bp, Homo sapiens
agactgagctttgccttcacctccatcccctgaaggctttctcaactctagctcccactccctggaagctgcctcctctcctcttccatagcagccagcacttgcctaactggacttattaactttttataactgttcatttacatgttcacatgccaccaaactgagttatttgaagacaagaatttcaacttagcttaattttgcagcccaaatgctatgcctgacactgagtagaccctcaataaatgcttgttgaataaacaaaatcaaactgtatgatggccaggcacggtggcccctgcctataatcccagcactttgtgaggccaagggaggaagatcacctgaggaattcaaggctgcagtaagctatgatcgcaccactgcactccagcctgggcgacaaagcaagaccctgtctctaaaaaaagataagaatgaaaataattttttatgaaattttcaggaactagtaaggttaaaggccagattctggttctttagtattaccattaagatgcaaacacaatctctctttaccacctctaattgtaatactaataaattcacaattatcatgattcctataatcaggctgttgttgagagccaagttaattaattaccataatatcaaaaaccagttcatcatgaaactatatatatatttatacacacacactttttttttttgagtcagggtctttctctgttgctcaggctgcaaaacagtggcacaatcatagctcactgcagctcaacttccagactcaactgatcctcccacttcagcctcccaagtagctaggaccataggcacgtgctaccatgcctggctaatttttttttttttttttttttttttttgtggagatgaggtctcactatgttgcccaacttctatcctcaagccatcctcccacctcagcctccggaagtgttgggattacaggcatgagccactgtgcccagacaaataactttctcgaaccaaccaaacaagatatttcacagaatatttcctcccttaggcaaaatgatacaatttcaaagtagctgctacactatcaattaaaactttgccttcccaaatgatgagcaaaccaggacaaaaaaaaaaaaaaaaaaaccaacttgcagtttcacccttagataagtggggaaaaatccctcaactataaagacctgtccaagggctgggcacggtggctcacgcctttaatcccaacactttgggaggccgaggtgggtggatcacctgaggtcaggagttcgagaccagcctggccaacatgtgaaaccctgtctcaaagaaaaatacaaaaattagccgggcatggtggcaggcgcctgtaatcccagctactcaggaggctgaggcaggagaactgcttgaacccgggaggcggaggctgcagtgagctgagatcgcgccactgcactccagcctgggcgacaaaagcaaaactccatctcaaaaaaaaaaaaaaagacaagtgtggtggctcatgcctgtaatctcagcactctgggaggccagggcggatcacctgaggttgggagttcgagaccagcctgaccaacatggagaaatgcaccgctactaaaaatacaaagttagccaggtgaggtggtgcatgcctgtaatcccagctactcgggaggctgagacaggagaatcgcttgaacgcaggaggcggaggtttcagtgagctgagatcgcgccattgcactccagcctgggcaacaagagcaaacctccatctccaaaaaaaaaaaaaaaaaaaaaaaaaaaaaaaaaaagcctgtccaaaacaaaggatgggtagaggcaaaaataaggctgaaatccttcagtataattctctgaagttaccttagttaataagcaacagagaacaatggcagttaaacctgatatcttcacatttaaaatacaaaagcaccctttcaatatccagacatagagctccttttttttttttaaccatacttccaaaatggttgattcttttacattctcattccttcaatatttgtttagcacttactctgttcatggtactgtgctagacctcagtcatgttattaaagaaaaaaaaaaaaaagtcagccatagggcctgccctcttaaagctcacgtcctaaaagagaaagtagacattcaactaatagtcaactaactgtttaatacaattgcgttaagtaacacaatagcgaatgcaagtgtcaatacataacacagaatccatcccacgctcttccataccaaaaatcaattgtcttatagtttcctgcttcagaaacctaatttccactccccgtgtgcacccctttcagcagttattctgtatatctgtcaggtttccaactgtagctctcagatatacctctagggaagataaattaaactacttcaaaagtaatttttccaccaactgcttttgtagtgtcagttcttctttacatccctcttataaagcatcacatgagggaatacaaaatatcttttgagtgttttcaatctttacccatttatggggaaaaaagactttttaaaataagcatttataaagcgcttactatctgaagacaacataaggggaacgcaacgataagaaaaaaagatctgtgagatttgtgttcaagcaaaactgatcccatggatttttcctttggataccactggattcataattttaatataaatgcagtattgagtaattgcaatagaagaatatttaggttataaatgtgtgcttttttttccccaaggaagcctcattataactaaaatgatatcaacaaactattttagtgaacattggacgcttgctaaatcgacctttgttttccaggatgataggaagtcatctgctgtcagatacaggaacttatataataaaaaagggggaaagatcagaacagaaaattacacgaaacttctagtaaattaagacacttatttagttgaaaatataaatctagggaagattctttataagaaaaaggagatttcctattataaacactgctcccattgaaatagctattttattggcacttagaaagtcagaccctagtaaggaagaaaatgttttatatgtcaatatttaccctgcagaacagacaacaaaaggggagtagagcttaaggcaaaacaggaggtatctgggttaacagccttctaaaatgaaagttgaaaagcactggcccgagttaccaagaaggctctggaccctctttccacttaaaatgttaagacaagtcatcacctcggttcagaatggtatggcacaatacggcttgaaagcagagaaacatgctatgtgaccttctaaggacccttgctttttttttttttaactcgagttaaacaaaatccattatgactttttcagttattcattcattccacaaatgcttactgggtgcctagtatgcacatagcactgtgcttaagccatgatggtccacaagaaaactctaatgagttgggcattatattctaatggcgagacacgctaaagcagcaattccataaacgaacagagcgcacatttaagggggaaaggggcacgtagggagggcttctttgaggaagcaatatttaagctaagatgtgaagatgaacgggtaacaacaaggatgaagggttaaagcccatatttcaggcttggtcgactggatggttagagtcattcattggtaaaggaactgcggatgggaaccagatttggaggaaagttaaccacccgcatttatttactggggtcctagtatgttgccaagcgcttcacaaattcctctaatcattttgcacagcagaagctattactttcagtttcatacacaaaagagaggctgagcggggttaaaatgacgtgcccaagacgaaataaagaaatctgacttttgtaatcaggtttgtatgtgctcgaaagcccgcgctctttccactccacagctccttcctgtgcacctccctttcatctggtggccctagcgccacaagctgccgcttaggaagtccctgccgggagcagaagtggagacatcagcaggatggcatcggcaagtcgctcccctcccgggcctcatctgccaaacgatcatctcctcctccgaagttgtatgcatgacaggcgagtggaaacttcactaaaatgaaggcgattgacacaacagaaggaactccatcctttcgggggcttacgaaaataataagtttaaaaaaaataggaagggaattccctcgctccatgatcactgagcgctctcctaaggaaaaggaaatctcccggggggtgccgactacgggcggcgggcttaggatgctcccacgctccccgacccccaatccccaggacccgcaggacctccggaggaacgcccgccagcccgcccggagccacgcggcacaaggtgacacggaccgcgccgcgcgggcccctcagccgcctgggcgaggccgggagcagggagaggggcatccgccggcccgcggtaccttgtacttatcaaagccagccagctgctccgggctcacgtattcgtagccagccatgacgacccgaaaactgagcgcccactcggcagcgactcccggctacaaggctgtgacacacaagcaccacaccggctgggcaaggatggcaaagactgggctgcccgagaaggtaggagagccgcgctccgcccaccgcgcacgcgtagccgcctcggccccttcggccgcctctcagtgcgcaagcgcagcccacgcttctccccgcccatcgagggggggttgctagcccgctcgagcggcccgtcccccgacactgctgttgtccaatcggcgtggatcaggcaacactaagtcccgccttccagctctcttcgtcgcttcatttgctagcgtcaaaattggtgagctgaggtaaggcaagagagggggtgaaaggtcaatttcccagcgggctttgctcccggtcccgggggaaggtgggatttctgtggtatccgcacttgcgtggtgatctggggtataccgttttagtcttgggggtagagtgactgcttgcgaaccagttcagcagtgcctcaggtaagaggacttagttctcccgctgcagcgaagtaaaagaggaaggaggtctgtaccgcgagccgctcccagctcctggtgcggtgcgctgcgtgccgtagaaatttagtaaacgtggttagatgtagagaaggccgagctgctgccggggccacgggagtctttgtgcggtcagcagagggacttgaaagacaggtgaaaggacattggagacaagcccctcaggtctatgttgcttaggaaccttggaccgcctcatcgcactccgctctatcaaaccgttccaaattaagattgctggtgtctcccgaccagataaaagcagtgatctctcagtctcgacgagtccttaaatgcgtttgcaagaggtgttttacataactggagcccagttaattgtaaaacaaacaaacaaacaaaaaacactagatcaatggctagtgagtatctactaataaaattttataatagttgctgctttttattgagcgccttctgtggggagaacttcacatacattatcaaccccataacaacactgaagtgaaaggcattatcccctttttcagattaggcagcctgcccagagtcacttagttacgaagctcggaaatgatcgacccaacatgaaatgagttctgtgttatgggaaaccactacttcagggagcctttcagtctctctgggtctctgaaataagggcgattattttgagatacttttatgttcattcgtttaacaactatttattggggacccgagatatgccaaacacagtattattactacatgtctaatctcccctcctaaagcatgattcttagaaagtaatagataatcttatacctggtatatggtagataataagcttctccccgccccctgagacagggactgactcacccaggc

SEQ ID NO: 8885 - DNA, 6000 bp, Homo sapiens
agactgtactgcataaatacgtggaggccacagcccgaatcagcagcgtcagggggcagggaaactgggtttgggatgagaagtgggtggctctgggggcacgtcccccagtgcttgtccagagcccagggacccacagagccagagaggggaccagtgggccagcttggggtctggctacggccagccctgcccagcgaggctggcaggtggctctggttttgggggagaagtggggtggggtgtggccatgccacggcccacggggacagggtggggtcaggtgctgttgccctgctcctgttcaaagagtagcatggccagctgggttcgggagccgaggccctcaagcacgctctggaggcagcggtggtacaggtcctcactgagcctcgcgctgcacgtctgggcccggtagcgctgcagcagcgccggctccaccgcccgcagcacatgcagactggagaagtggaggaacagctcgtacacatccaggctctccagcagctcctcttcttgttctgaggctgccgccaggcgcccacgggctgccacatagtcggagttgtagaagcaggcctcgctggctgcctggcgatcaaagcggccagtgtcacggcccagctctgggggcccaggcccttgtggtggggccacagctgggtggaaggcttggaaatgcatgggaaagaaggcctgccagccggagatggcatgcatgcggcagcggttcaggaagtcaggcgtgagcaccgtgtctggcccggccagcaggaacagtgtgtccagcgggtgcttcttggagagtagatccatgaggcgcagtggtgagggtgcggctgtctgcacactgagccatggcacccgggcaccggggaaacgccgctccagctctgccacgtgggccttgacaggtgcgaagacatctgcatgggccacgcgctgggcctggcgcggctcatacagtagcagcagggtcagggctgccgcagcatcaccaggctccagtgctgcagtggcaaaggcctccaagaagccaggggccaggtcacgctcagccgcagctagaggcagcagcacagtgagacgtgaggcctcagtgacatagggcacaggcaagatctccacgcggctcagcggccggagcagctgcactcggcgagtgaggggccggcggcctccctggggggtcagtgcctccagctgcaagtccagcgtgtattccataccccgggccggatcaaagcgtcggtagccattcaccagctgctgcttctggagccgcaaggccgggtggtagcggcggttcagctcctctagagctgtccccagaacatcggccacatcagcccggtcagccccacgcagtgggcagcggggtgagccatcggcgcaggagaaagcgtgctgctccgtgaagtagtcccagcgcagcacctcaaagcgggaggccgggcgggatggtgctggaatacccacgggccaagcagctgcctggtccccatcaacggccagatggctggtattctggatctcccactggatcagagaaacaggccatcagcaagggacagattacagggagcagcacacagctgggggactgggtaggcagtaggtgccactcaggatgggcccctcatcccctgccaacctctgcccatacctatcatttccccagcatagacagccaagaggctcatcagagaatgtagaaacaggcaggggctgggaagtagttttgttctgtgattctagtgctaacttgtcatttctctgggctctctgtgacttctcagatcctgtccccgtcactctgccacccccagacctagaccatacctgtaactcctggatctcctggtacgtgcgttccagttcagctcgggcgaaagctttgtgcagctggtacatgtgcacagggtcacgcacagggtgggctgtcagggcacttcggaaatgagggtccccctcctgcactggctccccagggctcagctccagatggctatagtgcaccccctggggagaggaagggaagggatctgtgatgagctggcattgtcttccgttgtctcatagtaagtgtctcatctcctcagcctatgacctgttgtggacttgcagtctgagggtttaagtctaccttgaccagttgtgagtctgtgtgaccttcagcatgcctccgctagctcatctgcgaaatgggcatgcgtcctgtctcagagctgtccaagggctaaaataataactaacatcaaatgcctattatgtacaaggctccctgattttttctaatccttgtaacaaccccgagcaataattatttccattggcacaaaggaagatactgaagcccaggatatttagtaatttactgggggtcacagagatagaaaataaatgtccgaattggcatggaaaagcagacctgtatctccaacatccctttgcctctcagagggatttgaacatgacaaggaggtatcagtgggatagcttatcatcccacctcgtggtcaccagtgcagcccaccccggtggcatcgagaatgcagcgacccagccactcgtcagggcgcgcactgacgatgtcgttgcggcagccttccaggtgggggcgcagttgttgcagcagcatgcgcgacagcagcaccccaaagcctccgtggcagtagcggccgggggtgggctctccgccgatgaagtcctggggccggcccaggtacaggtgggcggcggaggccaggctgaggtggccagttaggcgtgccaggccgtgcgcctcggtgtaggtggtgtcaggcaccaggaagaaccagtcaaagtcgtcgccgtgctgctccagcaggtggcgcagcgccaggtgcaggtgtccaatgggtcgctcctcgcctagcgtcaccactgccatgccaggtggggcccggcggccccgtgcgcccgtcaggaacaccacacgctccagccggtgccccagcgtgcggttcacggccacgcccagcgtgggcagcgtggtctgagaggtcagcaccgccaccagcagcctctgcctgatgcccagctccgtgctgatgtagcgggtcctaggggaggagatggcacaagcttatcaaaaggacaacggggcggggggtgggggggaggtggtcagcacagaccctggcaggtcacgtcttctctgtatctgttctctcacctatgaataggttaaaaataaaccctctctcccaggggtcatgaggatttaaacgaaatggtcttaaacaggtagtgctttgcatttgggagatggcaatacccacccagataggagagagatattgtgggtctgactccggggttcgctacttagtagttatgtccttgagcatgttatttaacctgagccatctgtaaaatgggactgattatatctgtttaaagcacccagccaaacgctggacacaccatgtatctactcatttctatataaatatgccattatgccacaaatgcctcacataaatgacataaaggaacgtttggcataggggtgtactgagtgtttttgcggggaggggcaaactgcactcaggggctctaggaacttaccttttggtaaggcagaaggtaaattgcagaaccagcatttgaacccaatgttacttagaagttatttcaactcatcagcagagacattaatgagataggtacattcctccctcccccatctcaccctgaggtggcccttgtaacccactcaggaacaagagatccaggtaaatcctagttctctcctttctcttcccctgtctctatacactcaccctatatataagtcatttctctaacaccagcagcccagccagggagctagtaggatctctggggcgccatcgggtcgagccggtttaggacacagtccagtaagttcagcccaggccgggatagggcccagagaaagtctcggactggccccacggctctcgggaaggcagggccatcggaagttatcggggcccaaagacttcctggctcgccagccccttccttccggagcctgacccgggcccgggcgacctccccgcgcgcttcccggccgctgcccagggggtagagcgggcgcagccgatcactacctgacggcctttttggcggcctggccgggctgtgcagggtggtagggcaagacgcgcggctcccaattctccccggcgccttcgccggccccgggcttctcgcgctccgctccgggctgcaccgagttgggccggcgcgccgcgttggtgttgccgcgcggcggcagctcagagtctccaggttggggcgggcctgggccgcacggctcctccacccaggtgacgctgagcaggctcagggtgaagcccagggagatgcccacggccacgggccctgcgggccgcagcaccgacagcagcagcgatgcccgcatggcgcccggaccgcgggtccccggccccggcgaacccccagagcagccagaggagtctccgagggggcgggaccggggagggggcggatccggagggctcgggccccgcgggcgggcccgctccctccccgcagagcagagccagcggcccgagccgaatccccggagccgcgcctcgattcccctccagcagctgctctgggctgcgcagggttcttgcgctcggcactggagcctcagccgcggccgcagctgtccgacgtgtcactgcaagggccccgcccccggggtggggtctcgggctctcgctaccggagagggaggagaagggggaggttaaaggggaaggacccccggaagtgccccctcctcagtgcgggagagggagacgccgggggcggagtcccctgcctcccgcggcgtggttggtgcgtcccatgtgacgtcagaagcagcccgcccctgcctggatggtgcgccctgagtgacgtcaggagcagaggccggagctgtccatcagcaccaaaggccgcgggcgggctcagggcatggggccgcggttctggggcggcccgagccccggctcctgcgccttccccttcctcaggcccagcccgagttcccggacgccgcgggactggagtgccagccggtgttggacgtggagcggcgccgccaccgcgccgacaccattctctccggcccagcagcccccttcctcgcacgacggactttccctggaccccagtcagttggagcctctggcgccccgcaaccccggcccctcgggcctctgcacagcctctttcactcagaagctcaggtcgcctccagcccaggtaaatcttggacaatcccatattgagccgcccacagatgaatctcttggctgcctccttctcactggcagcacgctcccttcatccccccgactcccgtccctcttttaacttcatcccagcctccactagccaggcacttttgtttccctttgtctttgctccccactccagagatgcttccggagctgcacaaatgtggatactattcctttgtccactgtccttgctgagttctcccaatccctctcccacccccatcctggtggggacccaggactcctccgtgaccccaactttccctctgtcaggttaacttgggagggtgactcccttctattcccagcactatgccggggactgtggcaacactgcggttccagctgctgccccctgagccagatgatgccttctggggtgcaccttgtgaacagcccctggagcgcaggtaccaggcactgccggccctcgtctgcatcatgtgctgtttgtttggagtcgtctactgcttcttcggtgagatccccatctcatccctcacctgggctccccagtgtttccccgagttctttttctgggcccccaagtcttctctgaatccctctaccatcatgaataattcttccttttctttcatcccacacatttatagattgtctagactctagattataggaaaaacaggtttttggattaggcacacctgagtgtgaatttacttagctt

SEQ ID NO: 8886 - DNA, 6000 bp, Homo sapiens
taaacttatatttttgaagatgttcaatcagactacataccaagagtttcatggaaaaccagatcctggagcaaatattcttcttatccatctcatattaagtcaggagctggattttcctgacactgtaaatgtttttttatatgccttgccactgcctgcacatgcttgttgtactttgaactttagaattctgtcttgaacaggtggtaaaattttaggtgtggcaatttcagtaaatgtaagcaaagaaatgctgcacgaaagttgactaaacttttgttcactcaataagtattttccttatatttgcatattatatattcatatttaattagtctttataatacctaactggacaataaagatataagtttcacgttgtgaaaaggctaggcaatttgcttaaactccctactgttttacggtttataacaaagtttctccattttgcttctagctcagaatagcatatactataaacatgaatatcacttttataagtcatatatacacttttacccagaggacaaagaagtagaactgtcataaagaacagatttagaaaggcaaccttctcttacccttgagtgtactactgctttgttcatccagtgaggctcccaaaggtgtactgaaaccatataaacgtataagccttagtcttgtgaaaggctatttggaaagttgtcattacacagccttacttaaagagttacagctcaataagcttctaatcacagttaaactctcctccaaaaacacacaaggaatgcaagtagattacataagtaatattcactaactaagcaaatacctgccatcaggtcagttcagcaggaatgatttaatcatgtctgatgtgctaacaattaggggcaaaaatggcaatgacaaatgatttgaattggcatttttctttgcaaaaaagagagaatgactgacaataagcattaagaaaatgtctgttcttctcaaccccttccatcaaaaaagaaaacagaattagaagaaaacaaatcttcagtcataggtaacttaaccttaataaaattaaaaagtgaagagtagttggaaatgaggcccaatagtttccttaaacctcatctgttaatctatcactagcatttcagagcatcacctaatgcctcccccttgccccaacaactatctttttatgtaaatgtagaagcttgagattcgctttgtttttaagctaaaaaatatatatattcttcatttaactttgaaaattactaaaaagttgacttgagaatcaacattaagattagccattgctaaaattttttcattcttgtagttcaaatacagatgagagaaatatctttttttcaaatacaaaaataaacacttttaattctctgaaaccaagttatagtaagaaacacattgttttatattggagggtctgttttgtgatgcacacctttcttcagtaacaatttatagctgttaaaaattcacgagacatgggatcaatcatgaaaatatcagtttcaaggaaatgttactgaaatgccaattaaaggttaaaactttctacaagtatactaacaatggcagctctttaaaacttagtgcttttgaaacgtaaaagaatcacaagcaattaccataaatatattaataaaagctttaatctattttttgcatatattttaataaaattctaatgtatgtctttaaaaagtcatccttccctgatggctactttcttggatgtaaacattgtattactctgtccacagatgtctctactggtctatgcactaacagaaaatggtagataagcagagtaacaggaatcctccttcgaaaacaaatatcttacttttatagttgctcccttccaaattctatcaaaatctctaccatttcttaaatgttaattcaagcagtttttacttagtccccccacaaatggttatcaaaataaagactccctttaaggaaagaaaacacggtatctttattcaggatatggacggcactaagaaacaaagactatttgagaacttatcaagtgggtaaaatgctgtcttcaggtcatttgtacataataaacaaaatacatagatgcccaactctgagaaggaacttgagttgttatttaaaacaaaaatacagatgcaacatatcctaagtcgaatctgtgataatatagccaagattaaaagactacttgttctagctttcctggatacaaatgaatgccactcttgtgtagaataggtgcaactgtaggaacaagaaggtaatccatgagagaaggagcagcagactacagaatctgcccacataaatcagtattggcaacaaaacttctgaaattgtcagggattgactgtgccctggtgaatgtcaacatttgcctactgcatttgtctcaaaaaagatgcacttatttactgtctaattgataggatctcttatacaatcttaaatcctatatgtcattaaactatagtgtgattcttctcttgttcttaatttttaaaattcttttgaatatgcacttgaatttaaacaataaaacattataaatgtatttgtaatgctaagcctattttaagaaacctaaagtaagccaatactgtacttaggactgtatttaaataaagagtcagattggaggctttaaaggacttaagtaaaagttacaaaacaacttctcaaacacatttctaagtggaaacctgaaagatactagttttatcagatctcacccaaaaggtcttgaacatgtacattcaaaatttcaagcttttacattatagactattttagtatttaacaattaaatgaaccaatagcacattaatacaatttcttgatccatactttgagtgaagtatctaatatctaaggcttatctgaaaactgggagattgatttacagctagattgtaaatctggggtccaaggacttcaagcagtgtatttgcctctgtgcatctttaaacagaagttattccatatatgtcatcatatttcagaagggtctatgacacttccaataaagggtacgagttctgtaataaagagtgttcaataaggttccagtcgattcatcaaaacaaggcattaatatcatggtagccaatatcttgtctgtctttagaggaggcaaactggcatatgaatcactttccacaacaaaacaaaacaaactaccctaactctaatatttgaacaaaatattaagaaaatctaaattgagaaagcaaaaatatgctcgaaagcaaacaccaacaaaagtttaaaggctacattcctgattttacaactagcaaagtggaataagaaacaagtacattttgctgtagtcagatttacgtgcaacatgattcatctcctctgtattttatcaaacatttttgtaccagttgccaaagcatgtaattaaacagatttatgcagtctgaatgcttttaaaagttctattccctgagaattccagtgccatctgacaattccatgttcaagaagtaaactataagtacaaagttagctagttttaatagctccccaaacagaaacaaaattaaagcccatttagtgtagttaggtaaattaaactcgtctaaaacacatttgaaaggaaaatgattccgtgccagttgtacagatgccaaaactaaagcaaaacaaaatatcctgttcgagatgtgagaattctttcaaataaaaacagaacaaatatggcatgattatctgttctggatttctgatctctgatgctaacacgatgcgtgagtagctcaagtcctaactgtaaagtcaacacggtcaccaaataatcagcggtcacagcacttccatttctaatcgcttagaggaggaagctatccgccggctcactttccggtttgtagcttacaacggtcgcgggacccacagggacgcggcccgagtggctctgctccggcgtcccgtccgcacggatctcccccgggacgcgggcggaccagggagcactcaccggcagtccttgagccatatcgcgatcttctcgttgggcacgtttcctgggggtagagagaggggacagcacgttaccacccaggagcactacgacggcggagtcaccctggaccctcccaagtaggaaaatctaccacggcaaatgcagcctaagcgacacgtctcagtgtcccttggcagggaaatcggatggcacccagttgtctgtgttgacgctgggggcgcctcgttcagcgcgcgcgtttgaaggtcggaagtgtcccctctcccctcggcctaccgtgcccgaggctctcccagaactcgtggcaggcgcccagggcgcacgagactctccccagcccaccagcctccccccggagcccggccgggagcaccgacctcttccccccgctgccggcagctgcgcgccggggaggtcctcctcctcgtcctcctcctcgtcctgcgtcgtcgcttctgtggacagatcctccgtctccgacgcttgccaggagctgcggcacttggcccaggccttcctcctgcgactcgccacttgccactccagttcctcctccgcctccgccgacgacgacaggggccggtccatggccgcactgggggctccgctaccccagccggaccctgcgcgagacaaggcggcggcagggacccccgcccttgctgtcagcgcccggccgggcagggggccccggggagctgaagcgggcgccggaggaggaggaggaggaggaggggacagggagggagggagggaaggaaggggagggaaggggcggagggccggcgcttcacatgaaggcggccgggcgcgcgcgggagcgctagtggcccgagggagcgcggctgggagccgagcgcccgcccggcccctgctccccaccccctgcctgacgcgcccggagcaggccggccgctgcgcgtctgcgcgccttccctcggcggcggcccacgcccccttccggccggggccgcgcggggcgcggtagggcggggcgcgcccggcgcgacgcggagcaggccagcccccgactactgcccgcggaatgggcaagattagtttgttaataatctttcctcctctcctcctcctcctccctcacctaaaaatagaacgtaagtggggaggccaagtctcacaaaacatcccccgcgagaaaacaagtgtctgcttgggcaccctgaaacatacacttgaaagagtcgcctgaatatagactctttagtgtccaaggaattggggtaaggacggaaagaggtgcttgattggtgttgccaaaatgtaaaaactgcaaaagactaagcttcctggagtgctactttcatacttaaagttatttatcgtgtttatgttatgaatgaaaatgaattgtgaaaggatatttaatctggaaatttcacattgaagttggactttggtgagggagaatagaggaaacaattgggacaatgtggagatagttgcttggattttggtgagacagcatgatacaagaaacaaatgatgtcagggttcaaaactttttaaagccagctttggcattccgttttgttatgtttaaattctcattagcaaaaatactcaaattctatccaaaaccagacacaatgtgacagacctatcaagcagcattgttcccctaaatgttacatctgaactatacatataagtaaggcttccaatattttattgtacttggctatgctctgaagaacaagttagaacactttttaaaatcttaacgtgattgaaaagaatattttgcgtagacaaaatattttaaggaaggaattatttttcatttgaaattaaaatccagagcatagtaaaattcctaatggaagcattcgaattacaaggtaattaagtgcattgtcattgatagctacaggaaaccataacttttggagaatttggaatgaagaatgctctggagatgaaatagtgcctagtttttgtccaggcatttacacataagtcatagactacta

SEQ ID NO: 8887 - DNA, 6000 bp, Homo sapiens
gatctctgacggcacacccaggatggccacggctgactggaaggtggccagcagggacagtgccaccggaaggcagcccattttgcggtccgccatcagcagctcaccaacagtatgccggccccagccacgacaagcatggtagagcccaatggcaagagagagaaccagcagcaggacgaacaccacatagtccatgatggagaaggtagacatgcccacgcttgtgcccgaggttggggaaagaggggctgaggtgctcacccctacactcatatcctcactgtgtctgtgatctgcagccagttgctgctccagggctctggggtagggcaggggcggatgtgtggctacaatctggcttccagccacagtctcacagtcttcctccacggagtgatactgtccagggtgagctgcaaaggaattagctcttagtgaggcctatctggccttggtagccattcacccttgggccttgtacatcgcatgccatcagaagtggaccagccagcatagtggtagcccttcaaggtctagaggccctggtatgggtttggtaggggacataagtgagggagaagcatcagagtgcgacagccaggagacaatataacttggccaggacctttgagtatgcacagctgtgaaattcaacaaccttcttaggtctccacccgagtaccaaaagaaaaataaactctagcctaagtttcttagcagaatttcccagccccacttgaaggcacagacccagtcactacaatacactaagccagcagagcccagcctggcgccacagcccagcaggaaacacagcatggagactaatggcagcagggcttcccctactgcccctggcctcggccctcgcctcctgtgatccccagtgtcacccttctaactgatcatcagtgagactgcctctgtggcagccacagactccatttcaggcgtccccaggccaacccctttcttaaggttctccccaacaccactagataagtgctgccacccacctctcagcccctctacctgcaacatcacagtcaacagcagacgcaggaagagcggctggattcaaaagtgagaggggaaaggtgagagggcaccatgctggagtcagggtttcagaatgacgattctccattctggagagaagcaacccagtcacggagctgagaggcaaagggaccagccaaagagagtggtcgtatcctgctggggacagacacctacctggagaagcaatccctgttctgaggcagagttgcctggagctgcagagctgaggatctggctctatgagtagctgaggtgagagatcaggaattgggggtggggtgaagctcagcagtcatttgttctggccccttcagggaaccaatggctgtgttccaaatggccctatcaccctatggcccccaaactccaactcagccctagaggctccagaacagggaagagggagctcatattcaacagcattcctagatggattagcctttcagcctaaagtactcttggcactctgtgcgggagggagttggaaagaaggaactgaaaacatgggaaagttgaaagttgattttctaactcctgcacaagaaatgttaatcccccaagaatacaccacaatcctcagagaaagagggaagggatcataatatttaaaatcttaaatctttggacaccactattacaaccaaccccccaccactgacgatttcacagataaacacgctaaggctcagatggttcaagtgacctttccaaaagcacagagccgactattgtcagagcataaattagaacccaggtctagggattcaccatccaccctgtctgttctccaagcgtatcatattgtcttcaaaggcaatcctctggggtacttattggtatgaggaaaaaacaccagagaatgccatgtagttacacagcctaacatgacgacagttaacatttgctgaacacctgctatgtaacccagcagtgtgtgaggtgctttataaacattagtaataatacataatgaagctaacattttcaaaacagcatgtctcagattaagacacgaatactctccagttaacacaagaaaactgagagattaaataacttgctcaaggttatgcagcatgatacaaaacaagagagagagaaacagtgctgtctgcagctatgacaggtgttcagcaagggccctgtcctcactattcccagaaccaggacaggagcagagtgttgcagtcagtcattcacaggacatagtttagatttcaactaatcaagagacagactaacataaactatgtcttctgcttttgcccactaggagaaagattaggctgcctttccgctctcccacagtgtgttcttgggcagacactggctggctggcaagatatggcctcatgcagactaaacctgaactctgaacctcttggggccaataaagagggaaaatcagacctggcaactcttggatcacatgttctacaagattcccaacaggcttaaactctggtttaacctaaacatgccctgggcctttgcacattgcaacaccctgagttttctcattcgtctttggcaagtttttactgctatgatagagatgatgggaactactggggagtaagaggaaagaagaggtctcctgtgtgcaaagaacacagaacaaagaactaactatagggttagtggtttagagaggtaggtggccagagacaggaaggaaagtcccagtatgggacacggaggtacagaaataaagacactctgctgatgggacttcctgataaaattctatttgcatgatgtatggagaattcccctggatggcctgagagagccccagggaagacaggaaaaacctgacctagcaacagaccagattctgagaacagatctgtagttttctaaacaccctacattgatccaaacgctatggtctcgcatctctccagaaagagggcggccaaaagcaagagctagctgttgtttcactacaactataacatgccaaggcacaaacagcagattgtgggacccccccccctttttttttggagacggagtctcgctctgtcgcccaggctggagtgcagtgacacgatctcggctcactgcaacctccacctcctgggttcaagtgattcttctgcctcagcctcctgagtagctgggactacaggcatgtgctaccgcgcccagctaattttttttttttttttttgtatttttagtagagacgagatttcaccatattggccaggctggtctcaaaactcctgacatgacgatccacctgccttggcggatcggtggcctggccaccgcgccaggccaagttcaggtttttaaaaggggtcccacatcactgcctgtaatcccagcactttgggaggccgaggcgggcagatcacgaggtcaggagatcgagaccatcctggctaacacggtgaaaccccgtctctactaaaaaatacaaaaaattagccaggcgtggtggcaggcgcctgtagtcccagctactcgggaggttgaggcaggagaatggcgtgaacccgcgaggcggagcttgcagtgagccgagatcgcgccactgcactccagcctgggcgacagagcgagactccgtctcaaaataaaaataaaaataaaaataaaaacctgaactcactttggtcacacactgcagtggatcgcattgactcctacaaaaggcaatgagaccactgcaggactaactgttccaaaaagattccctcaaaatctgtcctggggcctataattcctcaaggtgtgaaaggctttgggggccctccttaaaatgctaatagctactaacaccttagaaaatttgccagccagctaaacgtaaacctttcaggaacttccaggcagacaccatgggggtaatgtggaagggaagcctggctcggctactcgagatgatcacttgggtcggctttaaggagctttctggctggccctaaccaacactgtcgcgccgggagcagggatcccctggcgcccttcagtcagggcgctggcccaccctggggcagcaacgcactcccttacctccgtggttcagtcagagctaggaaggtccctttgtgcttcctgagatcaacatcgctcccttttcctgggaaggcaaagaaaatgagttagggaagcgtctatcccgctcctacctcctcgccaggctccgggacgctatgcgctatcagcattgaggtgaagaggactaggtgcccggggcgatccaggctcgtgtcctcccgctggagtttgaggtttgcccttccctcatcaccctcaccctcgttctttctcggtttcccgcttccctctacgcggcggagaccaccaccttaccgctcgcacttaagatctcagacccacgccggaggccggctcgctccgcccctccccgcccccttgtccccgccccggctcagacgccgctccccggtgcctctcggcaccggctcacgctctccaggcccacctgcccggtctccacacgtgggtagccagagcccggccgagagccctggccgggagcccgcgggggccccgccccctgcccgccccctgcccgccccgctcgccgtgccgccatgtttactgagggcggatggaggggcccgagtttctgcgaagccgcgacctcggcgtccggacgcggggaacaccgggctgagggagtctgcagtcggctccgggaagccgcgcggcgacgggggaggccttcactaaaggggaaaaggaagagggggtcggccagtatccccgaaagagggctagggcgcatgaagaccagcgcagagctccacgagcaggaaaagcccccaagcagccccagggcgactggaccgggccgcttaggccacgcccggggaagagggcctgacgcgctgcggggcggggccgcggggccgggtcgcgcgagcagcggagcaccaagggaacggaaaatggcgcctcacgacccgggtagtcttacgaccctggtgccctgggctgccgccctgctcctcgctctgggcgtggaaagggctctggcgctacccgaggtacagaagcaagtttgaggtcgggctgaagcagggtcgctggccagccgtgcgtcgcgctcgccagcggctcccccttctcctcggcgggcctgcggttctgatttcgtccctgacgcttcccgaccctgcccagccaggtcctgttcccaagtactcacgtcgtgcaggccttcggcgccccagtcctgccgactttcaaagacctgtgaaacttgatttcgccccttaattttagaataactttaagttctttctacagacgggtcctctgcctcttgtgtaatctctctacgcacgaacgccatatatcgtgcggtggtagggctgtacttttgtaatgcttgatgagttctttacgtacctgcggtcgttttacaccgcgccaaactagggctgtcagattgagaagtctctgcagaaagcataataaataagttcgaatagtgatcttcagagatgaggaccttccctgtgcgatatctggtactgaaagtgtcgggagctgattcggcgcaggactctggaggaagagatggcatctcctagcctagcctgttacaagggtgggacacgagccgtttatccatttatcggccccgtgttagaggaattctggaaacgtgtactggcagttaattcttgatcgccgtttgttcttttcttggcttttctttctggagttctaatgtttctttctcttctgcagatatgcacccaatgtccagggagcgtgcaaaatttgtcaaaagtggccttttattgtaaaacgacacgagagctaatgctgcatgcccgttgctgcctgaatcagaagggcaccatcttggggtgaggggaagacatccctagatgctggatacaggccattccttagcctggctgcttttatacccttatattattt

SEQ ID NO: 8888 - DNA, 6000 bp, Homo sapiens
agtgcagtggcacgatctcagctcattgtaacctctgcctcctgggttcaagcgattctcctgcctcagcctccagagtagctgagactacaggcatgcacaaccatgccaggctaatttttgtatttttattatttatttattttatttatttattgagacggagtcccgctctgttgcccaggctggagtgctgtggcgcgatctcagctcactgcaacctccgcctcccaggttcaagcgattctcctgccttggcttcctgagtaaccgggacaggtgtgtaccaccatgccaggctaattttttgtatttttagtagagacggggtttcatcgtgttagccatgatggtctccatctcctgacctcatgatccagtcagctcagcctcccaaagtgctgggattacaggagtgagccactgtgcccagcctatttatttatttttgaggcaggggtcttgctgtcacccagtctcactctgtcacccaggagtgcagtggcaagatctcggctcactgcaacctccacctcccaggttcaagcaattctcagcctcccgagtagttgggattacaggcgcccatcaacatgcccggcaaatttttgtatttttagtagagacagggtttcgccacgttggccaaggtggtcctgaagtcctgatctcaggtgatccacctgccttggcctcccaaagtgctgggattacaggtgtgagccaatacgcctggccaatttttttattttttagtagagatggggtttcgccatgttggccaggctggtctcaaactccggacctcaggtgatccacctgccttggcctcccaaagtgctaggattacaggcgtgagccaccacgcccggccaagtcaccaaaacttctaaactttttgagttttttttttttcctactcacttgatcatataggctaagcactgaactttccttctattcacttgatcatataggttgagcatccaaaatcatttggaacttttaaaggtattaaaaatgcctgtaatcccagcactttgggaggctgaggcaggtggatcacgaggtcaagagatcgaaaccatcctggccaacatggtgaaaccccttctctactaaaaatacaaaaaaatagccgggcgtggtggcaggcgcctgtagtcccagctactggggaggctgaggcaggagaatggcgtgaacccgggaggcggagcttgcagtgagccaagatcacgccactgcactccagcctgggcgacagagcaacactctgtctcaaaaaaaaaaaaaaaaaaaatgcaaattggacaggagaggtggctcacgcctgtagtctcaacactttgggaggccatcacaggaagatggcttgggtctaacagttagaggccagcctgggcaacacagcatgatcccatctctaccaaaaaaaaaaaaaaattagctgggtgtggtggcatgcgcctgtggtcccagcttcacaggaggctgacctgggagcatggcttgagcccaggtgttcaaggttacagtgagctacaatcatgccactgcactccagcctgggtgacagaataagaccctgtctcaaaaaaaaaagaaaaaaggcaaattatgtgattagaacgtattaaaaaatttcaacattaaagtttcaatagttgcaatagtattattgaataatagtacatatacataggttttaagcacaaaattctgcatacttatcatagatgatgtacaacaggaaatttcattcataaatttcattaattaagaatatgtgatactgaaattgcaaatatccaatctgtttcctgctagtgagtaatgttgggtaaatgagtttctggttctttacttatagagcaggaggaaaacaatacttcctagacaatgagctattagtaggggctcaacaaatgccagttaaagctgaattcaacttaggcaatactggccactgacaatcagtatgtgtgtgtgttttgagacagagtctcactctgtcacccaggttgtagtgcaatggtgtgatcttgactcactgcaacctccgcctcccaagttcaagcaattctcttgcctcccaagtagctgggattacaggcacctgtcatcacgcccggctaatttttgtattttcagtagagaaggggtttcgccatgttggccaggctggtctcaaactcctgacctcagtgatccacccgcgtcgacctcccaacgtgttgggattacagacgtgagtcaccgcgcctggcagacaaccaattttaaagcactctttctttgagctctttttctttagtaccagtacacactgtgtagatatttttgttttacttactaaactgtaggttagtaatcaattttagtacctaccagactgtaagctccttgaggacaaggaatttggacatttcccttttttgaagacctagcacaggacccttatgaaaataaccaccaaacagtcttatcaccaagttctagaactagagtagcatctgtcctattaaaaactactgatggcataaatataaacctaaacttactccattagagcactgacagatttgaaatcaacaatcagtatttcatacaattttaaaactttaatacttttttatctccaatgcaatataaaaatagtactcactttggataggaaatcaactagaactagactgttgacatccagcaacaaagcatagcccaacataagaaatacagatttgcaacacttcgatatgtgctttgaacattgatatgccaagtagcaatagaaataattatctctttggatggaaaatgttaatgactaatcatttcttaaactagactggatacttttccatatagggactatgctattccacgttctccaacatggatccatccatttacttcttgccttccaaggtaccaccctatcccaatccaccatcactccttgcctggagtatttcaatagcttttttttttttttttttgagacagagtctcgctctgtcgcccaggctggagtgcagcggagcgatctcggctcactgcaagccccgccacccgggttcacgccagcctcctgcctcagcctcccaagtagctggactacaggcgcccgccaccacgcccagctaattttttgtatttttagtagagacagggtttcaccgtgttagccaggatggtctcgatctcctggcctcgtgatccgcccgcctcggcctcccaaagtggtgggattacaggagtgagccaccgcctccggccttcaatagcttaacaggtcaccaagcttccacactattcccacacagcctctcccctcttgccaccggctgtgacctcagactgaaatgctcttccctggcccctccttatccttcaaatcttggcttaaaagccttttctcagtttcattgaccaggctatctaacatttacgattcccccagcatatcatccattttattcttctttacggactcatttctggctcgtagtaaatgttcaataacggttaagtgaactgaatctctaatttctggtcgttaatttgtagagaccactttcccggatttaaaaagtgcaggtgctctggcagccttaagtcggtgaaaacaagaatattccgcaaaacaaaaataacttgtttattcatcaaaaacagttaacgttacacttctataccgtcaattcgtgtgtgaacagagttgtgtctgatccaagaccttacagttcaagcactggatcccaataacctgtaaacaacgttttgttatttgcaatgcaatcctgggctaacttttcaaaagtcgtttttctcaatttcccgttagttaaaggaataaaaaaatgctgtccaacgtggtcaatggaccaaacaaacaaggacaacaaacagaagcgtgagccattgctaacacaacagcgaccaaacaatcatgcactgtatcaggcgtgtaaaaatctggggggaaaggcttagtcttaaggcctaagtcatcggacactggtcctctcccggggaataaaacggcctcctcctctgagagggaaatgtcctgaattttccctgcagagggaaggtcacctgcaagcctacattcgtgacagcgttcccgaggaccccctgatcctcatcttcttttctgcttcatcagaccagagaccgtggctaaaagccccccatctgccggctctcaggggcttccgaggcggcggggcgggaggcggcgcccagtcaaggacaacagaagactacgtcgcgtgggccaaaggaaacagtcccgtcaataaataagcctctggccgacgcacctcacccttcccatccatacaagacctcaccttctccccggagccgcggaggctgttctgctaaactgtctggaccacgacgaccccctaggaggccgggtcgcttattcaatatggcggcctcggctaactctgtcagccgggcctggagaacggaaagcccggagggactagaatccttgcattcgacaagtttgtcggcaatttccgtcagccgaccagagggcggagctgaggtcggcccagcccggaggcgggaaggacaacttggacccgcagttccgccggaagtggccccagcctcgaggccgggcgtcttcggtcatctccggcgcttctagggctggttcccgtcatcttcgggagccgtggaggtacgaacttaagacatgcctattttattaatttacttccaaacgcaacgaaaggtccatggacaatttgtgggccatttaattcagggcccccaattcgtacgtggagaagtgggaatgcaaaagtactttgacctttaaccttcggtccggcgcggtggagggaaacgcctccgtctctatataaggaattttccggtctcttcgggtcctttttcctctcttcagcgtggggcgcccacaatttgcgcgctctctttctgctgctccccagctctcggatacagccgacaccatgggtttcggagacctgaaaagccctgccggcctccaggtgctcaacgattacctggcggacaagagctacatcgaggggtgagcggacgggctgagtcggggtggcggggaggtttctccgcccggggccggggccacgtggcgcagcgtgtcggctgccgcgggagggagggaggccgggcccggggccctttcgagagggaggggaaagcgccccgttgccgtctcccaaggccctcgtgtggggcgagcccggcctccggggagcggttcacgagcaaggaaaggttaaaatgtgctttatttacacttaattcagccaggtgtttccgcatcgctgcccagttaatacatgttaagctgtagatagagcaacgccagacattgcagtatttgaggtctacttagtggcagacatttctcaggatagcgcggtgacccaaacatatggtttgatttgaaggagctaataagaaaagaaaagcattaaagcaaccctgctggggttagtgcccactaattaatgtgatgcatacggtatttattatttattcgctggcgtttgtttttcaaaggtgtgtgtgaatgtttctgtgtccttggcaggtatgtgccatcacaagcagatgtggcagtatttgaagccgtgtccagcccaccgcctgccgacttgtgtcatgccctacgttggtataatcacatcaagtcttacgaaaaggaaaaggccaggtaaaatcatctttgtatagagctgaagaataagactgctctcgaagtttatcaggatgttcacatgacaaaactggacccaggctactttagttttgttgggatattgtaagctaaatttttctgtaaccttagaaggccaagagactgaagccctccattttttcacagaacaggtagaacatggacagcagcaattcaacttttccccacactgccctgccaatgtgcctcgaccttgacctggggggcccacctctggggtgaga

SEQ ID NO: 8889 - DNA, 6000 bp, Homo sapiens
tagggcaattctatagttttccacctataggaaatttgtatcagctcctggtcttgtggctctcctttctgagaagacttgctctatgcattccttgtatccctagttagacggcctaattcctcacctggcgcatacacttgtatccatggaaaccatcagcacaaacacactgcaaaagacctggaccatcaggtacacaagatccattctcaggacacatttctggaggccagagagaaatagagaacatcactttatccatttcattaggcatatttctcaattatctgtttcaacttagattctctcaatcattgctaggataaaggaagaagaaagaaaattacagataaaaacagtaacaataatgtcaggcctctgagcccaagctaagctatcatatcccctgtgacctgcacgtatacatccagatggtctgaagcaactgaagatccacaaaagaaatgaaaatagccttaactgatgacattccaccattgtgatttgtttctgccccaccctaactgatcaatatactttgtaatctcccttacccttaagaagtttccttgtaatctctcccacgcttaagaaggttctttgtaattctccccacccttgagaatgtactttgtaagatccatcccctgcccgcaaaacagcactcctaactccactgcctaccccaaaacctgtaagaactaatgataatcccaccaccctttgctgactctctttttggactcagcccacctgcacccaggtgaaataaacagccttgttgctcacacaaagcctgtttggtggtctctttacacggacacacgtgagacaaataatagagtatatcttaagatcttttctttcaaaggggttatagccccagaactctgaatgaaaggcgcttaagcaactttgtctttctgatctaaagtggaaaatacaagggagaaaagacaattcccagaagtttggaggtaagacagcatacctgggtccccagtgttattgcaaaggttcttttgcccttgacagatttggttgtctatataagaggtgatagtattccaggcattaattcctccaggacagttgacatgttgtggcagtatcctatagagaaatgtggtcataacatgcaaagttgctaaactcacagcatcatccctctttgattctcttcccatacccttactcacagagtctggagctgagtaaagccacggaaggtgttggccaagtcacctttgagggggtttgcttgcaggtctctgcaaagtacacaatgttagcactttcgcatcaacctacattatattagccttttgggtgggaggtacctaactacttacatgatgacagtggtatgtgcctgatgaaagtttggaccagggtcctccagagaacagttctggagatccagcctgaggaaataaagtaatcaatataactgtgtgttcctctttttcttcagccacggcacagtttgtatttgactacacaacccccttttcagctaataattgaacacagctgtgttcagagtcacacactaggagctgtggtagacattttaattctgcattatccaatagaatcgccacttgccacatgtaactacttaaatttaaattaatgtaccttaggctgggtgtagtgactcactcctgtaatcccagcactttaggaggccaagcgggggaggatcacttgaacctaggaattcaagaccagcctgggcaatatgaatgagaccctgactctatagaagaaaattaatttaacctaaaaattcagtgtctcatttgcactagccgtatttcaagtgcaaatggaataaccacgttagtagctactgtactggttagtacagatacggaacattttccttttttgagacagtcttactctgttgcccaagctggagtgcagtggcacgatctcggctcactgcaacctccatctcccgggttcaagcaattctcctgcctcagcctcctgagtagctgagattataggcacatgccaccacgcctggctaatttttgtatttttagtagagacggggtttcaccatgttggtcaggctggtcttgaactcctgacctcgtgatccgcccatctgggcctcccaaagtgctgggattacaggcatgagccaccgcgcctggctcggaacattttcataatcacagaaagttctatccgccagcactgttctaatcggttatgcatctattgggagaaatctgtgtttcttgtctacattagtgaatctcatattatgattttcagatccacagagggcctttaaattaaaaaaaaaaagtcacataaatcaaagtttttttccacatgtattttctaccacagattggttgtaaactgctggacattaaggatcatgccacgttatttttttcttcaatatctactgctatccattcctttattctacaaatatttactgagtccctacaaactgcaaacactgggagaatgttaaaaatatgtaacacagtattttggcctttgagtggcttacaatgtagttagaggaacaagagcactgcccaaaaataaaagcactgtaaacattaaattacaatataaaagaaaccacaggacagtgtataaatatatttgagtggacactaaagattacaggaagtttttaaaaaaggtattactgaatcgcttgaacccaggaggtggagggcgcggtgagccgagatcatgccattgcattccagcctgggcaacaagagtgaaactccgtctcaaaaaaataaataaataataatttaaaaaaggtattactctggaacttagtagtagtaaatattcacaaaagatgttggaattgaaggatggatatttcctaatttggtagaggaaggcaatttcaggtatggagagaggcctgaacaaaggtggaatgcctttgagggcaggcaaatctggctggtgcagaccattatggaggtttgagcggacaagtaattggaaataatgttggaaaagtgggttgggactagtatggtacttaatggtttgaattttgtcctgagacaaaatttaatactaaatatagtattaaagcaagagagtgataatggaaaatgttggttttctaaaagcttaatacagagaagtatttaggtagatgaaggaaagaagagaatggaagcaaaacataacattttgagtttgaagttagggtgcactcagtaggaaatgcttaataggaagctagaggtacccgtatgtacctggagtgtggaaaggttaaaaaagacactaaagagatctagttttggtagacatctgcgtgatgattacagctgaaaccataataggtggattctttaaataatataagggtataaaagcagccaggctaaggaatggcctgtatccagcatctagggatgtcttcccctcaccccaagatggtgcccttctgattcaggcagcaacgggcatgcagcattagctctcgtgtcgttttacaataaaaggccacttttgacaaattttgcacgctccctggacattgggtgcatatctgcagaagagaaagaaacattagaactccagaaagaaaagccaagaaaagaacaaacggcgatcaagaattaactgccagtacacgtttccagaattcctctaacacggggccgataaatggataaacggctcgtgtcccacccttgtaacaggctaggctaggagatgccatctcttcctccagagtcctgcgccgaatcagctcccgacactttcagtaccagatatcgcacagggaaggtcctcatctctgaagatcactattcgaacttatttattatgctttctgcagagacttctcaatctgacagccctagtttggcgcggtgtaaaacgaccgcaggtacgtaaagaactcatcaagcattacaaaagtacagccctaccaccgcacgatatatggcgttcgtgcgtagagagattacacaagaggcagaggacccgtctgtagaaagaacttaaagttattctaaaattaaggggcgaaatcaagtttcacaggtctttgaaagtcggcaggactggggcgccgaaggcctgcacgacgtgagtacttgggaacaggacctggctgggcagggtcgggaagcgtcagggacgaaatcagaaccgcaggcccgccgaggagaagggggagccgctggcgagcgcgacgcacggctggccagcgaccctgcttcagcccgacctcaaacttgcttctgtacctcgggtagcgccagagccctttccacgcccagagcgaggagcagggcggcagcccagggcaccagggtcgtaagactacccgggtcgtgaggcgccattttccgttcccttggtgctccgctgctcgcgcgacccggccccgcggccccgccccgcagcgcgtcaggccctcttccccgggcgtggcctaagcggcccggtccagtcgccctggggctgcttgggggcttttcctgctcgtggagctctgcgctggtcttcatgcgccctagccctctttcggggatactggccgaccccctcttccttttcccctttagtgaaggcctcccccgtcgccgcgcggcttcccggagccgactgcagactccctcagcccggtgttccccgcgtccggacgccgaggtcgcggcttcgcagaaactcgggcccctccatccgccctcagtaaacatggcggcacggcgagcggggcgggcagggggcgggcagggggcggggcccccgcgggctcccggccagggctctcggccgggctctggctacccacgtgtggagaccgggcaggtgggcctggagagcgtgagccggtgccgagaggcaccggggagcggcgtctgagccggggcggggacaagggggcggggaggggcggagcgagccggcctccggcgtgggtctgagatcttaagtgcgagcggtaaggtggtggtctccgccgcgtagagggaagcgggaaaccgagaaagaacgagggtgagggtgatgagggaagggcaaacctcaaactccagcgggaggacacgagcctggatcgccccgggcacctagtcctcttcacctcaatgctgatagcgcatagcgtcccggagcctggcgaggaggtaggagcgggatagacgcttccctaactcattttctttgccttcccaggaaaagggagcgatgttgatctcaggaagcacaaagggaccttcctagctctgactgaaccacggaggtaagggagtgcgttgctgccccagggtgggccagcgccctgactgaagggcgccaggggatccctgctcccggcgcgacagtgttggttagggccagccagaaagctccttaaagccgacccaagtgatcatctcgagtagccgagccaggcttcccttccacattacccccatggtgtctgcctggaagttcctgaaaggtttacgtttagctggctggcaaattttctaaggtgttagtagctattagcattttaaggagggcccccaaagcctttcacaccttgaggaattataggccccaggacagattttgagggaatctttttggaacagttagtcctgcagtggtctcattgccttttgtaggagtcaatgcgatccactgcagtgtgtgaccaaagtgagttcaggtttttatttttatttttatttttattttgagacggagtctcgctctgtcgcccaggctggagtgcagtggcgcgatctcggctcactgcaagctccgcctcgcgggttcacgccattctcctgcctcaacctcccgagtagctgggactacaggcgcctgccaccacgcctggctaattttttgtattttttagtagagacggggtttcaccgtgttagccaggatggtctcgatctcctgacctcgtgatctgcccgcctcggcctcccaaagtgctgggattacaggcagtgatgtgggacc

SEQ ID NO: 8890 - DNA, 6000 bp, Homo sapiens
atataatttattcaacttgcaactactcaactctgccactgtagcataaaagcaggcatacacaatatgtaaataaatgagtgtggctgtgttctaatacactgtttacaaaaaacaggcaggagcatgaaaaaagagatagcgaaatagagagatgagacagagagagagagagaacacaaattaccaaaatcaggaatgagaaagagacaagactacagatcatacagcctccaccatcagctagtcaccccagggaacccctaccccatccatggagtaggcaagaatgtagaaaccacatgaagctatgtgccttcagccttcaatattgacatgcatttatttatttagtaactaatttatgttaacaggcaaaacaaaaatccctggccttgtggatcttaccttctaaatcagggagattaagcataaacaatgtacataatacatttgtagattatccagtgtgttaggagttcataagaactgtgaagaaagaaggaaaagtaggacaagggagggagaatggaagtgctgagagtttaaaatggtgtgaagacccaccccggaaggtctcattgaggaattaccatttgagcaaagacctgaaggaggtgatagagcaagccacagggaaggatgtcctaggctgaaggaatagccaaggcacagaccctgaggcagagccatccctggaacatgggaacagcagagaccagagttgttagagtggagtgaataaagggaagagaggtggaaagagagatcagagcctacaggggaagcagtcagaatagggccttatggtctaaggtgtgaaatggctgggaagcccagcaggagaggggttgccaacactgggggatgaataacatatcaacaaaaacttagaggaacaatggggcttcccacagagctacaataaggtcactccaagagctggaccctcgggtcctggggtcaaggaggagctagcaagatccctcctccctcctcccacaaggacatgaaacctgggggcagagggcacctacccgcccattctctatctctcgacaggccatcaggatcacctagacaaggagggtcaggggagaggaaggtgatttgggtgagggggccagggaaactgccgagggggtacttagatgttgaccccaccattgtgccgcacccccaagtgctgaccttgaccccaaactcccagaccagtctccagaagtctagcagggtgtgaggcaagggtccttgcgtggcaatgtaggccaggcttccatccacgccctggtgaaggccgaattcacgactgagattctgcggcccacccctggccactcccagtccacctccttccgtgaccccaaccctcacccggatgaagttgccattaatgtagtcgctgtgtccctcttcctggagcagggagaggattactcgcgtctgatcatctgtcagcagataaggtgagaaacgtggagtttgggtaggatagggtgacggagcctctgacagccccctagctgaaagccagcaggggaccacacacatgcagagatcccaccaaggtgcccttgtgggctgctgagcagtgcagagggtgaggctctgggaggagagcacagtgggtgactccagtgcacactgacgcctggacgtggcagggcgtgcaaggctgcaccgactccctacggaagccccgacttacaaggcagcacgtctttgtagcggttcttcctcacgttctctggccgactgccggccacggtggagcacacgccgtcagccttccaggcggccgagcaggcctggatgtcctggtagagcattatgagtgggtcagggaggggagaagacaggagaggagccaggtcagagtcccaggccacctaggcacgcttgcaggatacaaagccagtggcctggggaggtgagtgcagaccctgatggcactgggcctgcctaataataatgataccgaaatagtgacccagggcaccttctctgtgccactctctgtgctaagggcatgtaatcatcacaggttcctacgacgtgggtactattattgacgtccccattgtgcaggcgggaaagtttatgcaccacgtggttcagcgacttgtggaaggtcccaaccaggaagtcacacggtgagggttgaactcagaccctctcggcacccaccccctgcacactcaatctgtgacattgtcttgtaagcaataactgtaatgaaatatattatgggctatgtagctaaacatataagacaatgtacaatgaatgcataggcattataatggataacatattatgtacaagatactataggcactgtgttactgggagattataataataattagtgaatcgtgtattaccatcatcgtcaggtattcgtaatctcaatgataataagtaacacccatgccaccactgtgtgccagccactattctaagtgctttacttgtgtccattgggtcatttaagccctcatgatgcccttgtgtagtgggaacacctagaagagcgcagtgattcctgcacatgcgggaggcaggcttggggagcaggggtgccctcgccacccagccttccgcatgtgaggccctccgcactgtacacggttcagaacccacccagtcgcatgatgtcatatatcacatgggtattatgtttacatttgttacacacattcttatattgtataattatatattttacatttattatgcatttcttagtttcttatatacaatgtttctacatgtgtgtaaattacttaggtttataattatctgttactttttttttttttttttttgagatggagtctcgctctgttgcccaggctggactgcagtggcgcgatctcggctcactgcaagctccgcctcccgggttcacgccattctcctgcctcagccacccgagtagctgggactacaggcgcccgccaccacgcccagctaattttttgtgtgtttagtagagacggggtttcaccgtgttagccaggatggtgtggatctcctgacctcgtgatccgcccgcctcggcctcccaaagtgctgggattataggcgtgagccaccgtgcccggccatctgttacatattttatatctacttatgaatttatcaaataactttggtcattttataaattataatctttgttatattcatttgttgtattgttttatgcagttatgcaatgtttattgtataaacggtcatttataatacttttatatatttgtcatatttctaaacttgatacatgtcaccatatatcagtttatgcgtttgtatggtatgtttctatgtctggtacataagcgattacactttaaacacgtcatcaactgtaatgtacagtgcctagcattctgcgtgagccttcctaatgctgggcttgcactacctgtattgtaacgtttagattttttgtttggttttgttttgtttgagatgggatctcactctgtggcccaggctggagtgcagtggcaccatctcagctgtgcagtggaaccatctcagctcactgcaacctctgcctcccaggttcaagcgagtcccctgtctctgctccctagtagctgggattacaggcatgcgcccatgcccagttgatttttgtatttttagtagagacggggtttcgctgtgttgcccaggctggtctcgaactcctgagctcaagcgatcctcccacctcggcctcccaaagtgctgggattacaggtgtgagccaccgcacctggcccacgtttagaatctttataggcagtgacgaacgcccctacgaagtgtgcgcccaatatgtactaagtgcttttcacccacatcatttaatccttagaccagtttggtcattcatgtccccatttcaccaagggagaagccgaggtcagaggggccaggtagaccgcctggaccacacgcggatggccgggacgcggattcgggacgggaagcggattcgggcccggacgcggattcgagcccggcgttcacaccctcaccacgccacagcctccgtgttcctcttcgccctgctgcagccccttccttcctgtggtcacaggggacagtcaggtcgccagaagcggcggggccggggctgtccagcgcagcagggccgcccgccctcccctgcggcgcccgccccacctgtcccgcccgcagccaggttgttccgggagcgcgacgaggacaccgggaacgagggtgtgcacggtccgtcccggcctggccgtggacgtcgcgctccggggccggggggcagagagtgaagacggagacagcaagagcgacagagaagtgctggggagagaaacacggagagaccccccgaggcggggagacaccggggacaccgagacagaaaggcagagcccgccgtgcgcggaggacaggcgtacgcagggccagggccggggcgcgccgctcgcggaccccgtgtgccactcacgctgaactcgccggcgaggactgccccctcccggccgccccgcgcttccagccgctccaggaagctccgcgccgagtccaggctgcggctcatggcgccgcgggccagcaaggtccagcccggccgccgcgcgcgcggcgagtgtggacgccgcgggaggcggaggccggtgactgagtccccgcccttgcctcggcagccaatggaagcgcgcagcggcgggcagggcgccccagccaccgtgttctgagcccgcgtagccccaccccgggcgctcgggccgctgtggccggagccctaggtcctcgcgggctgccctgagcagagtccagcgccggcgcttcccctttttttcggctgccgcgcccactggtgggggggtggcacggtcccaggttcgctccctgccgcttgggacccgccctcagatcgggatccgcgcccaggggccgacctccgggtgccggctctgggtggacggccgagcggtctcgccgggccctcccgcccgtcccctgggagccaggccgcgcggagtccgagctggggcgggcagcagccttgggtggagacggtcgccgagatcaggctgcccctcgtgccagaggaccccgggtcgggggcgtcccgcgctgtgcgctccagccgggcccaagggaggccggggaggggcagccacgccgtgggaaaggccaagtggcagcgggatcttctctgtgtatttcccgaggaatttgtggttcctttttcccggatgcgctggggcaccagggtcagtcctgtgtgagcatctcgacctgcacaagcctgctgggaaacagaactgaggcactggaagtgggttctggggaacgaagagcttctcttttttgcctgccctgacactcccatcttcagaaagtgtgcagaggtcagaggagagccgccgttccagcttccgggatcaccgaggggaggctggagagaatggactggcacctgggtctcttcaaggacaggcctaggttagcccccttctcgccgaggtcggaagaattaagaggggtgtcactggaaggggcgtcagtggacaccagtttgaggtcgttgaggggttgaaaggtagcattggggcctggatgtgtgcctgagtctctgaagggtcaacaggggcatgatgtcaggtggtcaatttaattcactaggggctatcagagtatttaagggcacactttcttaaaggtcccggtaggaagtggttttggctttgctatcgctgccccagctgcttaactcagctgtggcagcatgaaagcagacaatatagtgtggctgtgtcccaaagaaaccatttatggacaaagaaatcagaatttcatgtaatgttcatgtgtcatgaattattctagtgtgtgtgtgtggcctacaggctgtcgtttgctgaccttggctgaagtgatggagcgatcaaagtggctctgtggggatcagcagctagggctgtttgatttatcgtggggtccgcaggggtcactgtg

SEQ ID NO: 8891 - DNA, 6000 bp, Homo sapiens
agtatcagaggccatacttgtcctactcttttctgctagagtatagattagagatgagaataagatgtttatgaaaagcaaaaagggggtgaagaacagggcagaagaggataaaaacacagaggctgaggaggagagaggaaggctgaggaagaaacgacacgtgtaacagaaaaactgcccctgctcagaactcaatacacataagctctgaattatgaaaaagagatggtcttaaaaacagccttaacagtcaaaagacagaagtactattccaccaaagcagacctttctaatctgttatttttatcaaactgatcctatcctatcacatgatacttaactgttataatcccagatgttaaaaattgaaggaaaaaaggaaagaattcatgggtacaggacttggtgaaccatccaataacttaatcctgaacatttttccatgctgtaataacgggacaacaaaaatgtcttacatggcctcaaaaacccaaataagaaatgggcttttcctctaggtcacggataatttttagcagaaatgcagagaaagcaggccacagaagtagacataaagtataggaagtgcagtattatgagagctcagagaggagtggtttgtttgcagcaacaagggtgggagttgagaccaagccaggcagtttcaccagagaaacacttcccttaggtcagaggctcttggggagctaagggttcctcacagctcaccttgccctgctgcctgacccactgggagactggggcctataggtgaccacacttgctggcaccatacacagccaggtagaaactgatcctgactgccagaaggactcctgattccttccccagtctccttagaactgtggccctcatcagcgaacagtgaggaactaccagtgtgatcatttcaaaactggaataaggtcgggcgcggtggctcacgcctgtaatcccagcactttgggaggccgaggtgggcggatcacgaggtcaggaaatcgagaccatcctggctaacacagtgaaaccctgtctctactaaaaatacaaaaaattagccgggcgaggtggcaggcgcctgtagtcccagctactcgggaagctgaggcagaatggcgtgaaccccggaggcggagcctgcagtgaactgagatcgtgccactgcactccagcctgggcgacggcgagactctgtctcaaaaaaaaaaaaaagaaaaaaaaaactggagtaaaatagctgtgcctgtggctcctaaaacagcaataccatgcctaggtatggacctatcagaaatgcagacacatatgtaccaaagccagacactagagtggtcacagcggcactttctgtaacagacaaatgctgcaaactgcccaaatgtccactaacaatgcgtgactatgtggtatattcacccaatggcccctatcaccaatgagagtgaacatgcttcaaccatgggcagcatcatgagtgattctcagaaactcaatgcttaaggaaagaaggcatacactagccagccaggcgcaattgctcacgcctgtaatctcagcgctttgggagggcaatgtgggagaatagtttgaggctaggagttgccagagaccagcctggacaacacagtgggagccgtctctacaaaataaaataaaacaaattagctgggtctggtggtgtgtgcccgtagtctcagctactgaggaggctaaggcaggaggattgcttgactccaggagttcaaggctgatcctgggggaggccgcgactggagtacaacacaaggggagctcccagggtcccggccagttctgtttgttgatctaagtgctgagtgcatgggcatgttcagtctggaaaattcattgagcaggacacttatggtatgtctactttcctagtatctatgctatacttaaaaaaaaaagaggaaaaaaaagttttgtctgtctggtgtccaggtaagacaagcctggtagtgtccttgaagcctcaaagctgatttttctcctgctcccttacgcatttcacttgcttctcctctgcacgtgtgcttaagctggctgtctcccgggcgagcctgcgtgtcaccgtcatatttatggtttcctcccacaccaggcctgtgattcaccccactttggatgcctttgctaacttatgccacccacactgatccagcccttgcttttccttcctcagcagttaggcagcttggagcatcattaacatgtgtatattcccagttgttttacttctgccagagcttcccagcagactaaaaccacggagcatgcccttcgggagtgatctcagtcctccatcgtgtccacaggcagtgcggattaaatcgctcctcaggagccaggagggtgtggaaggtgagctttatcccttctcccagaaactgctggctccaagacacccacctcagccctccaggacctggaatggactcccacagaggactcaccaacctcttttcattcattgcctcccgaggccaacctgctagataaattcccctcattgctgcaaatagtcccacaaggcaagcagggaagaactagaggagcaaaccaaagaacaaagagtgtgttcttattctgccacggatatatccttaacgttcatcaccaatctattttgataacatgcaacaatttacaatttatgccaaaattataagaactgtccaaatagtcgtaaatgtgagctctcaaaatttctgcctgtcagccctctctcttccatgagccccttcatgccttcctatctcacctgtttcttttctcgcctagacgaagaaatgctgatcataacccagaatatccaagggtcatttcatcttacaaaaacagcagcatccatataacaggcacatgggtaaaagactcaagacatgctggttatatgctctcgcagttcgtatgaatctctccttctccaagtgacagctggaattcaggtgcttctaggctctgttactagcaatgttagacactcctcgaagctgtcaagctctcaggattacacaagtgaaaccacaacctgtcctgactgtattcaagtctgtgccccttcatgcagcagaaatggattcctcttccacagtttcagcagctgtatccttccgtggaaaaggattagcagccataagcccgggggagggcagctaaacaccagagggcaggagatgagtctccttcctctctgtgacacccagcacggccctgccacgaggagcaggcaaccactggtgccagatgaagcgcagcacataaaaccattttccccttcaaatgaacgatgcctaattaagcaaaagccgcatgcatgacttaagacatgaggatataaaattcgtcttccgagtcagctagagattctgcaggatcctctaccctcgtaaacgtatttttttatgattagaaaaacccggggcctggaagggacctcggccatcggcagggtaagcttctcaggagagaccatgagcccgagccccacagggggatcagtgtctgccaaggtcaccaagcgggtgtgaggcaagggcagggctcctcggggatgctctcggaaaaccctgcgttacttacacacgcaaggcgtacaatgaatgcacacccgcgtcaagccacggcttacaattcagaagaaatcaaaaggtcgccaaaacctgtcttctccgcaaggctggctgcagagagggtgcagggaaggtcaccggcaaatttctaccagcggccccacatcacgcctccccgatggatgcagagagaggtttcaggagctgctagtaaccttgcagggggttccctaagcccatcccaggaaaacgagttaactcggctctgctaactccgaagcttccagcaatgaattaaatcccgagctgcagcggaaagcggcggggaaagggccactgcggcgggacccgacacccggcggtccgccccaccctctaccgcgtacacacctgcgtgggaccccccgcccggtccacacggcccgggaccacgaccctccgcccgcgccccagccgggctcgcctgagggtgtcgtgccctgggcgctgcccgcggggttcgaggcggaaacgccgcgcccagccggcccgggaagagacaagtcgccgccgcagcccccagcccgcgggcccccgcgacgccgaggagggggctgcgccacgtacctcggccggcaggtgccgccgctgcctcggtccgcggctgcaggggacgccgctccgcgcagcccgccgccttcgtccgcatactaatgagggggcgccggccggccgccagcccggtaccccgcgcccccacccgcccccagcgccgctctcgcgcccattcagctgggggccgccgctcccccgctcagatgcggaggaggggcgcgtgggcggggtctgacgtcacgaggacgcggacggccaatcggagagcacgatgcctccgcggcggcccccgcccccgggcgcgcggccagtcagccctgcggtgcggtgggcattgccagagcagggcgccccctgcagggacgcacccggggcgggggccaggctggggcgagccccccttggttctggagaggaaatgacatacagtttgtgaaagcataaatattcgtgaaaataagaaaattcaggaaggaaacaaagcttaaggcagtgattgataggttatttcttggacacagctgaacgtatactgtgcgcctgcaactttccggtggtttcggaccggacttcagtgaagccagtgaagtcggtcgacttgcagaacttcctttcagaggggcgtacacagcaccgcggccgtgtgcctgtgatctccttctgagtttgaaaaagaagatcctagacaccgagccaaatatgtttgcataaaccgggagacttgtggctctattttgtaacagcttggcgcagggcagctggtttggagatgtctctgttcttcccttggtgggggtgccggaaaaaatgtgctgcctgggcgatcgaggttggggcaaaagcgttgcaaaggaaaaggtgggaggactctactttcacatttcccaaaagagttttaccataagactatttctggattgttctaacgtgaggatattgggagcattttgaaaatactggaggaaaagctgtcactgggcgatttaaatccggtaagttggccaaggcagagcagctgctggggtcagcgacagctgacccttgcagctgagtatcttgccctcttaatcttggagatcagcccaaggcccatgtgttacaggaaaggggtcccgatctagaccccaagagagggttcttcgatctcacgcaagaaacaattcagagtaagtccacagtgcaaagtaaaagcaagtttattaagaaagtaaagtggtggctgggcacagtggctcacgcgtaatcccagcactttgggaggctgagacggacagatcacctgatgtcaggagttcaagaccagctggccaacatggcaaaaccccgtctctactagaaatacaaatattggccgggcgtggtggcgcaagcctgttgtctcagctactcacggggctgaggcaggagaatcgcttgaacccgggaggcagaggctacagtgagccgagatcgccactgcactccagcagggcattcctgaaaataagaggagggacatatccaactaaggtacaatgcttgtaatgcttgtatatatgggcagatgtcttctgctacaagggtttgtgataaaggattaattttccctaattactatattttgcaataatcaatattattatttttaaagcaaaattaggaatgcctttgttctccagatatcgggatatctggactctctcaagtctgggtctgtttagtaagcattattaatttgttctcttaaccataaacacctagaggctaggaatgcctagctttcaggaaatgcagcctagcaagtcccagcctcatttttctagccctc

SEQ ID NO: 8892 - DNA, 6000 bp, Homo sapiens
aagactgaaatttaaagttactttcccagtcacagaaataaaggccaaatacccagagtcaacaatgaagtaactctaatgggcaaagtggaatgttggtcagagagtgaaacccaaaaatcaaacaactgaatagccgtggctctggaaaacaaagctctgatggatcacataagagcctttatacatataaacaatctcacatttccagaactgcctagaagcgcacaggaatagtattcgaatgtgtggttagtttgaatattaggggcagagggtgtatttgtgttaactcagaaaaggaagctgccgaatatcttattagttaattttgagagtgtgagttcaagcaaaactacctcccatctgaaccaaaggctgtgatgtgccaaccacaccaaactgatgaggctctttcaaaaggagtctttcatttgaatgtccttccaacagacaaaccctagtttagaacttctgattcttaaacttaacatggcaagcaagagcattctatggccaactgctaaaaatgaggaggtaaatcttccatttggttcttctgagagctggaattggccacagaaagaaacacaaagttttcactccaaaagatcaaagaaggtattttgtaccaggaaacccaattccaaatcctcatttccaggaataaagccacagtgcccggtgcttgcttgggaaaataaaacaggagattctgcggattccaattaaaatttctgatggctttatttcccagcctcaccagtttaatgttgttaacatttcatccaggccctgctttaacttaaatactgcttccagctctgaatggtcacaccttactactgggtaaaaaggaaggtgtcttaacacttcatgacagtattctttgccccatcccaagtgctagatatataagacaaggtgatgctgaaaagtgctagcttcagcccagcctgtgtctcccataactacagccaggtgaaacctcactgcagcccacactatttagttgcaatattggaaaggagagtagaagcaggagaaaataggggaggagggggacatacctcaaccttattcaaatataacaaacaatgagcttgctttacaattatttcctggggtcttatcgatcagccagtagttactgtgtgcccactgcaaacaaggcaccaagctaaatctatagtcagcatagtgcagtaaaatattccctaagtaatcattatgttaatggttatgtgtttaattttctttatcattttagaaaaaatgtattgtgtatgtaggttataaagtctaaaaataaaatcagcacctatgaacccatcacccaatccaaaaaccagaacatcaccaacactgtatcatctacctacttcctccatttttattccaggtccctgcaacatacacacactccacataatcattattctgaagttggggtttcggtgcaagtacaaacgcatatttatgactacctcctattcctaacaagtgagttggctttccaaatatggtagtaatacataatttcctctcaaaaaaatgatgtctttaggttcttttctttaagtgaatcattgctttaaagaaaaatattaatagagtaagtgggactcagccatggtaaactcaggaagacagtatgtgagtgaatgaactttgacaatcactggcaaaagtggccaagaacatgagttctgaagtcctgcagacctctggttcaaatccccattctaccactgaaatttgccaagcctcaatttcttattgtaggacggtaaaataataataagacatatggtgtttgtggaaatgtcatgaaaaagtacctgtgaagagctgagcccagtgcctagcacatatccagcacccctaaactatcctgtcattaaagccacccaaacatatcaaagagttttgccaccatcagtggtttgcttctccagaattcctactgagttgggcatgagatcgcttcacataaaaataaatcaagatgcagagatccaagagcagaacaagccacagactacagctcccagccccagcattgattccatcttcacctcatgaccttgaagagcagaatcatttttcaaatccatttctgtcctgtcccccctccctcagaagactggactactcaatccaagcctgagaattacctagaagcctatcatgacaatcatgggactagttcagtccaatctagggcaagatagaggcataacctctatctcctgactcaatctctgttataccttccttggacacatgaagaaaactggcaaatcactactttgaaaaaaattcgttacaaatctattaatcaaattaagttcctcacttctgaaattaatacattacattcctgaatatggcatctttactctgaatccttaatattcctttaaattcctcacagataacaacaaacttgctagaattcaaatgatcactctcttccaaggtacaaaagttgtaagactactatctaaatcaagttttatttaaaaccaccctctccatttcaagtaaaactcaacaacacagctggaaaaggagggcatgaacccaatctataatcatcccaatccttagtctttgtcacctatccagaatttatctatccatcattcaccacctgtgagtacctgcataaggggtaatagcagaaatgctattatccaacacccagttacatcaacttaaggcctagatttcagcttcaaaagaattccattttttaaaattccaagacagaaaataaaaacaagtgaatcataaaataagtgatcgaggtcccatccaggcataagataacctcctgacccctatgtccccatcagtgaaatggatgaggcccatatttcaaacttaagcagtctgcacactatgaagctgcatggcgaggccgatgtctgaggtcagcacaagtctagtgtctgctggctgcccaagcctgggcccctggccagcaacccacctccagagacaagtgccaggacatactatagtgtttccatttaaggcccgccacttggatcagcccatctctgaaatttcttaacaccacctttccaggaagaatttttttggggaaaagggaggtggtgtctattttttgccaccgccttcccttgggctgtcagagcaatctgcatctctgggacaggattctttaaaaccactgggttatgtctcaattcatgggcctcttctcaaaaatatgtaaaaacatgtatggaacgggcccctttgcccatcatctaactcttatcatacatccctcaaaaaagaaagaaaagcccaataaaattgacaagtccattgtattaccttgctgcctctctccaaaagccaaattcatgacaactttttaaccaagacttttcttctgttactaagtggaacgttttcttctctaagtagcttttctcccatgcaagcagcgttcaaatctccaggggaaaggaggggtggggagggggtgggagactatctggcacaaactggacagagccgagccagtctagaacccgacggaagttactgaatccagcggccccagaggcccacatctcttcttagtgcgcccgaggttctagcctcactgttttggttacagtgttgaaggaagggttttaaacttggcaaagtaccgtgcaacatctgtaaccacatttgccttctggggatcggaagatgaatcccacattcctggctttgaagctttttgaaactgcagctaggaagaaccgagggagggagggagttgagcagagtttattggctgtctctccagcagaaaattcctcttggaagagatggatattttgagggtgggggaaattcgcctatctatctccttactctctacaagctcagctaggaaggtaagccccgtggccccgcggccagatcgatttacaagtcagagtcgcacaccctgaaggagttcacaacacacacacacacacacacgcactcacacacaccccaatacaaacctgagacccccgctccacgcctctgcccccccaccccccatatcccaccagcagttcaggcccaaagcaagacagttttgttccgcggctgcttcccccacggagaggggatcaagcttgggggagaaaggaatgaaagcgagggggaggcaccgcagacgcccaccctgccacccccgatccctgcctcttctcccgctaggctacctcctccctcagtcctcccggctccagcaggcgcggccggcgacctgcgctcacctcgggtcccgccgcggccgggggctgagccgggggaggcggagtgcgaggcagccgggcgctgcaggtcggcgcggcgcggggcggcgcggggcggggcggggcggtgcagccggcgagggagcccggaactctgcggggccgggagccgggggccgagggccggcccagagcggcggcggctgcggtggctgcagcggagcggtgcgtggggccgggagcttcccggccctggggccggcgcggctggccgaggagcaggctggcagcggcagcggcggcagcggcagccacccgggggaaagagccgggggagggcggggaggcggggtgaagaggaggaggaaggggaggagggcgggcagaataaacttcccgaggcgcagaggctcgggctgggagcacgaccgcgggcggggcgggcggaccagctgggcttgcccccgggggcggcgggggagaccgtcacagagagtagaaaagttccccctgcgccgagggggaggctgcggcggcggcggcggctgcaaagagcaggagccggagcgggaggagcgggaggaggaggaggaggaagtggctgcggagcgctcggccaatgagtgtctggagctgtgattaaccaggcagcaacacatcatttcctcccggcgcggatccagggagccgggaggggagagaggaggcggcggggcggggccgtccccgcgccccctgcaggcgcccggccgagggcgagcccgccgagccccgccgagcctgaccgcgccgcccccggcgcgcctggcgctgtctggccggtcgcttggcccgggtggaagctatgagcgcgccgccagcggggctcctcggaggcggcggggcaggcccgagctgggctcctgtggccggggtgggaggagaagaggccgcgcggcacgggtgagtgcccaggtaggcgcgggcggggccgtctggacagctcccgagggcgcgcggggcaggcgggcggacgggcgggcatcccgggcccggcgactgcgggcggccacctactcgagccctgcatgtcagacttgggctggattctcagagagaagccttagcattctcatccaggccatctctgacctgccttcagatccccttccactttgctcatttccttgcaaggtctagggttatgacagagcttgccatgttcgcctttggcttccttagtaacagaaataagcatggaggggcttctgcagtgatctagccctgtcctaggcgccatgggagcttacagtggaaatgcaggaacattctccgctgcagagagtctgataacctcggtccttagatacacaaaaacaccccagtgtgctaatattacccagagcatcaaaaaggcatgcaaggatcaaattttgcatggttcctgctgagtgtaaaggaaagcactaagccattttctctgccctctagaagcttataatgtacagtcctatcacaaagcagaataaaaacatgaaacctataaatgggaatgccataaagtatttttatctctacaggttcattcatgcagagggcatttattgggtgactgcagtactgcaaaaggttgcaaaggaaatggaagatctggtccctgcaggttgggagtttacaatctaattagaaatacaaggcatatatacgtgaaaaaactagaatccccagctgtaagcaaaaggatggagtaggtgggagc

SEQ ID NO: 8893 - DNA, 6000 bp, Homo sapiens
ttgcaaatattttcatgttatctcatttaataaaaaaatcagtttgcagatgcacaaattgaagaagcaccagagattaatgtcaaatttagaaatacttttgttagagaggaattagagccagaggaaaaaggaacatgtactttgcaaattagtgatagttaagataaaactagttctttagaacttctgagattgtcagaatgtcttcccaacccatcccaagaaccccaagtaacactttgcaatttgctatttgtgttgaagtcagaagactggtaattcacaaaattacataaacatatgtaaaatctaacagtgaggtgatgagactttcttcccaactttctgcaatgaccatcccacttaaatatcaactaatgtaatgtttagcagaagaacatggacaacgagattggtaccagaaaaacaagtttattttagctaacttttaaagaaaataaatagcttattcactcattcacatgcttgatatgcagagtaagcacttagaatgaaacttgaaaattccatcaagagaaaagtatcaatgaactggtgaatctcggattgcttcttgagtatcaaaagacaacatgcaaaaataaagataattccacacctcctcctttttaaaagttttgccagtactgcagttcttcacagctgttcatagtaaacgcttggttaattcaaatctgttcccctaatactccttgaaacaaacagaattaccggtctattattactgaactaattaatattctctgggtttttatctttttttaagagcatttagaaaaaacttttataaactgcgtatttatctcctgttgactatcaacttattcaaggtttctcaaacattccacactatcttaagtccacactacaaggcagaccccaaaactgggctctatctcttcctaggcaattctgtttggtgatcatgtatgctcttcaagccaaaattcctgttttcactgcaatttatgagaaagaaatgatcctcctgtttgctaagtggatcttctctaactaccttcacctcatcacctgttcctttcattttccttttctttttttttttgagacggagtttcgctcttgttgcccaggctggagtgcagtgtcacgatctcagctcactgcaacctccgcctcccaggttcaagtgattctcctgcctcagcctcccgagtagctcggattacaggcacccgccaccatgcctggctaattttttgtatttttagtagagatggggtttcatcatgttggccaggccggtctcaaactcctgacctcaggtgatccacccgccttggcctcccaaagtgctgggataacaggctgagccaatgcgcccagcccctttcattttcattctatctacacaggctccctcttttcagtacataagtaagttcggaggttccttctcctaaaaattacctcatcagtgaggaaaggagggattggggcagaagggcctgaatctttaacctcttgcaatttgagtattgtctctgctgcttcatttaaactctttaagtgtgctcatcgccaaatctttcttcccagtcctcctcctgtacctccaacctagccagctgtatttctgtctcctttgctggctcatcttcctccctaaaataaaaggcatttcctgaggttttctcatgagctttccctttcccacagcttcacctattcatatttatgctgccttctcactggctctagtcactcatttccacccgcctacctccctctggatgtcctgcctgcacctccgagtcacatgtccaacaccaaaccccttaccttttcttccctgctcccttaaacctcttttgtcaacttctggccacgcagtctcaatctctggacaagggtaccaagaaaggaagaatgcattcacttgccaggaacctagattttgcatcaaatatctcaactctgtcccctctgtcctataccactttacactaaacctctcatctgaactgctataacactctccttttggtattcttaactcaagttttcagtacacactattgctagagaaacattccttaggtgtaattttgatcaagcctggcactcaggatactctacccaacatttctcaaactttaacgtgcatgtgaatcacacggtgatcttgttaaaatgcagatactctcattcagggagtgtggggtggtgccccactccggagttttaacatactcccaagtgacaatgatgctattagcatcagactatatgcatatacagtcggctctaacctattttttctatcctcatctacttctccctgcctagcatacatatgtgcatgtctatatcgcttacgtacacacacacacacacacacacacacacacacacacacacacagacatacacagagacaaaatgttttccaaacataatctccggcctctgtgcctcttgctgtttcctcaagtccagtgactttccattacaattttacccatttttcaggaaccaactcattctgccacaaccttctcttatcttcttacctaccctcactcccatacctcacctagtagaacaccacaaaaaccttgggacatccctgacactggcactgtttctagtctgtaatgttgttataggtcttctcgtttcatccgtactgttagactgcacactctcctggaaggcaggaactacctgcctaacctctgccacccagggcatccttgggctcttgttaaccagtaagtacctgttgaagtggatttgaattctaagaaaaagaaaacgtctcaactctacttcatgtaattcattttgagcaggagcttcagaaatttatgataaacaaaaacactcttccaggaaaactgactcattagcaaacctaagaaaactttgttttatatatatatatttacaaatgtttatatattcaaatggtgcctagagaattttagtacttatcctatttatagtagtctccagatatatagatcaaagttctaatattaatttaaaattaaatctaacttgttacgatctagtaatgactataagtctaaaatatgttccaatccagagcccagccttccctagtttaatttacttaatgctccctttagcactccatttataaaatgggacatcactttctccacgggtgtgataagattggctgtcccccaaatttactgttaacatgccttacattgtgtctagactttgaaaagtgctttaaaacaatcaccttgaagtaacattttttgaatgctgagaaactcaaagaaaaccctatattaaatgtttatacagtaaaccccttattcaagaacctaaccatggctcttaggttcaagaaccaatattcaagaatctgactatagctcttaaactttagcgtgcaagaattatccggcgtgcttgttaaacacgcagatgccaggctcttacccagggaatgtctcattcagtaaaactggggtagggcctagaaaactgtagatttcaccagcaaccccaggtgattcggatgcaggtgttccgcagatctcaattagacactgatctcaatccttgtccgggggcactacagagttgtgtttgaaagaaaatgcagacgtcttttgctaaagtcctttctcaaaacagctgtcacgccagcacagacaggaggtgatgtgcgtaaggaaaaagagggaaaggttccttggaagagaatcaatgcccgaaaacaatgaaagaggggaagtggcgtttctttgcaaccctggaattccattctcccgcacctgcgaggatgctgctctgacccgtcggccagcaccaggccctcgggagccgagcccaggcaggtcgctggccgggggatgggagggcgtcgtggccccgcgctcgtccccaggtcgccagctgccctccgcagccgagggaagacgcccgcccgggtcccggatctccgcccccctacaccgcatcctccgcggctcgcgcgcgtaaacaagttgcctcccccgggtcggcagcccctcacctgccgcgcggtcgcaactctgtctcatcgtctggttccggaccccgaggctcctgctctcccgcggctgccggcagcgcctcagcgtcctccacagtcacctcggccgcagccacggcgcccgccgccggtactcgcgtcgctgaggtgggagcagcggccgccccgaggccgaacgccgcctccgccgtcggcgctgggaggccacgggcgcgccccgcggccaccgtccttgccgcgagccccagcagcagcagcagcagcagcagcgcccgtaccagcagccccgggctgatggcgcgctccatcagcgtcccgccccgcgcgcaggcatggaggcgcagccactgacgcctgcctctcccgccgcttggagctcccaagaaggcaaggacgtgctagggaccctactgccgccccgacggcctggacagccagccgtgttcccctggccacgtctcagcccggcctctgccgctgccacctgagtgacagcctatctcggacatcgcccattgagcaaactttccgcgcgtttgctctctcattggctgcggccgctgccactccatgttcccaggctggccttgttggggaaggtggactttccctggtggtcaacatcgcacctaccaatcaaatcgtaatttcgtcgttcgaggcccgtccctcttccggacgcaattaccaatgagaaatgcccttccccgacgtctttttacctgattggtgcgctcatcagttcccggaatacctttcctacaacagattggccatcgcggtggttggcctcgccccacaaagcgaggcgctggagaagacttgaagatcattggtggaagtggatgtccctcaaaggtctgcgctaactgcctcttgattggttggaagcggcacttactacgtggcggattctgactgtgaagaggactgtcccaagtgaagagtgggaggcaagtgccttgtgaccgggaggaggtcgaccttaaaggagctggtattgtagctcttctaaagcctagtctacttaggaaggcaaaagcgaagcagcaagaagtggccacagaagccgtgtggtccctagaagtagaagggtaaggaggatgcaggagatggtcctacttgtggccgcaacggggctcagaagtccgcttgttagagatggcagtgacctgtgacaatccagtctgcccgacacgcctcccgcctccttaggaacgggaaggagccccggcccagtgcactgacgtagttagcctaagatcacgtagctggttggtcacagaatcatgactttaattcatgtcttctgactctgacctggcacgctttgtacctcaccaaagacagtgatgaaattgcaaaagggcagagtggagaagactggaatgttcagccaaggcatttgaacttttaatgctgcaagtcaagacttcctgaagatttttgagcagatgagtgaagtgataagaaaatgcatcttcagcagtgacagcatcaacgaggaggagactggccgggaggctattacccgcatcaaaaccagtgaacattaaaaaaaattttttttttagagagagggtcttgctcttttgcccaggctggagtgcagtggcttgaccatagttctctataaccttgaattcctgcgttcaagcgatcttccttcctcagcttccggagtagctgggactacagatgcgtgccaccatgccaggccaatttttaattttgttttgtaaagatggggtttctgtgttgcccaggttggtctcaaattcctggcctcaagccatcctcccgcctcagcctcccaaagtgctgcaatttacgggcattagccaccgcacctggtccaaaaccggtgaagatttgttaaggtgttggcaatatgggtatacctagattatccttcatctgctaaaaacatgctctaatctctccccagccca

SEQ ID NO: 8894 - DNA, 6000 bp, Homo sapiens
cctcgccctcctcgcccgcctcgcacgggcttcccccgccgctgttgggcggctcatcgtccagcttcacctcgccgctgtccacgggcaggacctgcgaggagttgaccctcacgtcacgaatccaccccttgaagggctcccgctccctcaccgaggccagggtgagcttgagcgccgcggcgcgcagttccgggggcagccccccgacgaaaaggccgctgaacaccgtcatgtccctgcgcttggacttgacctccacccacttggcctccacctggtcgatgaagagcgtggtgttgcggaactggcggcggatgcgcacgctgtgccaggcgccgtcgttaaccggcgtgtcggccaggagcgtcgcaggctcagcgcagaagatggagaagctgagctgcaggcggccgccgcgcgtcagaatcagctccaggaagtcgcagaagccctcgtcgtcgaagtagagcacgaggccgcgggcgctgcgagtcttgagctggaagctcatctcgctctcgcagcaggcgttccacttggggaagcgcgtccattggccctcggcgcccggaaactccagcccgctgcccagctccgcccagcagcccaggagcagcagcgagaggcacagaagaaaacagcccccgcgctggagcagcgccgtccccatgctcggggctggggtgcggcgggggggtgccggggccgacagggtcaaaatggtcctggacaccgtgacgaagaaataagggtcccgagagacagaaaggtaaggggaaaggcgggagtgagagggatgtgccctcctttatctagttctttttttcttcttcttcttccaataaccccgccctctctccctgtagtcctcttccaactggaaaacgttgaccccagtggtacagggtagccacagaacttccagaccaaagggaggatgcactttggagacaacgttctggaaaaggcttcaacaaaagatcaagggaaagcactgacccatttgagtctgattaactaatttaagagtatctgcagtgtcaacagatacttaactcctcaaatcccattatctgccaggttccaccagtggtaccaggccaaaaggaagcagtgagagtcagtaaaaagaaaacacttttctcaagaaagtacaggaagccagcagtgagccagtatccttggatgcttgtgaatgcctcaagtctgtctccttcagatgtggtgtcttacagcagaacggagaaagggatgcttgcctctttagggcaccatttcttaacccgaggatagcttcaaaggcctgcttcttctgtcatagcatgggcttcagcaccgctgcagccaaagcctaattccttgtgcgtggtctcacaagttggattttacttctcttttcagccacggcaacagtaggactcaaacccagcagttgcgaaatagccagaagctgttagatgtggaaatcgcaacagctcctcttcttttctctctgcctctgcagggccaagctaagatgccagcacatcaattggttgtgtgttggtgatgcattttggttttatcttgtcttttttaaggactcagacatctgcagagaattaaagtcaaaattaaggtctaaagtcaatatagtattatataaatcattattcagctcataacacaagtgtagacctggtcctattagtaaggcaaagagttaaccttcttgtatggagcttttgttatcctcactacaagtaagtcctaacattttctaatagttaatatgacacttttacagtcagccatgacacccttgtagtttattataactgttagttggtaacccgaagttttaaagagaaatttgattatggttatctttttcttttcgcaagatagtttaatttttaaaatatgtgaggggagaacaaatgcttttaaggatttctacctatgttgtgtgcttgttctgtggacagtaaaaatacaacctattcaaatctcagttaagagattttacaattggcaaattagattaaactgttggcaggaagctgccagcttagacttgtatagcattcctgccattttatttttcttagaaggaatattgatggtttcttgatagtctcttgcaaaatttcacacaagtatagttctcctttatattaatgaataatctgttgtaaaagaaaaccactaattggagccagatttatgtttttggcattgtctcaattgccctaatattaacttctctaaaggtgcataaagtatttaatattttgcctaaaagtgtagatctaactcctcctgaagtctgtatcttgctgtcagccctcacaatttgtgtggtcagaagagctgttggcatgtatgtcatctcagctgcagtggctccaggatgctagaatttaaaaccgtacctttgaatcactcactatactattaaatcacttctctttattcaactctaatctgacaggttcttgaaatggtacagaaatcataatcactgatttttttcctaagtcattttttaaccaaaaaattactcttaccttttgaaaaaaattacaaatgtataatctgttcatgtcaaggaagtgcattatttttctcactatttcttatattccccacctcttgcaaacacacacactgcaatatatatacaccatacacacatgcacacacacaccccaaatttattgtctggatgtagaagctcactacccaattaacactttttttcccttacaagctgaaactagcagtaatttatggcaccgcattgtgctgctgcttctccatggggggagctgagagcatttctcttcagtacagagcaatccccacaggtgtcagctgagagccaccaagctagggtatcccacttcaagttcctcccagatgaaattgatgactggttctctctctttcaacacacacacacacacacacacacacacacacacacagtgtgggtgtgcgcacatacacactgcccactagcaaaaggaaataaaaatctcagttgcttatttattatggctgatacattccacaccatcagcaatcaccagtcatatcttgtcttctcctatatcaaacccgaggaaagaggctcgtcaaatcatctgaaatagcatattattcagtatactttcatattttaagtggactcaggaatctgctaaattttcagtcatttgcaaaataaatctggaatatcatgatcaagagtagtgctttgaaccctttctcaagctcatgtgttagaaaacctttttttttttcttgtgtgtgtaactctgttggagccaattattgtattaattaatgttacattgatcacataaccttttttctcccgtccctcctgccctcctccactaatgcacaccttgacaattttaagggatggtggaagagagaaaaaccgtagagcaatatatatgtacatatagatatatatacattcttatcacagggaggttaactggttttcccagttcttggaggaagctcattgtatgtgagcgagtatctgtatttatatggagaaaagaggattctctctaggtgccagaaagacctggccagttcacaaattagaggatgaaataaagggatctgaaaaacatccttactgcagccaaaagaagaagcgctctaattcaaaagcagactaacagcatcattaatcttttctttcatttctagaatcaaattcatcccaagtcactaggaggatcaatacagtacgctcatcggctgcagttgcatattttaatgtttctgatatcacacacacatacacacctacacctttccatgcacccttcaatatatatatatatcttcataaagaacatgaaatctctgagagaaattttagaagtgcttattatttcacccctggcttttgcaaagtctctcaataccaatgcacagccaaaattctctctggctttcccgcccagtctctaagctccatctctaataccagtgcagtttcttggagctcggggtctactgcacaaattaacgatgggcacagtgtggggctgatgaggtagggaaggaaatatatggagagatattttattgctttgatatctagcctgtctcttattttctttcttttgctaatacatcactgcattcagcctttaagttactaccccagttccaccatctcttcttgccatctatttaaaaggcttcatgcaaaacaaccaagatctacactcctccaccctcccaccacccatctttccctgtgtatttgtggcagatcctggctcagttacaatggggaaagatatccttcttcagcttgcctcgccccatcccctccccccaacccaaattgagcttctttacctgcccggttattcccctcagctcgagccagagcctgaagcatgcatcggtcaaagcgaatttcctgaggtctatggataaggcgactgctgctgccttttcagaggcgtcaggcttgagcgtctatctccaggagtgcgggaggggagaacaggcaacggaggggagcaggaggaggaggaggaggagaaggaggaggagggggaggagagggaaagagctgggaaggaaaaggcggtggtggagcctgagaaggctgggttacgtgacgccgggtgctgtccttctgaaagagaagggcggagctgagctctccgcagtaccatggagagcggcgggcccgtcctttggctggggaatgggtgggctcggcccgtggtcgcagcccctccaggtctggatgctgcggagcgaggtgcttttacctttgcatcgtccccttgcagggggagcctgatcctgggggcggggaccttccgcaagcgcttctaacttgtcaccaccctctcttccccatcggaaagaaagaaagagagagagagagagagagagagagagagagagagagagagaacgaacgaacacgaaccagagaaccacgtagcctactgagcatgcccaggcccctgctagacccatggaaagctgtatggagattccacttctccggggtttggtagtgattgggcggggatacctgagagggtgccaggaaagggtccagcagtcaaagagaaggggccaaggagtcgataattatgatgagctctggctttacttgtgcaccttggtctcctgctcggaacccttgaaaagaagctgcagcttttcgaggaatgcaggggcaagcaagactcacacaggcactggcattcttctagatccgatgtcccttgccccaccccttactgtggctctgccttgggtaatcacaacaaatcttcatgacttgcctaggctgtgccaaaaagatgtaaaaggaacccaccagggtaagatgccaacttgcagacgacgatcaactgtgtctgacaaggtgctttttactgcagcctgtcgtcattctccagccttctgtgctctgtcttgaaccaagttttctacctgtttaactcttccctccgtctcctcctcccttttgcagctggtaaaacctggtgaaagtaaaactgggtgtgaggctctaaccatgcaactgggcatgcccaataggcattgctgggtttggtgagaaaggggttaaatctaagggagcttacagattaggtggtagaggagttcggggtctgtggctttaaattatggtttgcaccctatggacatttaaattcctattcctgtatattcctagcctgggttagttttggagcagatacagacatttttattgcaacgccacagacctaatagtctgaacctcaaatactgtaaggcaagactatttttggcctccaggccctatagagcaagaatttaagaactagataaatttgggaacatcaaaataatatatattacaattacaatatgtatattcttccaaaaaactagaactcattcctatgataagccgatttatactttcactacttttgtaaaagggtctaaataacctgaagg

SEQ ID NO: 8895 - DNA, 6000 bp, Homo sapiens
gcaccctcctctccaatcctgcccctatacctaacatcactgagaaagaattataaacacacaatgagttttctgtccctctcattaggtggaggaggtctagggtcccaggtccttcctatgtgcctgtccctcctctccaccccaacccgtgtcccacgcacttctcccttctgtccctgctcacctcataggcactggtgagatgcaggcggtagaaaacggggatgaagatgtgtgcaggtatcagcagccccagaaagtagcagcagcccaggaaccaatattgggtcccaaatcggtagatctctgacggcacacccaggatggccacggctgactggaaggtggccagcagggacagtgccaccggaaggcagcccattttgcggtccgccatcagcagctcaccaacagtatgccggccccagccacgacaagcatggtagagcccaatggcaagagagagaaccagcagcaggacgaacaccacatagtccatgatggagaaggtagacatgcccacgcttgtgcccgaggttggggaaagaggggctgaggtgctcacccctacactcatatcctcactgtgtctgtgatctgcagccagttgctgctccagggctctggggtagggcaggggcggatgtgtggctacaatctggcttccagccacagtctcacagtcttcctccacggagtgatactgtccagggtgagctgcaaaggaattagctcttagtgaggcctatctggccttggtagccattcacccttgggccttgtacatcgcatgccatcagaagtggaccagccagcatagtggtagcccttcaaggtctagaggccctggtatgggtttggtaggggacataagtgagggagaagcatcagagtgcgacagccaggagacaatataacttggccaggacctttgagtatgcacagctgtgaaattcaacaaccttcttaggtctccacccgagtaccaaaagaaaaataaactctagcctaagtttcttagcagaatttcccagccccacttgaaggcacagacccagtcactacaatacactaagccagcagagcccagcctggcgccacagcccagcaggaaacacagcatggagactaatggcagcagggcttcccctactgcccctggcctcggccctcgcctcctgtgatccccagtgtcacccttctaactgatcatcagtgagactgcctctgtggcagccacagactccatttcaggcgtccccaggccaacccctttcttaaggttctccccaacaccactagataagtgctgccacccacctctcagcccctctacctgcaacatcacagtcaacagcagacgcaggaagagcggctggattcaaaagtgagaggggaaaggtgagagggcaccatgctggagtcagggtttcagaatgacgattctccattctggagagaagcaacccagtcacggagctgagaggcaaagggaccagccaaagagagtggtcgtatcctgctggggacagacacctacctggagaagcaatccctgttctgaggcagagttgcctggagctgcagagctgaggatctggctctatgagtagctgaggtgagagatcaggaattgggggtggggtgaagctcagcagtcatttgttctggccccttcagggaaccaatggctgtgttccaaatggccctatcaccctatggcccccaaactccaactcagccctagaggctccagaacagggaagagggagctcatattcaacagcattcctagatggattagcctttcagcctaaagtactcttggcactctgtgcgggagggagttggaaagaaggaactgaaaacatgggaaagttgaaagttgattttctaactcctgcacaagaaatgttaatcccccaagaatacaccacaatcctcagagaaagagggaagggatcataatatttaaaatcttaaatctttggacaccactattacaaccaaccccccaccactgacgatttcacagataaacacgctaaggctcagatggttcaagtgacctttccaaaagcacagagccgactattgtcagagcataaattagaacccaggtctagggattcaccatccaccctgtctgttctccaagcgtatcatattgtcttcaaaggcaatcctctggggtacttattggtatgaggaaaaaacaccagagaatgccatgtagttacacagcctaacatgacgacagttaacatttgctgaacacctgctatgtaacccagcagtgtgtgaggtgctttataaacattagtaataatacataatgaagctaacattttcaaaacagcatgtctcagattaagacacgaatactctccagttaacacaagaaaactgagagattaaataacttgctcaaggttatgcagcatgatacaaaacaagagagagagaaacagtgctgtctgcagctatgacaggtgttcagcaagggccctgtcctcactattcccagaaccaggacaggagcagagtgttgcagtcagtcattcacaggacatagtttagatttcaactaatcaagagacagactaacataaactatgtcttctgcttttgcccactaggagaaagattaggctgcctttccgctctcccacagtgtgttcttgggcagacactggctggctggcaagatatggcctcatgcagactaaacctgaactctgaacctcttggggccaataaagagggaaaatcagacctggcaactcttggatcacatgttctacaagattcccaacaggcttaaactctggtttaacctaaacatgccctgggcctttgcacattgcaacaccctgagttttctcattcgtctttggcaagtttttactgctatgatagagatgatgggaactactggggagtaagaggaaagaagaggtctcctgtgtgcaaagaacacagaacaaagaactaactatagggttagtggtttagagaggtaggtggccagagacaggaaggaaagtcccagtatgggacacggaggtacagaaataaagacactctgctgatgggacttcctgataaaattctatttgcatgatgtatggagaattcccctggatggcctgagagagccccagggaagacaggaaaaacctgacctagcaacagaccagattctgagaacagatctgtagttttctaaacaccctacattgatccaaacgctatggtctcgcatctctccagaaagagggcggccaaaagcaagagctagctgttgtttcactacaactataacatgccaaggcacaaacagcagattgtgggacccccccccctttttttttggagacggagtctcgctctgtcgcccaggctggagtgcagtgacacgatctcggctcactgcaacctccacctcctgggttcaagtgattcttctgcctcagcctcctgagtagctgggactacaggcatgtgctaccgcgcccagctaattttttttttttttttttgtatttttagtagagacgagatttcaccatattggccaggctggtctcaaaactcctgacatgacgatccacctgccttggcggatcggtggcctggccaccgcgccaggccaagttcaggtttttaaaaggggtcccacatcactgcctgtaatcccagcactttgggaggccgaggcgggcagatcacgaggtcaggagatcgagaccatcctggctaacacggtgaaaccccgtctctactaaaaaatacaaaaaattagccaggcgtggtggcaggcgcctgtagtcccagctactcgggaggttgaggcaggagaatggcgtgaacccgcgaggcggagcttgcagtgagccgagatcgcgccactgcactccagcctgggcgacagagcgagactccgtctcaaaataaaaataaaaataaaaataaaaacctgaactcactttggtcacacactgcagtggatcgcattgactcctacaaaaggcaatgagaccactgcaggactaactgttccaaaaagattccctcaaaatctgtcctggggcctataattcctcaaggtgtgaaaggctttgggggccctccttaaaatgctaatagctactaacaccttagaaaatttgccagccagctaaacgtaaacctttcaggaacttccaggcagacaccatgggggtaatgtggaagggaagcctggctcggctactcgagatgatcacttgggtcggctttaaggagctttctggctggccctaaccaacactgtcgcgccgggagcagggatcccctggcgcccttcagtcagggcgctggcccaccctggggcagcaacgcactcccttacctccgtggttcagtcagagctaggaaggtccctttgtgcttcctgagatcaacatcgctcccttttcctgggaaggcaaagaaaatgagttagggaagcgtctatcccgctcctacctcctcgccaggctccgggacgctatgcgctatcagcattgaggtgaagaggactaggtgcccggggcgatccaggctcgtgtcctcccgctggagtttgaggtttgcccttccctcatcaccctcaccctcgttctttctcggtttcccgcttccctctacgcggcggagaccaccaccttaccgctcgcacttaagatctcagacccacgccggaggccggctcgctccgcccctccccgcccccttgtccccgccccggctcagacgccgctccccggtgcctctcggcaccggctcacgctctccaggcccacctgcccggtctccacacgtgggtagccagagcccggccgagagccctggccgggagcccgcgggggccccgccccctgcccgccccctgcccgccccgctcgccgtgccgccatgtttactgagggcggatggaggggcccgagtttctgcgaagccgcgacctcggcgtccggacgcggggaacaccgggctgagggagtctgcagtcggctccgggaagccgcgcggcgacgggggaggccttcactaaaggggaaaaggaagagggggtcggccagtatccccgaaagagggctagggcgcatgaagaccagcgcagagctccacgagcaggaaaagcccccaagcagccccagggcgactggaccgggccgcttaggccacgcccggggaagagggcctgacgcgctgcggggcggggccgcggggccgggtcgcgcgagcagcggagcaccaagggaacggaaaatggcgcctcacgacccgggtagtcttacgaccctggtgccctgggctgccgccctgctcctcgctctgggcgtggaaagggctctggcgctacccgaggtacagaagcaagtttgaggtcgggctgaagcagggtcgctggccagccgtgcgtcgcgctcgccagcggctcccccttctcctcggcgggcctgcggttctgatttcgtccctgacgcttcccgaccctgcccagccaggtcctgttcccaagtactcacgtcgtgcaggccttcggcgccccagtcctgccgactttcaaagacctgtgaaacttgatttcgccccttaattttagaataactttaagttctttctacagacgggtcctctgcctcttgtgtaatctctctacgcacgaacgccatatatcgtgcggtggtagggctgtacttttgtaatgcttgatgagttctttacgtacctgcggtcgttttacaccgcgccaaactagggctgtcagattgagaagtctctgcagaaagcataataaataagttcgaatagtgatcttcagagatgaggaccttccctgtgcgatatctggtactgaaagtgtcgggagctgattcggcgcaggactctggaggaagagatggcatctcctagcctagcctgttacaagggtgggacacgagccgtttatccatttatcggccccgt

SEQ ID NO: 8896 - DNA, 6000 bp, Homo sapiens; identical to SEQ ID NO: 3349

SEQ ID NO: 8897 - DNA, 6000 bp, Homo sapiens
tcaaagtcattctctgtccagctttgttccgttgctggcaaggagctgcgatcctttggaggagatgaggtgctctgatttttagaattttcagcttttctgctctggtttctccccatctttgtggttttatctacctttggtctttgatgttggtaacctacaaatggggttttggtgtggatgtcctttttgttgatgttgaagctattcctttctgtctactagttttccttctaatggtcacgtccctcagctgcaggtctgttggagtttgctggaggtccactgcagaccctgtttgcctgggtatcaccagcagaggctacagaacagcaaatattgctgcctgatccttcctctggaagctttgtcccagagggacacctgcctgtttgaggtgtctgtcagcccctactgggaggtgtttcccagtcaggctacacgggggtcagggacccacttgaggaggccgtctgtccgttctcagagctcaaacaccatgctgggagaaccactgctctcttcagagctatcagacagggacgtttaagtccacagaagtttctgctgccttttgctcagctatgccctgcccacagagctgaagtctatggaggcagtaggccttgctgagctgcagtgggctcctcccagttcaagcttcctgggcgctctgtttacctactcaagcctcagcaatggtggattcccctccccctgccaggctgctgcctcgcagattgatctcagactgctgtgctagcactgagcaaggctccatgggtataggatccgtcaagccaggcatgggagagaatctcctggtctgcttgttgctaagactgtggaaaaagcccactatttgggcagaagtgtcccatttttccaggtatagtctgtcacggcatcccttggttaggaaagggaaatcccccaatcccttgcgcttcctgggtgaggtgatgccccgcctcgatttggctcaccctccatggggtgcgaccagtgttcaaccagtcccagtgagatgaaccaggtacctcagttggaaacacagaaatcacccgtcctgtgcgtcaatcacgctgggagctgcagaccagagctgttcctattcccacattttcatactaaagcgaaaatacatacaatggtctcaacagatgcagaaaagccattcataaaatttaatatttcttcacaataaaaatctgagcaaggtaagggctgggcatagtgactcacacctgtaatctcagcactttgggaggcctaggtgggcagatcacctgaggtcaggagttcaagaccagcctggccaacatagtgaaaccccatctctattaaaaatacaaaaattagctgggcggagtggcacgcgcctgtagtctcaactgtccgggagactgaggcaggagaatcacttgaacccaggaggtagaggttgccatgagccaagattgcgtctctgcactccagcctgggagacacagtgagactccatctcaaacaaaaataaaaatgaaataaaaataaaataaaataaatctgagcaaggtagagagagagaattttgacaagatatctatcaaaaacaaaaagcaaacttcacatttaacagtaaaacttcagaagcactccagtggaagtcaggaccaatacaaggatgctagcttatctgtaaatgacagaactggctacacaaaactaaagagaatttcaaccaaaccatcagaactaattaagagtttgagattatgctgtacataatatttacattaaaaaaaatcaatagcattctgccataccagttaataaccaactggaaaatgtaaaaggaaaaaagaaagcccatttgcaactactacagcaaaaataatctaggaataaaaaataaaatatggaaaaaaatttcatggaggtaattataagttttttgttgttgttgttgtttgagatggagtctccctctgttgcccaggctgcagtgcagtggcgtgatcttggctcactgcaagctccgcctcgtgggttcacgccattctcctgcctcagcctcctgattagctgggactacaggtgcccgccaccgcacccagctaatgtttttttgtatttttagtagagacggggtttctccgagttagccaggatggtctcgatctcctgacctcgtgatctgcccgcccagtctcccaaagtggataattataagatatttaaggcaaaaagataaattcccaccaattgtagcttatacaatattcatggaataaaaacttacttgatccataaattcagctcagttccaataaaaatcccagtaagtctttttataaaggactaagtgtaaagagcgcaattacaaagaacagcaatgtgtggaaactcttgacatactacatatcaagacttataaaattctgtaattaagatagtgtggtgctagtagaaagtcagaaaatgcccaaaacagaactacatatttaggaaaccttgatatgacatagatggcattaaaaactaagaatagactactcaataaatggtgctgcgacaattagttacctatatggaaaaaaaaattagatttttatacaaagtcagttccatgtggattaaatgcaaatgaaaaaaccggaagatttaaaagaaaacatacagaaaaactgtcctgatctaggtagacaggatttcttaaccaagacaaaaagcataaacaataaaatatgacaattttggctgtattaaaatcaaaaacatctgtacaaaaaattgaacataaatataaagaggagaagccacacagtgaaaaatattagcaaaatgtagtaacaaaaaaggattagtttaacaatactcttacaaattggtaagcaaagataaagccaatagaaaattgggcaacagaaaaaacaaaaacagatacaaaaaataatatataaatagtaacatgtaattagatataaaatatatattattgttacattgttaagttttagatataaaatgcatataaatagcacaaacctaagtactaaaatataaaaacattactgggtatgcgaaacaccaaataaggacaatagtcaccactataaagaagaatgggagagtttagccgtcttttattttgaaaaattcgacataagtctggcaaatgttaacactgtttaaagttgagtagtgaatatataggtattatcttactctctactggtctctgtgtttaaaatatttcacgataaagtgggaaaatggttaattttacataaaaagaactttaacagatgcaaaaaataaaacctctctcattcgacaagcagcctaaatggggaaaaaagaacccactcaaaaaaaaggtagcagataatgtcaccgtggcttaccagcctaatcaaacttattacttgttatgtatatatccttattaaactaagtcgttactgtgttaaagcattttagtgtttaaataaaagatttcagaatacagcagaaatacattccaatatgttggggtttttacgcttaggaaaacctacaatagtaggtgatttgacatttgaatcacacctatctgaattaagatgtccagcactaccaaacaaaagccacacgaggccacgaaacactcccaactctgcatgttttagcctttttaaagtcctagaaaccaactgatactgattaaaaaccaaacaaaaaaaaaatacaggcctcagaaaaatacactattttgcacacaaagtccatccataggcctcagatctagaactcctgctttaaagttgcttctccaatctcgatccgaaacactggctgagttatgctggaaaagaatgcaaagtgtacggggcttgagttcctgttgcgtaaaacctttccggctttcagcaacttctcgagaggttaacacctttaaggagagactttgctccctgtcgatgccgtggctggacaaatgccgctctcaactgctacagaccaaagtctacgctttaaagatagagaagccattctgtcaaagtgaaaacagaagcggtaggtaggaagccgcccccctttctttcaagcacagagacccagagagacgcccaggagctcccgaaaaaaacgttgctgattagagctgccgggtcagaaacagctgtgagacactaaagtccccactggtaagcgccccagctccacctcggcccctatccccaaggttgggtattggttaaaggggggaagggaatacctccactaacaaccgctacaaccgcctcctgccaagtccccgctcgggcccactaaactcacagcctgaagaatcccacactcactggaaagtggggcccggtcctggtcccggtccggctcccggaattcggcgggtctcccagggtttggggggaggtggcggctgggacgccatctcctccgcctcctctcggctcccgctcctacccctgactgtccaggcccgcgtagaccagcacctggagcgtaagacacaacgggcagaacaccgagccgtccaccccgcccacccttgcagtcaggacaaggcttgagttactttgccagctgaatccatacagcgggaggatgccactaatttgtaggaagaaacacgctctttgtatttgccccagaaagagctgcctttctaaacctcagggtaaaggctcatcgatatttctggtagcggctacaactccctagacgtcggagtcccaccgaggcttttctgggagtggaccagtcgggctgggagtaaagccgcacgcactccttcgctcgtgggggaggtagggtgaggtggcaaaccaggcagtttttcggatttcctctacaaacaagaagggagaagctcacttagtcctagcgagagcgggctggtacttttgttctaaaacgcacgtttcctcggggaacagaattgctagacgcaataggtgcgttgtctttagtcttccctcttcccttcgagggccggaaggggttaaatctcaggctccggcgtctggggagaaggtgaggcgggtaggtaagaggtgaaggagtgcagactgggtgcaaaagaggtgtggcgggagagagttcgtttctctcctgctggagcggctttgttagcaaaggaggggtgagtgggaagtttgttgcacctgaccgaagggggaagggcttgcttggcgaaaactgaggcttgaggttagatctcgggatgaacttttcaagagtccacagtagattccagagctgaatgtttcagaagcccagtgaagtgtgatcacctctttctccgtaaatccacacccccagccccacgccgcgttacgaatgacacccttcggtagggaaatgagttttaaaagatcttaggatatgagactcagtctggtcatttcgctagtttttcttataccctgccccttttctcgttttcgatgactggtttttgtaatcgtccaagaggtgaaaataaagtccttcctctcctccagtaagccagagactgggctagttatccttgatttggggaggagggattcagtcctcctagggagcctgacacatgaaaggcggctttgtagcaacttgttacagagttatttctataaaacaaacacataaacgaaaagcaaacatcttgagggtaaccaacactggaaaacttacattgtggaatgcctttctcagggcttgctttcaaacataataaatctaatatggacaaccgatttctaatatcttatgaaatcctggcatttaattatctcacgatgaaaaaaccaaatttaagacgtaacgtattttctccttttaatgttaacattcttgagaagttgataaattgttggtaggtgaaaatgatgttgagaggtttgtaaattcatagctcgtttattaacacacattcaaaagaggtcttttttggggtctatttttagacctcttcaaattactcaggactggaagttttgtaattctcatcaatcaggtttggga

SEQ ID NO: 8898 - DNA, 6000 bp, Homo sapiens
cttaaggagttcaggaggaaacatcacatccactagggtgatcagtaaatgcttcaagagaggaatagaatctgaattgggcttgatgaataatccaatttcagcaggctaggcattgcacagtaagggacatttgagtggctcaggaagaagtaagcaggccaggctggacaaatgaagactgcaagtggcagaggatactgttaactcctggaaagtccacttcatcagtccctgatgcctgtgcccttccaatgccctggattaattttgactcttcctggtattttccagagttgtcatttctcctccatttctccaccaccacaaagccatccaagctctcatcccctccctctgggaagatctccaactcatcttcctgtgtacaatcttccctctctccaaatcacagaacacatgtaccacatgtactactttatatgcataacccatttaccctaaacacaaaactggctaatggctagccactgcctgcaaaataaaattattctccctggaattcaaggccttctgtcatctgctctctatccacctctcactccatcactggactcacgcttccataaacttcatatacaagtttcttgcccacgatgttccttttatcttaaaaaatctcttttattttgttcccaggcagggcacatatggttgtacaggttgcattaactagaatttatataaatgacactccctggccaggcgcggtggctcacgcctgtagtcctagcactttggaaggccgacacgggtggatcacctgaggtcaggagttcgagaccagtctgaccaacatggagaaaccccatctctactaaaaatgcaaaaaataaaataaaataaaataaatgacactccctgctagtttgggcagtgcacaacctctgcaaccttccaaccatggtttgtttccatcctccaccaccctgaaggccttctctgaacaacggaactctcagagatcaattgtgcctctgattcctacaccaccaacttgacaccaacttttctttacaacagaaagttacaatatttggaacaccagcagtgccttgaacataacagatattcaaaagatgtttgcaaactatgatggagtaagtcaagatcggcaggttgtcatcaaactgtaaagagccttgaaggccaagaaagaagttttggctttatttggcagatgcaaaatatggtcaaataatgagaatgatgttttagaaagactaatttcagcaaccacaagcaagcagggttttaacgactatacttaaagtgacaggttaagggccctctctgttgaagggcagaggggagcttcctctgtaatgagcagcatcctcattcggccatcctgcagtttatctgtttgggattgcagatattggttttcatatacctacactcagacagtgaagctaaaactgggccattaagctaagaaaaacatgcttttgcctgaaatatctaagtatctaggaaacagctctgacttgaataattatacacatacataaaatacatatacacaaataagcattacttttctcccttcacttcttttgcagtctccctcttttccatctctgtcttcccttttttgtttcttgtgtttctctccctaaaattactatgcatttctctcatttctttacaaatgctttacattaatgatctccatatggccctttccctctcccaaaacaccctccctccccctaagattatatttgaggtattttactggttttgctcatatactggttcagtcaactccctcattatctgcactaataataattcaattctcctgtttcctttgctaatgtagctcaaaccttcactaaccttagaattctacagttactggagaatcaaaattccaagtccattttcctaaagccctccttaaaaaaaaaaggcatttatgtatttaggtaaataaattaatttcattgtattgttggagaaccaaataagtaactcttatctgtaaattcaaaactgttagaacctaattcactaaacaaaatgagtttcctaatgaatttcctttcaaagcatgtatcttcgatttcaagccaagaagaaataatagactccgtggcactagacaattttatttacttcttagatttatataaaaatccttactccctacaggaagaatattatgtagaagtaatccactgcaatagcaaggccgccgttccgaacatgtacatgcctatcagtaaaacatgacagggcacaaccttaaatttaaaaaatgaatggaaggaggatcttaagacagtgtcaaacagataaactataatatgcagtttgggttttgtgccccaaaaggctgtcttctttgaaagtccatccttagtctgcttattcctcccactgaatatgctcacttgtactaaaaacaggaaagtgctatcaccacttcaaggtaagacagtctaagaaaagactgcaatattttcccattcatcctagtaaagtagaaaaaaaaatttacccaaatactgttttctggatttaggacagtttagatttttctttgttctcaaggtaatggttttttcccttcccatatcatagaccctctgaaagtcgcagtgtgaatctttgctaccaaacggtggacaagaggtttgctaactccatactttgtaggaaaagggggaagaaaagggcacagacatccattatttagagtctatcgataaattaacctgctttataatataacgattccattacagcacatagtatgccgggggcagagtgtatagaatgtgtggagagtgcacatttcaccataacaagaatccatctttccaaacactaccaaaaattggcaaataattcaaactgcgcttagttcaaggcttaattgttgaaccctaacaataaaagttcagaaaaatgtaattagcaggttgctctctgcgcaaaagtaaactacaaagaggggacatttgtctatctctacacgcccctccccatgcctgaggatttcgccctcaagaggtgcgtctagtgtaagggccagaccccgctggtgccccggacaacggggtaggagtggggaccgaccggtcccgtagttggccgcgcctgggcctcgctgggcgcgcaccccgctggctcggtcgcccggaggcggacaggacggagacgggacgtatggacgggacggacagacgcgacaggacggacgggacgggtagagaagcagtgcgtcctacccggagggctccctcccagggccggcggagtacctgctccggtcatccaggctgcggttgtcggcggctgcgttgcgccagtcgggcaacgtgctggcgcacagcaccaccatggacacgatcacgaacaccaccgacacgctagccaggatctgcgcggccagcgacgacgtgggctcctcgaaggtccgccgcatgcgctccagccagcgcctggagggagccgcctcggccccgccggggcgcgcctcgtcgcggcccagcacgcccggctcgtcggccgagtagaaggtgtaggtgtcggacatgcggtcgtcgaggcggcgctggcagcagtactcgaggtgcgcgccctccaggccccagtagatcatctcgttgtagaaggagagctcgcacatccgcggcgcgaagcgcagcttgccgtggccgcgcacgtagagcaggatgaagccgaaggcctccgagtgccggtcgaagaagtactcgttgcgctcgcggtcgtagtcgtcgcacacctcgagcacgtcgcgctcggagcggcagccgtgcagccggctcacgcggcgcagcgggaagtccttcagcagctcccgggacagcgaataccgggcgccgcccacgttcagcaccaccgaggccgccccgctgcgcccgaaggtcatggctggccgcccgggggactttcggcccgagggccccgctgcagccccccaccccaagccgccacgcggggcctgcctgcccgtggctgacgggggagcgcgccgtcggggcccgcgctccctcggggctccgctcctgccctccgctggcccgggggtccctgggctcgagtatctccggcgctgctagtagcgcgccctccgcccggcggtacctgcgggtggccggggagtcctcgccggcgccagcgctgagccccaccggctgggaacgcggctgtgtccgcgccgccgaccctcgcgcccgagggctgcgcacaccgaggccgcggtgccctctcccaagccgcggggccgaccccctgagggctgcgggcgccgaatggagccgccggggcggaatagctccccgtctccggcgctccctgcggccgcgaatccggcggccgccccgccgccgtccagaggcgagaggcaaagtgagcgggttcggaggcggcgaagagccggctcgcggcggcgggggcggggcctctgtgcagtcctcctcctcgcccgccggctccgcgcgcgccgctcacctccctccgcgccgccctccgcttcccgcccgcgcccgcacctccccggcttgctcgggctgggattcccgggcgccccgccctggacctcgggctccccgcctcgtgacgccgtcctccccctccgctccggcccgtagtggcggggaggggtccgcagggcgggggagcggggagcccagcgccgggatgcctgctcccgcgtcctgccctgggccatcgggatgaattgggcagtccccagggccccttttaacagccctggttcaaagcccagtgtggactcgggtgcggggacagacggcgtttggagagctttttccagaaactgtccggagcccagctcgggttctgacatcgcccctaaggatttctcagggaaggcatcccagccacggcttttcctgccgactttgctcttcctaccgccgcgcggggcgacccacgtaccgcgtgctcagagggcggctacacgccccatcccccagcctcggtgccgcctgccagcccgcggagggaagcggtccccgacccggccccggcccccacgttctggggcgcgagtcctgagaaggcgcctaacgtgtagcgcgcctggaccctctcgagatgctgcccttagagtgggatgaaagtctggggaggaacgccttgtcaccggcaaaaacagcctttctcttggtcttcgtctgcatcctccttttcaaaatatcttgatttcccccgcgcacccctgacccggctgcagcaccggccctccgagcgggaagagccccgtgaaggctccgcagagcgatctaccccgcgctcttgtccgtgcccagaaagcgggttccacttggcagggattattttaaactgctaccagcaattcattcacctgacacccgacaccggcagcccagcccgccggaggcgagacaggtgagttgtaaggcgaaccgtgttagatgcaaaacaaatactagaagaaaaaaataagggtggggtagggtgagatgcggtcatctgaccacagggtaacctggctggttaaagggaagagtttttcattgccctctacttttcgtaattttgtaggattgtccggtgcccgctagaggtcgccaaacggagtccttttgcgctggttcttaagtggattcctagtgaaaaggcagacaactgaaaatgtgagtgctgtcttttaagtaaaatcactctcggtggcttcttaaagaatgaaaatctctgtgagttgtttatccccagacttggataatttatcttaagagcactaaatgtgattaaaagctcaaaaacaggagttatttgctactttagtatctactaaatagtttgctattcagtatctattttgctatttagtgtctactgggtagatactgctactttgctgtttagtatctactaagtagatattaaacaagaaaaatatctgtaagaaagtgagtttcaagacagaattggaggtgctgatggccatgagtt

SEQ ID NO: 8899 - DNA, 6000 bp, Homo sapiens; identical to SEQ ID NO: 2110

SEQ ID NO: 8900 - DNA, 6000 bp, Homo sapiens
tagccccacacttgagcgacctctctgcagtaagtccttgatcttgtcagcttaataaaagtagggagagtagatattgtgccagcagcactgatagtattctaggaacttccccacaaattgggaacaaagacacgacagcagttttcttgggagagtgagtcacccgttattttcttcaggggaagggttctgaggcagctccaagctcacctgagcataaagcaggttcaggccaacccggttctccatgacatcgtcatcataggcagagtcccaataactgtgaggccaaggggtggaaaggggtaatggggctaagctgggttaaggcaagaggtagaatggaaaatgggcaaaacaggagcaatctggaactatcaggggctaatggtatagtgggaggaagcttgggaggcctggcagaaacacccagcactacacccccttgtccagattattctgtctcaatatgtggcccaataatccaatccagcacagcacctcccacccctccccttccaggcccagccctgacctcttccttagcacaatcttatactcttgactccgaaggctggtgacagacacataaggcagctcaaactcttgcaacttccgtacaactacaggttaaaaaaaaaaaaatgaaaatatagtgagatttaaaggaagggaaatcaagaaagaagtgccctgaggcaatgttcattctgggggtgggggtggggagttaggggggctgcaaactctactgaagtacccttgtactgcagtcaagtccagagaaactcacaagaaaaggctccatcctctttttctcgaactaagaatagactaaagtatccaatcaagtcatctggaagatccagctttgcagctacagcctggggatagggatagaagtacagctcatcatactggctggttccaatcattctccaagcccaggaccccaggatgtaggggaagaaggggcagtgctgaacaagcgcctcacctccaggacatcctcagtctgatctgaagttagcacgttgaccagaactttctgcccgttgctgagcagcacttccaaggacacttcctctgtggggacctgctgtgtctcctgttgtgagcacacatggggatgggaagcactgccttgtcccttgccttgacctatgcccaactctatttctaggtcccttgtgtgtctttattctcagctgcttaaatataggctgtgatttctttgatttcataagaatagaagttccattccattaaaaaagatgactcctctgttattaagatgacatggcctggctgggtgtggtggctcacacccgtaatcccagcactttgggaggccaaggcgggtggatcacctgaggtcaggagttcgagaccagccaggccaacacggcaaaaccccgtctccactaaaaatacaaaaatgagccggacatggtggcaggcgcctgtaattctagctacttgggaggctgaggcaggagaatcgcttgaatccgggaggcggagattgcagtgagctgagatcgcaccactgcactccagcctgtgcaaaagagcaagactctgtctcaaaaaaataaaagacatgaccttccagcaaggtcctttccttaaatcttggtcccacccaaagccctacctgttgtgcccgacgcaggaaactgttgaaagtctcgctgctcccaagcaatgggtcttgccgaactacgaggacaagagaacattattacaggaacttagcactcactcttggctccccagtcctcctctcagtaggttcccccgaccccatttcctgggctgatggtggcctgccacatcccccagctggcctcacctcactcactgtttgcataaattcttcacctgccccacccttggctgccatctaggtgagtccagtctatagaactagggaaataacaatgatgttaatctaaagcacatcagatacaaattaagttctctccactgatattaagactagtgttatactagtatttctcatagatgttagtgcccaaattgttttgctagtacacagagttacacatcctcgtacactatttactttgctaactgcataacagatcaaacaagagccttcctagatctagaaattaaatcaggcccttccacagaaccagctgtttttaagtctctccccatagtcctcaatatagtcaacctagtttcctgcaaccactcaccagcttgcatgtacttctctaactgctctctcctctgttctacctcagcaggagtcagagagaaaagcttctttggggggaatgcaggaagcacattggccccatactccttccgaagctatttagagaaagagatacaacccttcacataaacacagaaaatgagatgaggcaatctacatatgctcataatgttctcttgggtgcccctcccttccctcagtccctgttcccctgtctaccctggtcatctgagaaacaattcctttgacagcggtagcacctcaagggagctgtcctagatataagttgtgctctattttactgtgtacaagtcagcccctccacagtacggggaggatttgtactgggccaggacctatagggagccccttgaccacctagcaagactgttcactgaacccttaaaggaaggaaagggctttataaagtgcacagttaatagctaagtctgttcacaaaatatcttaggacttaaagggactttgcagatcaaagaatccatctttcagttgtagaaactgaggcccaaagaaatcagtttctacaggcctcatgcctgtaatctcagcattttgggaggcaaggtgggtggatcacctgaggtcaggagtttgagaccagcctggccaacatagtgaaacccctctctactaaaaatacaaaaattagctgggtgtggaggcagccgcctgtaatcccagctactcaggaggctgaggaaggagaatcgcttgaacccaggaggcagaggttgcagtgagccgagatcgtgccactgcactccagcctgggcaacaagagagaaactccgtcccaaaaaaagatatcaggtaacttgttcagggttgcacaactaattatcagtggagctctactgagttaaatagagtttaagatctggtaaggaaggaggagaaacattgcatcacagatacataacgataattggcacagctaaacacactgaaatgagccgaagaacacaaaaggaaatcggtgaatcgtttgtataagcagggaaaagaatttcaagttgccgctcagatgacagaaggaatgtgctttgacagcctgggtggaggtagtggggggaggggttggtttgtccatgcaggggtaaaggctactagagcagtaagactggacagaaaaccagaatataagaacaggaaggagcagttgttgcgcggacattaagcttcttagggagttcccggaaatgtcagacaagataaaccagggccctaccctgtggcagtgattaaaggggaactacagcctacgggaacaagaagagcgggtaaagggagacactgatgtccacgtgtagggaagggcttgaagctgtctcaaggcaggggtgctagtcccacctgctcgtgcagccccaggagctggctgtagcgcacccgacagtgcaggactccattcacgtgaatgttataggcctgaggacacaaaagtagtcaagcattttagggttgcggtctgcgcaacccccctgagaaccctggccggaagttgcctggcaactcgccggagtaacgcgctaatctcccgagggatagttcgcttgttttcgccagggccaagtcccaaagctgaagagccagtccgggggaaattcggacgcttgtgttgcagtctcactgcccaagaggccagtgacgcccaccagggcagctgcggcctagctcggggaagcgacccggcctaagggcctacaggagctcgggcgaccactgcacgaatcacacacatgagataagctcccagagaggccgtcgggagtcggcggcccaggaccaggcccgaagggtggcggtcaggcctcagaggccgctccgagatggctcgggcccgttatccccgcccctgcccggcccggctcggctccggccgctcctcaccacgtaggcggagccgccgctgtccccgctgcgggactcggtttcgggaatggaaaagtgcatgttccctacggcacggcacggccgggctccggactgtgagggccgcagcggctctgcacgctccccctccgctgctcagcgagtccccgcagcctcactcgccattttgggagccctgcgatccgatgtgggaaggcggtgggacgtcggttctgggacgcaatcgcctgggcatgctgggaactgtagtctaaagggcaagagccacctgtccggatagggagcccaaagtggagttggccctcattgcaacccgtagtgcggggcggggcctcggggcccgtcggaaattgtagtccgattggggctgcgcgcttcgcttctgcggctcagcctccagcccaggtggcgctgtggaccctgcagccgcggagcgaggcagcggggcggctccgtgaccacggcgggcggagcctaggactgagggcgatggctgctgtggccgtggctgttcgcgagggtgagtgaagagccgggcctgcctactggtacgcggagccgacgagctccggacagctagtgccgggccttgagcgcctttgggccccgccgctccgttccagcgccacgctgggctccggtctacacagtctcgagcgcagtcccgcgccgcgcaccggctggttgctgtgaggagggtcggtgacccctccattcctttgatccgccgcgcagtgcgtccccacgcggatccctggctcgcctcgcgcctgccggcggatccgtggtcatgccaacccagcagccggctgcgccgagtactcgtgcccccaaaccctcccggagtctctctggctcactttgtgccctgttttctgatgcagactcgggatccgggatgaaggcggagcttccccctgggcctggggtaagtgaggcttccctcccaagccgcctgccaagcgctacgcaggaggctgtgccagctttattccgccccagctcccatcccgtgtcggtttatttctcagtaaagccaggagattttacagaggtcttgcaaccctagggatatatgattctgtccctggaggagaaacgtcagcctctgtggatgtaagcttgcaacaggtagcttgtggaagttaggaagaactagggatttaaccatgtggaaatcttgtaagcatccaatagtatttgttcccctttggaattgttggggaagagcagtatcctatgtctgtgtctcaggcagtggggagggaaatgaccaaagaagaaaagctgcagcttcggaaggaaaagaaacagcagaagaagaaacggaaggaagaaaagggggcagaaccagagactggctctgctgtatctgcagcccaatgtcaaggtgagtgaggggtctcttttaaagggctggggtgtggagctggtagagggatgtggtgggagagataagggagagacaggacaaagttgatttgagcaagtgtgtaaagcaaagaggtttacaaggagagaagctagttttagctggggcacggatatcacctgcctgcagcttgggcatttttttttttaatgcttttagtaggcccaaccagagaactgccagaatcgggcattcagttgggcactcctcgggagaaagttccagctggtcggagtaaggccgaacttcgggctgagcgtcgagccaagcaggaggccgagcgggccctgaaacaggcaagaaaaggggaacaaggaggaccacctcctaaggccagccccagcacagctggagaaaccccctcaggtatcttcccttcattttaagacctcccttactc

SEQ ID NO: 8901 - DNA, 6000 bp, Homo sapiens
agggtctcactctgtcacccaggctggagtgcagaggcacgacgatagttcactgcagccttgaactcctggactcaagtgatcctgctggcctcctgcttcagcctcccaaagtgctgagattacaggagtgaaccaccacacccagcccaggatgggttctttggagccagctttcattggctaaagcctctgaagctttgtgaatgacaatgggagagtggctttgccctgggatcaccaactaaagcctcaacactgaggcgatgaagttatgacaaaaagcacagctttggctgggcttatgataaaactcaactagaataggaaagtgataagcctcaggcagctttgatgggaaataaactcggagctcactaaggtgttgcagtaagagtatggactttggagtcaatgtccactcagattagctgagcaaactacctagcttccctgagctgggaccttttgaagtggggctgaaacagtacctaccaaataaagatgctgtttaggaggaaaaaagcaggcatggggtgtgcttagcataatgtcaaaatgtggcactcaggcaggggctgagaaatggtaaggctgctccagggcctgctggctgcccaactcccatcaccggcagagacctggcagggtctgttctccctctggaagtatctacatgtggccaggagcggtggctcatgcctgtaatctcagcactttaggaagccaaggtgggtggatcacctgaggtcaggagtttgagatcagcctggtcaacaaggtgaaacctcatctctacgaaaagtacaaaaattagctgggcatggtggagcacctgtaattccaactactcgtgaggctgagacaggagaattgcttgaacccgggaggcggaggttgcagtgagctgagatggcgccgctgcactccagcctgggtgacagagcaagagtctgtctcatttaaaaaaaaaaaaaaaaaaactctatatgcaccacatctgtgcttgacagctctgctccctcttgagatgtggaatactccaggctctcaggtcaggatatctgttaggccctgaggatcagcacagtcacacaggatactacatgtctgaaggcccactgggtaccaaaaaaccagtaggtacaaagaaaagggagagaagatgcaatcaaggacttccggattccttactgattcttctgtgatagctcatgaggcaccactgccaactctcctattaatgggcacaaactgctcttaggagatggccacaggcaagcaagtagaaactatacacaggttaaggtctctaaatatgtgagcaaatgtaatgtaaaggttaagaaaacatgctttgcaaaagacaaaacggagcctgaataatttctttctttttaatttttgagatggagtctcactctgtagcccaggctggagtgcagtagtgtgatctgggctcactgcaacctcacctcccaggttcaagcgattctcctgcctcagcctcctgggtagttgaggcaccagccactaggcctggctaatttttgtatttttagttgagatggggtttcaccatgttggccaggctgatcttgaactcctgacctcaggtgatccatccgccttggcctcccaaagtactgggattacaggtgtgagcctccatgcctggcctggcccgaataatttcttagaaagggtaaatacacatgtgaacaaagaagaacctgcaccaagaatttacttttttttttttttttgagatggagtcttgctctgctctgttgcccaggctggagtgcagtggtgtgatcttgggctcactgcaactcctctacttcctgggttcaagcgattcgcctgcctcagccttcagagtatctgggactacaggcgtgtgccaccacacccagctaatttttgtatttttagtagagacagggtttctttcaccatgttagccaagctggtctccaactcttgacctcaggcaatccacccgcctcggcctcccaaagtgctgggatcagaagtgtgagccagttcctggcctttctttttttttttttttttttgagatggagtttcgctcttgttgcccaggctggagcgcaatggcgcgatctcagctcactgcaacctcggcctcccaagttcaagcgattctcctgcttcagcctcccaagtagctggaattacagatgcctgccaccacgcccggctcaaaaatttacttttatttttaacatgccttcgacaaggatgcacaccaaagtgaaataattatgagattgctccttatgacagctgaagtaaaacaaaggataaaaactataaatgacacggcatcattttatattggcatcaacagaggtggggtagtcccagctctgccaccctaaactgggtagccttggggagatccttcatttttctgagccacagctaagcacaccccatgcagtgctagatttcggagatctagctttctagatctgatgggtctagtggtgggaaggtggtatgtgtgcttcaaagaaagcaagtacagggcaatgtgctaaaagaaaaaccaccaagactcactcaagcttaatgctctttgtgccattagcaacatgacagagaaaaggctgcatataaggcctctgtcgtgtgcataactttggctttaatgagccaacccagcaaagagtaccattaaggtgaaatctggaaacaaccagttgtccccaaccttctacaaaatcaccctacagcttctaaaactcaagagagatgcaaaacagtaagagaacactcagagaaaggcaacatttggccacaaggatgaggcttttcagcctagacctgcagaagcagagtatggtccgatgcacagcggggaacttggaccttttcaccaaatcccagtgcctgaattcttcaggaggtaacacgcagatatctaacaggaagtgcttctgataggcggtgcagtaaacatctggaatgcatcacagccagggaatagcacagacaggatagcacagagaggatataagaccttcaagatggctcaaaagaccttggggttgatgaactatgctgttactaaggactgtttggggtacattgatcattgttagggtaaaaagcaggtgatacagtccagtcctgtcctcacacttcacaatttttactggagacaagaatgggcaggataaactatggggcccataggaccctcccatcgtctgctgtctatctggccggaaagcatgatgatgaacaaagcaaccttgcctctgtcaggcacacctataatggttccaagagccacattccgactgttgtactgcgggtggcaatggaacggtcttccgattacctaaaatgccacagattcccttcttctctaatacgcatccgattaccatagaactctaagatatcttttaaaacctagtcatattaaaagttcctttttctccattaatcagtctgccccaaagaagcttttccgtatttcacaggatccttagaagaggccagctaactgtgatacctagcacccttatcttttctcgatacacagcgtccttcctccagcagaatcctaaaatagcagcagtccggattaacatggctgtgaggagtaggtgcttagctgaataacatcagaattaatgaggggccggaccccaaacagagccacctggtgggcatgaacaccaggcagttatggggccgtttccttcaaccaagtgtctggtccctggctatctctgcttcagccagaacacattctgtcccccaccgaggctttaagggccagcgcgcagcaccctcacctttcagcaggtccgggtgcacatagcccaacacgtcggagacccccagctcctggcgcgaacaggtgcctccgtggatgtgcaaccaggcgggctcggcgagggcagtgcacagcgccgtgatagacagggcgccaggcagggccgaggccaggctacgctccggctgcttgggcagagcgctgcctcccgggctcctccgccggcgcccgccgggcagccctgcgcctccgggggcgtacatgcccggggccgcccgccgtcgctccgcagtcgctgctggtcgccgccgacctccgcggggcgcgcagagcctgacagtccggtggaggatagcaacgctccgggttcgctgcaggtgaagccgggactgggctgtcagggttgacaccagaggataggggggtgggacccggggctgacggagacggggagggctgcgggaattcggggggcggagacaggagactccggaatgggactgcgggacgacaaccgaagagggccaggggccagatggggtctgggcagactcgagtggggggcggagggatcggggatcggctactgctagagcaaagacccggagtcagggtctcagccagaggatgccgaggggcggaggaccgggctgggccgcggggatcggggacccgtgatctgggaccggcggtttggggtgcgacctgtgcgcagaaaagaccctccccacgccgcccactgttcctcaccagtcagcaggccccagggctgggatggtgctgctcagcccagtcacgggcttctcggctgccgggggccgagcgttcccaggccccaatcccgcaacgcccggacagacccggggccgatgcacttccggcttcctcctcctctgcctccgcctcctccggctccccgccccgtcccccgcgcgcgtcacagcctgggcgcgccgccggctctgcgcagggcctcacgggactggtagttcgaggcggtcccgcgatgctttccctgccgaggtgaggggagcgactacaactcccagagggtatggcggccgcagcagtgggcagttgagtttccggggcgacccaggtcctccggcggaagcgggagcctctgtcggccgcggaagcctggagtgggcggtacgcagacgcgcgcggtgagacccgctgtctgctcagcggactctgcccgcccccacctccccctgcgtcgggccgacatgaaggactcgctggtgctgctgggccgtgtcccggcgcacccggactcccgctgctggttcctggcctggaaccccgcggggaccctgctggcctcgtgcggcggcgaccggagaatccgcatctggggcacggagggtaaggcccagcctggttgcgcggccctcagcgctgagggctcagcctgcgcgtagtgcaggcgctcagcctgcaggggaggctgaacctgttcctggcggagggagagtgggatgttagccacgccgagaagggctttacaggcaaagaagtctgcgactgttgggaggaaaaacgtcagcagacaagctgaaatgtcaagggaattgtgttagctgcagaggcaggaaaatgggaaaagagaggtgttaggaaagtggccttcagagtaacttgcgactggatggtcacattttatcccgagggcattggggaaccaatagcaattttagatcagatttgttttagaaagatgcctccagaggttgggcgcggtggctcacgcctgtaatcctagcagtttgggaagcagaggcgggtagatcacctgaggtcaagaggtcaagaccagcctggccaacatggtgaaaccccgtctctactaaaactacaaaattagctgggcgttgtggcgggcacctgtaatcccagctactcgggaggctgaggcaggagaatcccttgaacccaggaggcgaagattgcagtgagccgagattgtgccattgcaccccagcctgggcatcagagcaaaaactccgtctcaaaaaaaaaaaaaaaaaaaaaaaaaagcttccagacgaagtagattcatttgcatctttgtaaaagctgtgaaatacactccctgagctttcccccactagcttgattccagtgctagcccctgatattgaatggcttcatggtgctgcacccagctccagagc

SEQ ID NO: 8902 - DNA, 6000 bp, Homo sapiens
aatgggataggtgctcagaaactctgatcttcagagaaggctctggttgctctctttgcagactgggcagttgcagaccaaccgagctcgagctactgtggcccccctgcctatgactcctgtcccaggcagagcctccaagatgccagcagccagcaaatcttcctcagatgccttcttcctgccttcagagtgggagaaggatccctcaaggccctaagtcaccagcaccagagcccagctgcccagcttaaccatatccatgctcaggttcacataatggctatctgtggtcagacttgctctctatccgcctgagcctctgtgagtgagggctgactgggaaacaacagccttcctgtcctgtttcagtgctgtcccactcctcaagtctggaagcgacacacccgagcctgtcctttctccagcaaggactttcattttctttagaatcatttgctactgtttacacaggtgaagattaaacacccagtaagcttctaccattgttaggagcattcataactcagaatttcttcttgtagctctgtgtaagcaggtggatgaggtcagatcacctttggtaaactggacctcaggaacaaggatgaggttttgaaagctcataaaagacaagtaagattgaaatccaagcctcatttcagagcctgtgcccttcccactacaccaccaggcttcagcctccaaagagacaagtgcttggtacctacatgcaaagtgtgtgtgctggggggtgggagggctgcccagaacaggggagaggatggtgtaaaaaaagacctactcctttcctgttaccctctccccacatgtaccaaccttcctgttgctccctccatccacagaataatagctaccatttataaaatgtttactctgggctgggagcagtggctcacacctgtaatcccaacactttgagaggctgaggtgggatgatcacttgaggccaggagttcgagaccagcctgagcaacactgtgagacccccccgccatctctacataaataataaaaacttttaaaaaaacaccctgtgcttcagattacactaaatacttataatgtatctaatttcatacaaaaagccctgtgaggtagagcccattatagcttttccattttacagaggggcacaggggaaactgagggttgcagatgttatcacccagggccacagagctcacatctagcccagggcagcttgacttgactccccaggcactgaaccgccacacttctgttcccttcctgggccccttgcctctccgtgactctcaacacattcctggttctcctcttgatccccaccacacccaacccaaccactgtgtcccctctttttctcttcacacacataaacttcttaaacccaagctgactttaatgagaattttaaaatttttaaataggtctctggcaaagaacaatgcaggagtaaggatccaggcacagtccaacatctccctgaggcctccacacaggcccctcaaactgcacccattctgaccatgcaccactttccacagacctggtcccacagccgtcccttcatttggggaagtagggaagggatggctttgggggatgcagagcccatcctcagccctgccatctgccccacttcttaggacttcctgggattgtccttcccttgactctcccatccctctggtcccctggtctcacacagcatggcccctcccaccctctggcttctgctggttctaaccatcttctttgatccctagtgccacctccccatggtcccccttagccacctcagccttgccgtccttctcaggtagagccctctgacttgaccccagtcttgtcagtccctactctagagagcccacagtcccagctccctgaggccccgctcttctggacctggctgtacagggctgagttgtggcttttgatgccactgccagttgcagtaccaggttcagggaaggctgggccctggggcttgggagcaaggaggggctttgtgctccgagggggtggcacagcgtagtcatcagtggcagggttgtaggggagctcatagccctcctccttcacccgagcttggcaccaccatgcatccttgggctcccgaggcagatcataaaggccctggggagggactggggccaggccctcaggttcatcatagatgggatcctctttggggtctgtcagcttggccttcagcaactgctgctgcgcatgctcatacaagtcccaatagagaggtttcttccgttgtactccctctcctgcctgagcagacgtgctgtccaaggggtctgagtatagggagtcctgggaagggcatggagcaatgcgcagggagtctaagggctcagcatacagggctgggggactgtcgaggagctcttgggggccaggtggggaaggcaacttcccctctgccacctccccttcatgggagtcagctctgagaacatcgtgcccctgtccggcctttccctgggccttctgccggtggatggcagtctcaactgcctggaagatgtcatttccctgtgccgtctggaaggtgaaggttccagggcctgaggggcagcggcggccggcctcgaaagagaacatgacctaaggagggtagagggggaaacacattaccaggagccatcagaggaagtgagtcacacgcctgcactagttagggtatctacaaagaagagaccacctgcgaacagacgcggggtcaccgggtaggcaagaaagggggatccaaaggtcagagcttcccactttctgtcctgccccacccctcccacagctgcccaacccaggaagccctcccggacagcccctgcaccttgtcccggccatagcgacgcaacagagtgtagggccaggacaggagtggctccagtatctgactctgggcccccacggtcaggagagtcagcctttcagcctccaccctcagcacgtaggagccatgcaggccacagcgctcggcggcctcagtcctctgcaccgttacccagaattgggatcctggaaggcatacacgattagacagctgcgggggagggacgggggcagcagtggggacccagaggactcatgagcatagtgtccaagcactcactcggaagccagatctcagggccttcctacttcttacttccccatgggcccctgggtatccacccacttcccaaaggccctcggccctcctcctcttcactccatccctgcccgggcttctgaggcgtctaccttcccaggtagggctgtacaaggagttctccagcatctccagggcagaaagcttaggtgggttatcggtaggcgccagagtccagctgcctttctgtagtagagagcatcgagaaacccgtaatttcctcagcggggagcgggggtcggtctgaggcagccccatttctctgcctctgtaactgcccccaccccgcatcgccgcagctcctcaccggaaaggcgtttcggcacagcgtctgcacccaggctgcactggacggcgcgtcggccgccagcaggtgcgagcgctgagcagtgtccaggcggaaggcagtggcgccgggctcagggggggtctccacggtgacgggggccacactcacacactcagccagacggatcactttgcagtccaggcggcgcgagctccctcggccacccccagagctcgaccccttatggtcaaagaactcgagccgcgctacgccgtggggactggccgggtagagcacggcccaggtcttcctccacctctagggagagagagagagtgctcgagagggagtggcgtgcgcaggcggcccgggtcccgacggggaaggaggttgcggcgcaagtcgatttgggatctggggcttccaaacggggttgggggcgaagtttcccaaggacgatgccactccgtctccccaggaccagaacccctagactacagacgcttcccgggagtgtgcaaagcaacttcacgggaaagtcacaggctctccaactcccggcgccgctctccagcccgctgcccacctctccctgtttctgggctctctcacccactactagcccggataaggttcggcatccatgcgccagactaccttggtcccaaagcgctgactctgcaaaaaaagcggcccttccatcactgctccgtccatggcccccggcggttccttccgcgcttcctggccctgcggcgggaggcggggcgggaggcggggccgggttccctggaggagtttccgcccctccccggcccccgccggcagccgctgggggggtcgcggtggggtgagggagaggagcgagaaggaatggtggagacccccggattagccgggagctgcagcaccccaggcccctacccgccgtcgtgggggcgcgccagtggctccaccgaaagtcctcggttttggcgcgagggccctggcctctgggcgtggtggctgcgcgtgacgtcatatgcccaaggtgacgtcagagtgaaagccatgacatcaccccgaaagcgccccgggcaccggagagacccacacgggcctccggggctttatttaccctggccgggcccgcccccagccccgcccgagccgggctgtttagactccgctggcccgggactcggagggagggctggggttgaaccgcttcccgccaccaccggggccgccccgccgcccggccgccgcttgcatgtcagctccctgaccgcagaggcctggcctccatgccgcgggaagagaaagcttcattgaacgagccgggagggccagggagggggagggggcgcggcagtggccagctccacggggagggaggacccagaggaggagaggagggaactggccgggaggaatggaaggagaaggcggaatgtgggagggctcagggggatgtgggagggacgaacggagaagggggagagaggggggtccagtctcccctggccgagcatttttttttttttttggaagtcctaggactgatctccaggaccagcactcttctcccagcccttagggtcctgctcggccaaggtagggggagtcacgctaaccgcagagggaatgagtaggggatggagaggatgtggagggaccagggaaaacgggtggtgtgggatggagtcgaggggaagccacccaactgagagtttgattcttgtcaaagggcaagtgagacagagtacacggaggaggcacataccggaggcgggggctacgggtgttcgaacagggccgccaggagcgccctaagggagggggctcctccgggaggcgctgcccctgggtccccaacccagaacaaagctgccttgttggattgattgtttgggttgggggaagcatgttgacgggggcttgctgtagaggggctgttctcagccctaggcagagaaggccttggctgaggagccatagcgcctggcctcccgttgcccggtgacagggatggtggtgttggcaggaggctgggacaaccctaccccatcccccgcccagccttgaggcctggccctcctgggcctcttgaccctgcagggcatctgagagcctgcgtgttggggagggcgtgcagcaggttctccaggcgagctttggtgccagccttccctgcctgggaatctgctgggttaggactctgggctcccattcaggggatctgtgatcccagggccgcctagggccccttacgtgcctctctgcacaatcagtacagctgtctgtcctccctctgagtaaatggggtcatctggatccctcccacgtccgccccttggctcttgtcaatccctctccttctcacccgcggtgtgcttggttcccctatactgagtgcttagttctttgcctatcactttctatccgttgtctctctcctctgtgtctttctggttttctctctctcattcccacagtctcccttcctctcacatcctgtctgtctgggtcttcctctctctctacgtgtctcttg

SEQ ID NO: 8903 - DNA, 6000 bp, Homo sapiens
ttctagatgggctactgctccaacaatggatatgttactatgttggagtgttactgctgtttttacatctcctataacatcttttaagccaaagcgttggacaaacttgaaacgaatgctagccagactgggcctgatatcaacaacttccttggggcaatgttttggtcttaccctacagttaagttagccctgtctggtcccattctactccccttcccttgacagactgctcaggaggttgcagcatgctatttgctgagcccatttggattatgcctataaatggctctagatccctgaaatcctcagaatttcagtatggaagaggctcaggtagggcaatcccattaggaaggggtggggcttaaagtatcatttgcataggaattatatgactgggaaaatgtcattagactaataaaaaatgagagtggcaggaggatcacatgcaactaacatcctccttctcttgtcctggctccctcttggcactgctaaagatcaaggaacagggcacaaacagcaaagagaaatccacttgattttccacaactgtctcacatatggcattacttttcctcgcaaaacatggaatatttacacattttctctaacagtacctttagattactcagtaacatattcatgattgtctcaaatgattggtataggaaacatgacattctgccagcaagttagttgagagtgccctagaaactgtctgcctgaacctataatcattcaaacatagacgctaactttagaggggcccaatcagctactaagacagatctttgttgtacatgcggcttatgtttatgcagaactcctagttcctgaaaagaatgttcatttgacttaaaatatgtaaacaagtagcataccaacatattaaaattagagaaactagaggccaagatcggagattcttctccaaccacagagttgctaagaaatgatcgtgaaatcaaatcaaaaggctaactttacggattcagatggcaaaacaaagaggcagggtcaggaagggagaatgaggcccctgggtctagatgacaactgcgctgaagctgtgtggtcccggggtaccagtttcccccagcagccacattatatcagttaatcttacaacgtattcacataaaacagctttttattagagatatgtaagcaccttggcccctatttcatggtttgtgctctttcttttctttccttccttccttctttctttccttccttctttccttcccttccttccttctttccttctttccttccttccttccttgcttccttccttccttccttcctccctccctccctctctctctctttctttctttcttttgacagagtctccctctgtcgctcaggatggactgcagtgacaccatcccggcccactgcaacctccgcctccagggtttaagctattctccttgcctcagtctcccgaatagctaggattacaagtgcccgccccatacccggctaatttttgcatcttttagtagagatggggtttcgccatgttggccaggctgatcttgaactcctgacctcaggtgatctgcccgcctcggcctctcaaaatgctgggattacaggcataagccaccacacccagcctgtgttttcaaatatcttatagtaatcctaatatatatatatataaatctaaacttgtgagacaaattacaagatgatgttatttactataagacaaacatttttaaaaaattatttacttcatgtcacataatcccttagagcatttaaaaatgcaaatattcaattaaaaattcaatacatacattacagaacctgcataatttaacttttattacaaactacaaatttagacacactcatggtataagtctataatattaagttcaagaaggaggaaggaaaaatgggtttttcaaaaatatgcatattggaatttatttgatttatatcttttataaataaaaagattttaaaagatgtgaataagacatgatcttttgaaaatcaaggtaaagacctataaaataataatcacaatcaaaatattttaacattcaagaatgaatttttggacataaactgaaggtattaagttatcctttatttcttgaaccctggttttcaaaagttattcaactttttttttttgagacagagtcttgctctgttgcccaggctacagtgcagtggcacaatcacagctcactgcagcctcaaactccggggctcaagcgctcctcctgcctcagcctcccaagtagctgggactatatgcatgtgccaccacatctagctagtttgtaaattttttgtagacacggggtctcactatgttgcccagctgggtctccaactcctgggctcaagcaatcctcctgccttggcttcccaaagtgttggaattacaggtgtgagccactgcacccggccgaattattcaattttttattcaagaatcctaagtacaaaatctgactaatggtaagaattcaaatcagtgaagtgccataatataattaaccttcatttcacagataggagcacggacagaaatggagtagagaagtgactcagtagcggttactcatctaaataaaagcactctaatgctcaagatcacagaatgttaaaattgcaagggatcctagatatcagtgatctagccctttatcttgttggtcactatgtatatatcccttttttttttttttttgagagaatcttcctctgtggcacaggctggagtgcagtggcaggatctcggctcactgtaaactctgcctcccaggttcaagtgattctcccgccttagcctctgagtagctgggattgcaggcatgcaccaccatgcctggctaatttttgtatttttagtagagacaggtttcaccatgttgcccaagctggtctcgaattcctgacctcaagtgatctgcctgcgttcgcctcccaaagtgctgggattacaggcatgagccaccacacccagcttatatcccataagttgatggttttggcggacatgtgctggcagcttttaacccttctgcggtgagaaggatgtgtatgagagaagccagatccagggtcagtggatgagctatcacctgtgcaagttcatatttgcttcatttctagctcatcccagatatctacattccatgccgaacttattgaggatttcctcactggattccactactgctggtgccacctgggtcctcatagtgtttccttttccttttagttgtaggggaataaagcattcatttattttccaagggttggctgagttaagtcacatgaacatgtgttctatttcagatgggtttgaaactaggcttgatgccttaaggaatagggatgtctagatttcttttttctgtacacttcttaagactctgtggccagctaactctcaggctcctttgctgcactcagattgctggcctcagttacacagaggacagatttgccacattcaaaaatgctctccctggaattgaaatgagtttgcaaaaggtaggagtacattttattctcattcttgtgcatcttatttaccctgatggaaagcattacttctctttatctttcaaggtgacccaaaagcatccaaaaccaggttttccagaattatagcatgtgtcctctaatgaaatgccaacattcactctctttaaaagtaaaaatatcaagattatatagtcattaaaaagaataagtctgaactaagtgttctaagatttgatgcctatgatgactggaatggaaaaagcaagtcatatgattctatttaaaatacttacatttgcctgtgtgtaaaaggcaaagatctcaattgagcacacggtggttaactggggagtgggactatggtatgtacagagggcgaggaaggggcttgcacttgttccttatttctgaattgttctgaattgtctagattattcactgagtgtgtagtgcttaaaaattaattagaagacatcacacacattcactgagaatcctaatcaatcttcactgcatttaaagtctggaaacggttacattctcagtttgactggtttcatgcagtgttcaattgcttcacctgacattcctcgggtatcgggttctgtgccgggcacggaggctactaagatgaataacacctggtccatgacaggatggcatctaccccagaacacaggtaagagagacagtgaatttggtaaaaatgggcaccgtcatcagtaggcatacatcagctccctcatctgattcacaattggccttctgtaggcttcttctcttggcaatgcaattggcaggcgtcatccttttatacttaaactccaaatttaggattaagactccagttaatactgccaagcagaaggcgtccttggagaaagagaagtctcctgaacatacccactggggtacctagaatagattttgcagcgacacacagatcctgtgttgtctggagtctctgctgagtaatgtagattctgggacagcaaaaggggagctggtgactttgaaccaaattttacctttcaactgaatccaggggaataatttgcaacagagtggcagacgatacaaagtgctatgttgaacactagattgtgctttattttttccgcccaacttcacgtttccatgcaccaaaatgttgatgctataaatattggatgccacgcttacctgacaggcttcttccatcccacctgggcgcgggggctcagagcgagcgcgcgagccgcggctggagcccgcctctcgcggctggagaggactcagccggccgcgggttctgctgcttgcccgggtgccctagccgcttcccagccagggctcccgcagtcagccccgcgcgcgcacgcgcgctcccctcgggcggcctcgacgcctcagggcttcggcagggctgcgactggccggctccagcgggcggggcggcgagcgagtgctcgcggccacgtgaccgacgccaacatggcggcgcccagtggcgtccacctgctcgtccgcagaggtaagcgcgtggaggagagccccgtgagggttcgcacggttgctcactaggtacgcacccgggtccaaagggatgcgcacccgcgctcagacttctcggcgcacacgactgtactttcagtgtttacgaacacacgcaggcacacacgatgacacattcacacaccacaggatcacacatacaaatttgttcactgatcacccgcctagaacacgtcaccacgtggcatcttttcgcaattactccttgagatttgcgggccattgtctgaagtttttttccccaacttcggttgtatcattagtgtaaccaacatttattctgtatgccgagcaaggaaacctatggtaattctgaaatgcatctggacacccggttcccttccctagagcttttatgcaggcatgctttttggggacttgcaaaatgtgatggttttcttccagtgacttaaagttaagaagataagaaaggatgactgggtagttctaagtaggttttatcctgcgtgagtgttgagattttagtaaatatacaaatgcctttgcagcagaattggggaaatctttgttggatttgaactaggtgctgaatctttgttggaaagaactagaaagtttttccaaggacgggggaagaggaaaactatcatattttgaggagctacttaagcgtcaggcatgtaggaacagttttgtgaggtaaatattattttcatagtaacagctactgtttattaagtgccttttaagtacacgatactgtgttaagcgccttacatatgcttgcttccttttaaaactcaatgaatgagaccccgtctctacaaaaaattttaaaaattagtcgggcgtggtgacacatgcctgtagtctcagctattctgggggttgaggtggtaggatcgcttgagcctgggaggtcaagaggctgcagtgagccgtgatcgtacc

SEQ ID NO: 8904 - DNA, 6000 bp, Homo sapiens
ccctggtctctcacattaggttaagggttcctgtaggcaggagtccacatgtacctacccttttatacacacagccagctccttgcagaggctccataagtacctgttgccactagtggcatgggacttggttatagtgctcaaatctcaaaatctctttgaacatacgtcgtctagaaaaaaaggaattgcatttgctatagggtaatattttaaaatattctggaaatttgttttatctcatttcccacttacctttggataatatttggatacaaaattgaattgttttcaggtacttggttcagaggatttaaaattcagtgctctaaaaatgagcaatatcgaccactcacctactattccagcaactgttggacttgctccaagggacttgacatgaaggctcaataaaggcacaaccatgctgacaccaaacaaatcctaaaacaaaataaatgctgatggactcaaattagtatttttcaaactagtaaacctaaaaatttaaactaatttaaaaaataaaaccaatatctaaaattttaaacacgtaagaaatcataattggattccatagcatgccatacaaatccgctgccacttgcaaatgcctggattagtctgacctgggatccgttttaactttacactcaaggaggatatgctacagaagttcctcaaacaaaacagacaaaaaaccccatattttctgtggataagtcataagaaaaaatgcagtcataatttgtatttattggtgaaccagcacttgcttaaaaatatgtttccttctggagttggcgaaagtggctaatgtcctaggacctgtagtttataagcttataaaataatacctgagaagaaaggctcagtaaagcaagaaggaagaagctggtgcactagggaaaggccagtgttttgcagctaagtcatagaaagtgaatgggctttggggtcaggcagacagttctcaattccacctccatcacttactaaacatgtgtctttggaaagctacttaaagttaccaagcttccgtgctgtcatctgcaaagggtagaacagtaatacctgcctggtagaaatatgatgagcattaagtggcataatgcttgagaaaggcctaataaaacaatgtaagctcaaacatgtcttctcccttcttcagttctggggataaggacaggtcctttttgctaggtattctgagttaatagacagactgttaacttttcttttaattttgttcttattctcactaggttacctgctacagttggtttagtgggagaaaaaacattgcacacacacagttttcattatattcgacctgaattccttctttcatacagctggttagttggaaagaaagaactcgcatgaaatatgtattttccttgagctcagagttaatcttttgttcccccttccctgtcctggtagctgtacattcatataactatagatacataaatttccacatactcttttcagtgggccttttccatggttacatctttagatgaccctgttatctaatatcaagtgactataattagctcttaaaattacattaccagagtgatggtttattatttcaatattgccattacttaaaatttcctttgggtctgagtccatttcttttgggctttgctgtcagttgcatctcatcagcccactgatgtttacacatttaaaagactcaaaatgtaccagccacctattgaatcttctggatctttcagaaaaggaaactcaattgtccaataaccatttttttccaaaaaaaaaaagtcccagtacaacatatcatttaataaaatgggtatcctaaataagagatggagagaaatatttaggtcaagagactgagctctatggaaggtaagtatgaaaatacagactcaaaggcaataactgatgattggtattactttagcacttggtgagtctgaaaagtactatattcttccaaggagactggccactgaatctttcctctcaggaagttctgttctaaaattgccttctcctttactataaaaggcaactcctttctgcttctcaatccatagcttcttcaaaatcgctgcatttggcatctggtcatgtgcatgtaaccacttgtaaaaagatcatgtcagaaggggccacttaaactttcactgaatatcaacatttttcaataaaaattgatgaatatgtacactcaaaagtttcaagactcttttcagggtaggaaccccagtaattattgattactggactatctcaatgaaaatgaattatcacctgaataaagctgatgggatggaaaacaaatctcaccaagtatctggaggaaaaaagtggttgaaataatagatctcatcaccatctaagcatcctaaacaaaacgggcctcaagggtcatcttggtcttccctcctaaacaaattaaaacttggaagtacggataactgctaaaacagaacaatttggcaaatgacttctctaagcttgttcccttcctctcccattcagaaaccatttgtccaagaatcttagaggtctctacatccctaaatatgtcaaaaaaaaactaaattatgtataatgttccttagatgttacctaacaatcatctgttaggtagctttatgtgactttcatgtaaagcttcatatatttaattgtttacaatattttccattaaaaaaatccctactctttcaacttttgggaaaccataaacttttcccttaagatatgagacacctaatggttctcttgaatacattattaaagttattaaaattctgtatcaggcttgctagattagacttgccaaatacacagcataaagaaaacatatgataaattgtgaatattcaaatctgtattggaaggctgaccttaacaaatgatctgcgaattgctttgttttattctaatactaaaactactttgaattctaagtcaaattctctgaaccctagtctggactttccaggtaagggctcaaatgttttcatctggctgaaccagcccaagtcccttctgagacaggacagcagtagcttgggacccataactaaaaaggctggatgtcagccaactcctctccaagaaccacccatactcactggttgtgaattctaggtgcctagactgaaaagtagaagaagcatccccatgctgagaatgaactactagattaaaggaatagtggtcagaaggagtgccagtctctgaagttaaaggcatggagctggagggtggatcctgcaatggcctagaggcagagaaatcctctctaaaaagccgccctccctgaagaccttgtgtttctgggcttgcagcaatttgatgaacatgctttcatggtgatcttaactattaactcaacatagagttgctaccaactgaacgccttgcatggaggtggtggcatggagagtgcatgaaactgggagaagtggtggtcttgatctgcatctgggcagaaaacgatgactccctgccagggcccagtgccatcagatactatcttcaaggcctcaaaggcagccttctcccattgacacttatcgcagcttccttaccctcaagatactggattagctcacactcagggctgaatcaggcctagccttggaaagggaggagtgcagaggtggatctagggttcttgcagataatggcccagaaactaccaacatcagcttacttgtaagactgaattcttctgtggcagaactgtggattacaatagtgaagctccgcagcacctgccacatggcaggtgttcagaaatgccatgaatcagcttactaaactttccattctacgtgggaaattagcactcagggagcaaaccaggacacgcgcgcgcgcacacacacacacacacacacacgatgaaaccaaaccgccattgtgcaatgcacaccctttgtccaaaggtagatgggtacaattcactctgatctgcatttttaaacattcaagtcaaccgagagctctagtgaaaatgcacccaattctgtacaagtggggtcatcaacagcggcttctccagcctggtctggtaaaaaagcaaaccacaggcacacacatcatgatgaaaccaaacctacgctgtgcaatgcgcagtttgtcgaaaggcagatgggtaaaattcactctgatctgcattttttaatatttaagtcaaccaagaatcctagtgaaaatgtgcctaaatctgtccaagcggggtcaagagcggcctcccctgcctgttctggtaaaaaggcttgcgtgtccctacctcaccagcagccgcacagcagctgggcttttccaagcttgcccacacccctgttctccgccctgcaaaagctgcacctgccacagcatttaacacctggtcacacctgaggttggtaccagggcttctcaaaaggcagggaagggaagacgttccgcgaacggggtgcaagagaaagcgcgaggggcaataaagcagtgtggccagatgcagactgaagtgggtgatagggcaagaggagagcttgataggtagtgaggcactcaccaggcggactgcgggttcccactccctgggagctccccggaagctccaagaaccgcctgggtccccaggcccgaacacagtcagcacttgctcccagcccccacgctcgcactcaccaagaagcccaccaagtagagacagagcaggaagcggcgggctccgacggcaccggagtcggcagcctccgcctcggttcctgtcttctgctcctgtttccgctctgcggtctccgagaccagcctcggggccgagttcatgtcccagtgacccccaagctccatacccgcgccggccgggggtcggacgcagcagcagccgcggacctaccccgggagcccagccccgccccgagcggaagcaggaggcgcgcgcctgcgcagagagagggggcgggtgctacctggcagctccgcgggtgcgtggccggtgctggctgggagttctggtctcaggcaaggtggggactgggcacatcatcaatacggtaagcacacaccagtttgtgatgataatgatgatgctctttgtttcctctgggtacagaccctgctgcccctatcgttggaggacaggagggaattgtattgagcttcacttcctcctatggagttgtgctaggaggtgaccaactccagcttgaagatccacagaccctggccaccagttggttgtgacagacctaggatacgttaacgtggctctccaagctttcgtttgcctatttaaaaagcagtaggaaataatgtagtccaacttctagaggtgtgagaattctacacatgcttcttaagatcctttctggtgcagtgcaatgtgaacaaaccatagatggtctatgcctgagttgagattacagtctcatggagtaaaaataataagcacgcagtaaataaacataaataaaaatactaaacatgcaatgaaaaagcataaaataagtaaaataatatggtgataatataaagaagcacggtcttgatgtggaaagtaatgaggtggggagtgagctactttagaaaagcagtttggaggaggtgacatgtaagctgagaagagtggaaagaagatatgtgtggctgaaacttcctcatcaaactgagaggtcagcaggagtgcagaccatttaggacccagaaggccataacagagatttggggtttattctgagtgcagtgaaaggaattaagtgagtgcatgacaccaaaagatgcctttaaattacttagcaaagcccatgacacatggtaagtaataaatgttaacaatagtgactagcccctcttttctttagaacttgttatttattcctctttcactgtgggatcaagaagactctgacattttactgagattttgctcaaaatctcaatttacttgtgtaggttgctaattctgagatctgttaaattcagtgttgcaaagtttctcatgggagg

SEQ ID NO: 8905 - DNA, 6000 bp, Homo sapiens
aggacacatttctggaggccagagagaaatagagaacatcactttatccatttcattaggcatatttctcaattatctgtttcaacttagattctctcaatcattgctaggataaaggaagaagaaagaaaattacagataaaaacagtaacaataatgtcaggcctctgagcccaagctaagctatcatatcccctgtgacctgcacgtatacatccagatggtctgaagcaactgaagatccacaaaagaaatgaaaatagccttaactgatgacattccaccattgtgatttgtttctgccccaccctaactgatcaatatactttgtaatctcccttacccttaagaagtttccttgtaatctctcccacgcttaagaaggttctttgtaattctccccacccttgagaatgtactttgtaagatccatcccctgcccgcaaaacagcactcctaactccactgcctaccccaaaacctgtaagaactaatgataatcccaccaccctttgctgactctctttttggactcagcccacctgcacccaggtgaaataaacagccttgttgctcacacaaagcctgtttggtggtctctttacacggacacacgtgagacaaataatagagtatatcttaagatcttttctttcaaaggggttatagccccagaactctgaatgaaaggcgcttaagcaactttgtctttctgatctaaagtggaaaatacaagggagaaaagacaattcccagaagtttggaggtaagacagcatacctgggtccccagtgttattgcaaaggttcttttgcccttgacagatttggttgtctatataagaggtgatagtattccaggcattaattcctccaggacagttgacatgttgtggcagtatcctatagagaaatgtggtcataacatgcaaagttgctaaactcacagcatcatccctctttgattctcttcccatacccttactcacagagtctggagctgagtaaagccacggaaggtgttggccaagtcacctttgagggggtttgcttgcaggtctctgcaaagtacacaatgttagcactttcgcatcaacctacattatattagccttttgggtgggaggtacctaactacttacatgatgacagtggtatgtgcctgatgaaagtttggaccagggtcctccagagaacagttctggagatccagcctgaggaaataaagtaatcaatataactgtgtgttcctctttttcttcagccacggcacagtttgtatttgactacacaacccccttttcagctaataattgaacacagctgtgttcagagtcacacactaggagctgtggtagacattttaattctgcattatccaatagaatcgccacttgccacatgtaactacttaaatttaaattaatgtaccttaggctgggtgtagtgactcactcctgtaatcccagcactttaggaggccaagcgggggaggatcacttgaacctaggaattcaagaccagcctgggcaatatgaatgagaccctgactctatagaagaaaattaatttaacctaaaaattcagtgtctcatttgcactagccgtatttcaagtgcaaatggaataaccacgttagtagctactgtactggttagtacagatacggaacattttccttttttgagacagtcttactctgttgcccaagctggagtgcagtggcacgatctcggctcactgcaacctccatctcccgggttcaagcaattctcctgcctcagcctcctgagtagctgagattataggcacatgccaccacgcctggctaatttttgtatttttagtagagacggggtttcaccatgttggtcaggctggtcttgaactcctgacctcgtgatccgcccatctgggcctcccaaagtgctgggattacaggcatgagccaccgcgcctggctcggaacattttcataatcacagaaagttctatccgccagcactgttctaatcggttatgcatctattgggagaaatctgtgtttcttgtctacattagtgaatctcatattatgattttcagatccacagagggcctttaaattaaaaaaaaaaagtcacataaatcaaagtttttttccacatgtattttctaccacagattggttgtaaactgctggacattaaggatcatgccacgttatttttttcttcaatatctactgctatccattcctttattctacaaatatttactgagtccctacaaactgcaaacactgggagaatgttaaaaatatgtaacacagtattttggcctttgagtggcttacaatgtagttagaggaacaagagcactgcccaaaaataaaagcactgtaaacattaaattacaatataaaagaaaccacaggacagtgtataaatatatttgagtggacactaaagattacaggaagtttttaaaaaaggtattactgaatcgcttgaacccaggaggtggagggcgcggtgagccgagatcatgccattgcattccagcctgggcaacaagagtgaaactccgtctcaaaaaaataaataaataataatttaaaaaaggtattactctggaacttagtagtagtaaatattcacaaaagatgttggaattgaaggatggatatttcctaatttggtagaggaaggcaatttcaggtatggagagaggcctgaacaaaggtggaatgcctttgagggcaggcaaatctggctggtgcagaccattatggaggtttgagcggacaagtaattggaaataatgttggaaaagtgggttgggactagtatggtacttaatggtttgaattttgtcctgagacaaaatttaatactaaatatagtattaaagcaagagagtgataatggaaaatgttggttttctaaaagcttaatacagagaagtatttaggtagatgaaggaaagaagagaatggaagcaaaacataacattttgagtttgaagttagggtgcactcagtaggaaatgcttaataggaagctagaggtacccgtatgtacctggagtgtggaaaggttaaaaaagacactaaagagatctagttttggtagacatctgcgtgatgattacagctgaaaccataataggtggattctttaaataatataagggtataaaagcagccaggctaaggaatggcctgtatccagcatctagggatgtcttcccctcaccccaagatggtgcccttctgattcaggcagcaacgggcatgcagcattagctctcgtgtcgttttacaataaaaggccacttttgacaaattttgcacgctccctggacattgggtgcatatctgcagaagagaaagaaacattagaactccagaaagaaaagccaagaaaagaacaaacggcgatcaagaattaactgccagtacacgtttccagaattcctctaacacggggccgataaatggataaacggctcgtgtcccacccttgtaacaggctaggctaggagatgccatctcttcctccagagtcctgcgccgaatcagctcccgacactttcagtaccagatatcgcacagggaaggtcctcatctctgaagatcactattcgaacttatttattatgctttctgcagagacttctcaatctgacagccctagtttggcgcggtgtaaaacgaccgcaggtacgtaaagaactcatcaagcattacaaaagtacagccctaccaccgcacgatatatggcgttcgtgcgtagagagattacacaagaggcagaggacccgtctgtagaaagaacttaaagttattctaaaattaaggggcgaaatcaagtttcacaggtctttgaaagtcggcaggactggggcgccgaaggcctgcacgacgtgagtacttgggaacaggacctggctgggcagggtcgggaagcgtcagggacgaaatcagaaccgcaggcccgccgaggagaagggggagccgctggcgagcgcgacgcacggctggccagcgaccctgcttcagcccgacctcaaacttgcttctgtacctcgggtagcgccagagccctttccacgcccagagcgaggagcagggcggcagcccagggcaccagggtcgtaagactacccgggtcgtgaggcgccattttccgttcccttggtgctccgctgctcgcgcgacccggccccgcggccccgccccgcagcgcgtcaggccctcttccccgggcgtggcctaagcggcccggtccagtcgccctggggctgcttgggggcttttcctgctcgtggagctctgcgctggtcttcatgcgccctagccctctttcggggatactggccgaccccctcttccttttcccctttagtgaaggcctcccccgtcgccgcgcggcttcccggagccgactgcagactccctcagcccggtgttccccgcgtccggacgccgaggtcgcggcttcgcagaaactcgggcccctccatccgccctcagtaaacatggcggcacggcgagcggggcgggcagggggcgggcagggggcggggcccccgcgggctcccggccagggctctcggccgggctctggctacccacgtgtggagaccgggcaggtgggcctggagagcgtgagccggtgccgagaggcaccggggagcggcgtctgagccggggcggggacaagggggcggggaggggcggagcgagccggcctccggcgtgggtctgagatcttaagtgcgagcggtaaggtggtggtctccgccgcgtagagggaagcgggaaaccgagaaagaacgagggtgagggtgatgagggaagggcaaacctcaaactccagcgggaggacacgagcctggatcgccccgggcacctagtcctcttcacctcaatgctgatagcgcatagcgtcccggagcctggcgaggaggtaggagcgggatagacgcttccctaactcattttctttgccttcccaggaaaagggagcgatgttgatctcaggaagcacaaagggaccttcctagctctgactgaaccacggaggtaagggagtgcgttgctgccccagggtgggccagcgccctgactgaagggcgccaggggatccctgctcccggcgcgacagtgttggttagggccagccagaaagctccttaaagccgacccaagtgatcatctcgagtagccgagccaggcttcccttccacattacccccatggtgtctgcctggaagttcctgaaaggtttacgtttagctggctggcaaattttctaaggtgttagtagctattagcattttaaggagggcccccaaagcctttcacaccttgaggaattataggccccaggacagattttgagggaatctttttggaacagttagtcctgcagtggtctcattgccttttgtaggagtcaatgcgatccactgcagtgtgtgaccaaagtgagttcaggtttttatttttatttttatttttattttgagacggagtctcgctctgtcgcccaggctggagtgcagtggcgcgatctcggctcactgcaagctccgcctcgcgggttcacgccattctcctgcctcaacctcccgagtagctgggactacaggcgcctgccaccacgcctggctaattttttgtattttttagtagagacggggtttcaccgtgttagccaggatggtctcgatctcctgacctcgtgatctgcccgcctcggcctcccaaagtgctgggattacaggcagtgatgtgggaccccttttaaaaacctgaacttggcctggcgcggtggccaggccaccgatccgccaaggcaggtggatcgtcatgtcaggagttttgagaccagcctggccaatatggtgaaatctcgtctctactaaaaatacaaaaaaaaaaaaaaaaaattagctgggcgcggtagcacatgcctgtagtcccagctactcaggaggctgaggcagaagaatc

SEQ ID NO: 8906 - DNA, 6000 bp, Homo sapiens
tgaagaagaggacagatgggtctgggaaccactatctgggcaattctctttcttgtctcctccctcccccagttacacagactctcatctctagctcctatggctgaggactcagcccccaaatccctcgagcccttcttcccaactcctagaacctaccagctctccaaccagctcagcacctcaaagatctcccgagggtcagtgtagagatgccaatcctgtgagtacggagagtggacatcaaaccagacttggatgagccacagtcatttaataataagagccatagcagcaactacaaccgcccctatggctaatgcatatttggcacttaccatgtgccagatactgtctcaaaagtttttacacattaactcattgaatcaccacctgcctggtttcacattatactctccactaagcaagaggggagaaaatgaccctgagaatggtctgtgtccacagggagctaaacatctaggggcagagaaagtatggacacaaatattcagaacccaataggataaactctgactcagagtgtaccctgtggggccctggaggaatagaggaggcgaggaaatgttctgctcttggccttactgctctacgaatctccaaaaactggttagtactgaagagataggaaaggaagacactaacacaaaggcaggaggaggacaggaagagaaatgacgaaccaacagaagactgagagagaacaaaggactaaaggacggttaaagatgggccagggaaactgagcaagagagagaacagctgctcaccatggcactcaggaagcccctctccaaggcattgagagtgggcacggccacacccccagcagctccccattcgtcgttgaagacctcctcctcctccccttcatcatagaggtacttactggccaccatctgcagaggaaccagaagtggtggagcagagctcatagcaggctcttggctctttagggagatggggagggggtgtcttaccatggagatcaggaacaagtcagaggatgacacatgctgcaagtagtctgggtttcggtgccggagccgttcaatgtacaccagagccagcatcatagcacatggggagatgcatgcctccctgggtggtagaaaggatcactaattaaacccaagggtccttcagctcttgcaagtcttatgatgctcgttcctgtctttacctcttatctttggaaaaaaactattcctggctgggcacggtggctcatgtctgtaatcccagcactttggaagaccaaggtgggtggactgacaccaggagtttgacaccagcctggccaacatggtgaaaccccgtctttactaaaaatacaaaaattagccaggggcggtggtgtgtgcctgtagtcccagctactggggaggctgaggcacaagaatcactggaacccaggaggcggaggttgcggtgagccgagattgtgccactgcactccagcctgggtgacaaagtgagactgtctcaaaaaaaaaaaaaagaaagaaagaaaagaaagaaaagacgattcccctttctctagggcccaaacactctcatcctatcctcatttccaggctcaccgggacacatgagctacatatttcttctggagtcggcgaatagggctgggggctgccttctggagcagttcgacagcaatgtctgcaagggacagaaggaaggccgagtgagcaaacaagcacccacacccaacacaccagtccccactgctagcagaagacccagatctgtattttctgaggccttggggacaggaccatagtaacaaaatagagatcaaattctcacacactgagacaaaaagcccattccaagttcgaatttcagctcattctaacaggaaagcttattgccctgtcacatcaaactatccagatttatctgtcactgctgttcatctgtggcataaacatgccttgtttacttggggaacatatgatggatatccttcgaaaattagcttttcaatatataaatcaagagtgatttgtatagatatatgtggcagcaatgttttttattcatttgggctaaaagaatgggaaatgcaaactgccctcttgaaccaagtaccaacgagctagcaatgaagagacagtgtagccacggggcaaacctcgagccattttctgcctgatgacaatcccattttcatgcttctcacttgtccagtcacacaacactgcctaacctgccaccgggctggagagctcctccaggctacagtcggcttcccagtcccagccatagtagagcctccttcggatccgggcactcagcttctggtgtcctgggaggaactgaaacagggcaggggcagcggagggtgaagggcacggaaaggtatgatgcagatcctggctctgggctggaaggcggggcaggggacaggccggcctcgctgctagggggcccgtgccttacccagacccgcgttctgtaaatcgcttgccaatggcagcctggtccatagagggaggaatgcccccacccccatcgagggttccccgggagaagttctccgagaagggccctcgtgtggccacccctacgcccattcctatactccgcggctctccctcccggcccaagcagccgcggcctcaaggaagcactgctcgagcagctgccgcccagtcccggcacagcagtcaggcgagctcgcagcgccgctcaggccgggaggggcgcgccgggaggccggggagggggcgggacccccactcaccgtgaagtcctggaagccggcgagggagaaggtgccttcttcgtccagcaggagcccggtcaggtccatcgcgccgccagtcgccgccctgcgaaggtgaacggaaggaaacgagttgtagggggctcgcggagctgtccttgcccgcctgtccacctgccagcctgcctccccggggcgggccgccgtcctcgccctcgccctcgcagctccctccccccggcggcggaaggcggggcccgggctgaactgggcgcctcttcctgttccgccccgggcttggcgcggcgcgcgggggccctaggcccgggaagggaggtgtcaagcgtccgtgcgacgctcacctcgcggagcagaaaggagatgcggctgcgaggcgcgtactccgcctgtgccgcgtccgcccggcgtttacaagccgcgggggtgccgcctgcaagtcagcgcctggcacttcctgccgcccatctggcccagcctcccgccccgacccgcgggcaggaaccggactcgaactcctggtctcacggaacgtggccaagccccaggcgcctctgagaaatggggacaattcgtaggggggaccacgccgcactgaggatgaacaagccaggcgtagcaatggagaagttaatgtgaataagacgaaacgcacaacaggaagttgttcccagttgctttttaggagagatattatacatactcagcaatgcatatgaaaagcgtctgaaaggacacacaggaaatttagcagtgggtgaactatgaaaaggaagagaaactcagggtgttttttttttttactgtaatttgaacttttaaacctaaggctactgaggaaattctgtgatcttaagcgaatgtaaggcctcaaaacgtgtcaacacgtccacccaaaagtaaactgcatctacccaaggttttgtgttgaaacccacctcccgcctccgatctcatgcttgagtaggccgaggtgggaagaagctccgatatgtggaagtgggaaagtttaaggagataggaaagaaacaacttttctgagtagatgttgttttcgagtctgtcgagtcaagcgctggtgtgtgtttgtttacccactgaggggagggaactgggaggaccagtgcgttgagggttggttgagtaatgggacggccaccgcccttcccgagcgagcagaagcagaccctaccggggatactgggaatctggaagcccacttcctgccccacacggggataccggggcagcaccacactccctagccgccctgcctactgtgggataagaaaacgggctcgactgcctggacctagacccggactcggaacccggggtacttcgtcaaccagaaaacgaacctgtgtaggcgcagtgtcagcggcagccgccggggcgcatgcgcggcccgccctatccgggggggggggggttaggccgcgtcacgtgacgggctcagcgctccgcagtcacgtgacgctcgtccgcaacctctgctgtcctccgcggcgcccccttccgcctgacgcgcccccggcggcggccgcgcagccctggctcctcgcgggctcgggcggcggctgcggcggggctatggcgagcggcggtggcgggggtaacactggcgcgggtggggggccggggatgggcctgagcctgggcctgggtctgggtctgagcctaggcatgagtgaggccaccagtgaggcagaggaggaggcggccacggccgaggcggtgggacgcctggccacgacgctgtggctgcggctccgcggctgggaggcggtgctggcggcggcgcagcggttgctggtgtgggagaagccgctgcacagcctggtcacggcggccgcgctcaacggcctcttctggtaacggccgcggaggagggggcggggccgggatgagcgggggagggaggggtcgagagcaccattcccctttctgggttatcacttggcctgggggcatgacccatccccagtttttgcaggctgacatccgcttgaattgcccatttttttctatctctgagtcgtgagtcgcgagttaggcctggaggtgccattaccccatcagtaggcgcctttccaccttctgagatggatgcatgagcctgtctcacccactcactgctgaggtgcctgtctctccctaaggttgctgtcttcctcgtccctccggcccttcttcctactcagcgtctcacttttggcctattttctgctggatctctggcagcctcgctttctccctgacgtttcaggtgagtgtttcttcattcagtaagcacccattgggtacttgcttggtgcctgattccgctgggtggggttaagtggcgaggggaacgtacagcaggccacctgcctcccaggcatggcccacttcctttttgtacggaattccctaaaatgagaattgcccctttcccaaactaatactactgtaggtgcagtggttaagatggtgaagtctgcagccatattacctgggttccattctctgttctgccatttaccattgctgtgaccttgtaaaagtagctcaatttctgtttgtctcaatttccttatctgtaaaacacagatgatagaacttacttcatagagaggtgaggagaggattaatgagttaatacacatgctatacttatgatagtgtttcacatataagccttataaatagaacgtcagtgttgtttttcttgttatccatataatttacttagtaggtgacaggctgtatgtgagttgcttgggagataagcatgagtaaaatctagttcttatgttggagaagggtaatgtctaaaggagacagacgcaaacaaaaacatgtaacagctcccccattggcatctgaagaaggtgctctggggctgcagaggagggacaactatttctgccttggggagtgtctcccagggcccctaccactcaataatttgcccccctcctctctctctagcatcatccccagaggagccacactctgacaggtgagtacaggccacctcttgaagacaaatgcccacatcctgtcctgcttgctggtgccagtgtcaccatggagcagggcagtgccccagcattgtgaatgaactggtaacaagccatgggtttttcatggtcctaggctcctgtgtaggtgtttgcgtgcctgctccttttggggcagagggttgggtcctcctggctttgcttctaagaccaggacagcct

SEQ ID NO: 8907 - DNA, 6000 bp, Homo sapiens
aaaatttttcaatatgatttatgaaagctcttttcatggttgtgttttaaaaacaatagtttattgatcaaattatgatgtgtatatattagcaaagggcacatggaagaataactcttttgcaatttttcattaagcatatgtttgaatatttaatctggtttgctagaccaaaggtaaaataaaaatactgaataccaatttctgtattaaaacattttaagttgatattacctaaatgtctaaagcacatcgatatttcagagaaggcattttacacattacacatttgatctcaattctggtcatgaattatttcatcaagtgacagcttcacgttcaattgtaagagattggttttttaccaaaatgcatttttttaaagaaaatgcataacaagtgctgtctttgtagtcaaatagttgcttttaaaaatatgctttttagtcatactctaaaaagtgggatggttttgtttttgttgtttttgtttttgtgtggttatttttgttttgcttttggagctgagagaacagccacgctttttaggcaatatttttacccactggagtcagcagaagggtgccacctggtggaaatgtgaacaaactctaaaccttgtctgattgaccattaaaaatatatatatactcatttaacaaacgttgagagtctcgtcatcagagacaaatgatacaaagatcaaaaaaagctcctataaatttatgaggatctatcttgttcttttatattatttagatcagtagcgtgatattaactaaaattagcagagctgtgatttacttgtatagttgaagctttaaacaaattattcatttgttttatattcaaggtaaatttgtgcacatgtgcacacatacacatataatttgcaattattttcattcttacaatagaaatatgttgtatcatgattgtatagaagttaaaagttgaggcttcagacctccatgagttcctggctaagtctcacttccacaataacttccttaatcctctgtattctcatctctaaaataggaataaaaacaggactcacctcaaaaaactgctttgagaatcaaatagaaaaatacattcaagaaatgttactttatgaaccctaagaatagtactctgcctgtggcaagcattcaggaagtgatttttaaaaataataataaattacaattagccactagagttcttagctctttcaatgttaattgagatattgatcatgttaagaaatgattgtgtctagtcatgtcaaggcatttgtttttagatattttgtaaatgtggagtgttgtgaaagcaacaaaaataactgtcataaatattttgtaatcaaagaatctttaaaagaaagattactaagatgataaaaatatttccaatgattcagaatattcataaaatacacggtccctacacggtccctcctattcttgttgtcaccattctctagggagggagggcatgtcctcttgtcatggcaccctgtgccagaggacactaacagatcaaataaaagaggaaggttgagccctctacaggactgtaactgtaaccaaattatatggttcataaccattttcagttacaggaaggattatggtcttccactgtgctataagtggaaataggtgtttgatggcctcaggacaaggcatctttgaggtttcataaaaatcttcaccatagaaactagaagacattcttggaaacatgcaatagcttaaatcattcaaaatcaatgcatagtgattgatttgttggaacatgtgccctatttaaccactaggtaaaatttcataaaggtacattttaatttaaatttatgaatcttttttatgaaatattatagaaaacacacaactaatcacatctttatgaagctatattatatctagtattgcacgagagttgtgtggcaattgcagaattaaaccataatgactaatatggctaataaaagcttagtagtcttacggaaagtagtttaagctgtcacaaaaatcattcacattctttttccatcgtttcatatgtcaagctttgaacaaaaatatgctagatatgagtatttcctgggagtgcttgaaacaccctcactgcgaggtgccatgtgtatatttcagttgactttctttgtaaaatcaatctattagaacacatgcataagattcataaaactgacattttcaaatcatgtcaatactcagaaaggcacttaaaatactctattaaaacaagagttctgcaaagtagccactccctgaatatttgaagtggctattaaaaaatgcacactaacaagaaaaatggattcgagcttgcacctatctcttcatatgaattttaagtaccagattaatcctgacaaggggatttgttgtgtatagacagcgtgtccactatctacacatacattttcagctcctgtgtgctctgctctgctctgcttctgcatcccacttccaccatcactgaactgtttgcagcgcctcaagtaaccagctggtgtcacaggttagtgagcaaagatttcatgtggggactctcacctggctaatctttcttactggtagcatcattcccagagcagtagagaggctcggcggcttgttaatgaaatttaagggctgtcagcctgaaagaggatgttcaatccatgttcccgttctgaaattatttttctatatctgctaaccaatgtttacattctgatgtgtgctggggattaggaggaaggggtataaaaggaaggaacgtatgatgttttaatattttcatacttatctcagagtatggatcaaacaggatcgtttaagaaaacaaatgctttgtaagaactgccaacattcaaccccctcccactaataaacgagaagggagctgtaagtcattgagtaatccccaccacctgtgtgaaacacatgtgagagaaaagagaaggggagggaagaggagaaaagaaaccgcaagccaggagagatgaccaagtctgcaatattaataacagcatcgctggcatggcctcctgtgtctcgccaccactcctgggcgatttggacagctccccttaagaggctcttcagtgcttagaatacgcgaaaagccgagtcgctgctggagcctagccgcgtgcgctccctctatcccacgctagcaataagctgggagggtgtccgcctccagcagccttcgcagcgcactccgaacaaagatccccagtcctcctaccccagcgcttgggtcccgcgggtccacagttaatccctgacctaagtgcagctctctctgcccggagttcctaattgatgcaaacgtgagcgcacctgcacccggctcagcgcagcctccctcctcctcctcctcctcctcgccagggtgtctcggcgctcccgaccctccaactttggaaaaagagcgacaccgaagtcccaatcaccccagatcagggacagagacgagatggggatccacgacggtacggttatgctacagatttctaaagaccaaaacaaaaaggggttggcgggtgtagacggacgggaaagagacaggaataaccctcagcccacgcagggcacctcatctgtgcagacgcgacacatccaaacccaacacatcaccaaagccagcgccttcccggctccacttaatcgttaatgcctcgccgctccccaagctccgttccgctcagcagactacggatgtctgggacactcttcccccatccccacctcacaaacacacacccgtctcctcaaaagaaacaagaaagcagagggaaaaccccgtccgcctaaaggtcattcgcctgctcgggtcgctttggccagcgagcgccccggctataggaggacggggctcgaacccggtgagcggccgtcaggagcgcagcagatttcttcagcgtgcgttaatggggaaccaagaggccccattccttggtcccggccgcctctccctccctcggtgggccgcccgccggggttccccggggcaccttcagcctttacctctctgcccccttccccgcggctctccaccttgcgcatcctctcgccgggccccggagcgcacgcagaggctctaacttcccgcagagtccgtggagaagcaggagagcctggaactggggcggggcgggggagggtgagaagagggaggcgcgggagcccagcctgggaagcgggaggcgggcggagcgcgcactggagccacccctcccgggagggcctggccgcggctgccgactctcacctggtccgccggctgcgcctggctcgccctggcccccggggtgggctgcggctcctgcttcgcggccgtcatcgccggcggcccgcgctggcgctcgcttcctcgcgggcgcttcagactcggggaccgtcacttggcagcgttcgcaggtcacgggcgcccgtcgctcccggaatcggcggaagggacggggtggggggagcggaggggcggggaggggaagaagagcggcaccgggcgggctccccgtcgtagggtccctccctcggccaccgcagaccctctgactccccgctctccccgccccccgccacccaaagcgcagcgagccgcggcggcgaggcgagaccaagcggcaagttagtgcagcggcgagcggcggggccccggcccctgaccgagctgcggcgacgcctcgtgccttcttcccgcagtccgcgccccccaccgcccgcccccgggggctccccgcgcggtgctcagcgcgccaggtggagcagccgggcgccgcgctccggcctctcttcggcaaccgcagccggggggggggagagcccggagcggcgcgagagcccccaacccgcgcgcccacggccgccggcttccgcggttaccccgccccccgcaggcttccgctaaaacccggagaagcggagcgcgcccgtgcgaagcactgggtggctccagctccgccactgcgcgcgctccagcgccccagaaggcagggggcagcccggggaccggggtcccggagccccgtgggaggcgggcaacacctgtcgggacccgagggcgtgtctgagattgtggcctgaggtgctgcgccttccgatccggggcagcgggcgtcctgtagctgcgccttccgaatccagcccagattctcctaccagctgcttgggtcacgtcggtggaactcctaaaggtcggttaaaaaccataagaactgtaatgatgataagactctgatactcatttcttttttctttttctttcttcctggacacgtgtaggaaaaccttcaaatcttaagtcctcccagcctttcctttcttcaacacaaccctctcccattcaaagtaggtttaccgagcacctaccacgtgccaaacacactgtgaggctcagagagagggtcgcaggggagagaaactaaacaacacggcaaacctaccaaatcccctggctgcagggagcttacgttgtgtgggaattgggagcccggagcctggatacaaatcaatgagtcaatgtagctcttaggaagttgaattaccgcggatagacaaagtccacagttcatccagatgcactagtgcacgtggctttccctagggcgcctaaagcctgtggaccacaaacagcctccaagtctcaggcacaggttgtggaagattgcttaccggagaaatggcaggagtgagttgaatatttaggtgttcatgtattcagcacaagacagttccagcagagaggacagagaatatggggcagtggggtggcagtgagttgggctttattggctaaggactggctccctgctctgagccactcagtccattaattagtcacttcttaactgaaagacttttgtagaatggtaggagctgtcctcttgccttagtagtttctaaaacacgaattataatgttgtcctaaatattaattgtaacgatacttcctataaagtatgtattttaaaataaatatatcagtaatcaccag

SEQ ID NO: 8908 - DNA, 6000 bp, Homo sapiens
aagcttccttaaggtaatttagcagagtcagtcatactaataatgcacacatcctgcacctagcaattccactgctagcaatccatcctacagaagtacttcttccctaccacccactattttatgcagaactgcaacattgttggagtgaaaaattggaaataacctaaataaataacagagcagtgattatggtacattcttatcatgtaatacaatgaagtcactgtttaagaatacatagaactctatgtattaagaaacaaagatagtatgtatgattccttttatgtttttgttgttgtttgtttgttttaaaaaaggagcagcaaccacagaaaccttttaggagtgtgagaggtctcaagtaaagagtgaagttaaaggatcaggtaaagataatcttgaggtttcaggcctgagggctgggaaaatggtaggttccattaacagaaaatcatgagacgtaaaaaaattatttattcttaaaggcaacgatggattctagatgtgctgagtttagagttacggatgcaacttccaggattatcagtggatgactaagacaaaaacgagttctgctcatgactgaagctttactatttaaatgatgatgtggccatgccttcagactcatgctgtaatgtagagatattctgattgaagtgagatttaagaactctgtgtttctaaattcagtatcttgttcaagggtctggaatcaatcatagcttaaaaccatgtatgttgtctggggataaaagaccttaaagagtccaggaatatcatggaaataggagcttagatggcaccaccttctattccatgaatgcgtccagatactcctcaggctgcccactgccctgtacctcaccaccaccaggaattccactgcttcaaactggccttaattctatcctcaatgaagtggagattcggggctgctggggccttaattctcccttatctgtgatgtttactacgcctgaggtcctgggaaaacttgtgatcccacacaacaaagaataacgtcttacctggtgtgttttttgttctgggcttctttttcttaggacgactaagtggaatatcatctataaagcaagaaaaaacgtcaacagaaaagggtgcctaaaattcaatgcagagaacagtcagaagagaacttttaaacagggaagaattctccctctcttccctgggcctggcaaacgtttatagattaggggaagaaggcaagaaattgagaagatcagagagagcccacagtgtggtaccagtagcacactgcatgtcagtaatgttagaaaccatgacacagaaagtgggttcaacaaatattcatctgatcccctatatttcccagcctccttgcacataggtgtagtctatgactggttctggcctataggctgtgagcagaagtgatctgtgtcatttcagagccaaacgttgaaagagccagtgagtaatcttccagctttctcttcccttgttgtggtgactgaggaagcctcatgttaagatggtgggaccacagcacagaagtagcctagattgcagaccaggcgcagtggctcacacctgtaatcccaacactttgggaggccaagacaggcagatcacttgagctcaggagttcgacaccagcctggccaacatggcaaaaccctgtctctactgaaaatacaaaaagtagctgggcatggtggcacacgcctgtaatcccaactactcaggaggctgaggcaggagaatgacttgaacccaggaggcagagattgcagtgagccgagatcacaccactgcactccagcctgggcaacagagtgagactctgtctcaaaacaaaagaaaaaaaaaagtagcctagattgctatatcaatagtaaaaaggtagtgaaaggtaatggtcccccatttttgccatagcagactttgtattaattagaaataaccctgtgtgacactaagtcactgagatttgggggttttagtatagtataaccttgtctaccctgactaaatgagacaaaggaaggtgcagtcctcattatagagctacaaattagccaacagttatgtgctgggtgaccccattcagggatgaagtgcttttataatggaaaggtcatctagtgctatgtatcaatgacaatttttaaatggtagtcatgggagattatttcacaaaaacatattgtagaattacaaattacaccattcagactcagttttaagagaaacaaaccaaggaatcaaactaatttttgaacaccaaatattatatttacattaaactaactcaccttgactaacacgtcatataacaccaaacaaatttaatcagcaggacaaagacaaaaaagaaacaattaattagaaacctgttaatattcacagtgaaaattgacttaaatcattacaaatttaaaataaaattagctttcacataatagctagtttacaaactagtttactgtttataattaagtggtttaataacactgctaataaaataatgtcaatattttctgaacctacatatacatattccctactgtctattaataaaatggattaagcagattaagaactcttacttgtgactgattaaaatcagcttaaactctgaggaaactattctcacaaaagaccagaattctgatttaaaaaaaaaaagacaccaaaacagttagaaagggaatggatccattatcctaccatgttgatattcaggcttttaaatataacattccattataactgttattcttaaaattcaaggatttttcacctttaaaatttcagaaaatccctaaatttttcagaagagtttcctgaatcattgtaattttgcaatgatactagtcaatttttccactgtcttcattttccatttttaaagctcaataatgaaattactgtaaattatttttaccttggcacaggtggaagagctcgtggaggacgctgtggcggaaaaaataaatttgcttgtaagtaaaagcctagagcatctttacttcaaataccatcacgctatttttttttttttgagatggtgtattgctgtgtggcccaggctggagtgcaacggcacgatcttggctcactgcagcttccatctcctgggttcaagcaattcccctgcctcagcctcccaagtagctgggattacaggcacccaccaccatgcccggctaatttttgtatttttagtagagacggggtttcaccatgttggccaggctggtcttgaactcctgacctcaggaaatccgcccaccttggcctctgaaagtggtgggattataggagtgagccactacgcccggccaaagcaattctttcaaaagtctgttgttcagacatgacagaaaaatataatggatcagactaggatcttcaaatctcttgataatcttgttcatcagtgaaacctgggaggtactgatgagaaacatgggcaatttaaaatttgttctcccatcctaaatttcatataaaattccttccttcctacattcctttccatctctaggccaggcccttttctaagcattaggaatacactaatgaacacaatggagagaactctgctcttatgaaacttacattctagtggttgagtattagaaacaatgttaaaaatatatatatgataatatatactatatattatatgcagcatgtacgataaaatatatttatatgctatatttaagacatatcttgtatacatatcgtgtgtgcatatatatatatatacacaagatacacacacacaaaacgtaatgaatgaaggagactgagtgctacttttgttagggaaagtttctctgagtttgagctgagacctgaatgagaaagcagcaaccggaacaaatgcaaatatttttaggttaaattgggcttggaatgtttcaggtaaaaggacagcaaggctgccgcacaattaccaaggagaggtaggcaggagccagattagttagggccttgcagaccaagggaagtttggattttgttttaattcaatgggaaacaaatggaggttttaaaccacatactaacacaatttttaaaaaggccagttgcatacactgggaagaatgcgttttagggcagaaagaaaggtggggggaacccttctaaaccctcatttacatgaataagaaaagtgtttgtagttcagacagcattacagttgagaagtattttagaatcatatagtaacagaaatgcctagaagccaatttaatgttccaagtatctcatgctgcttgcataagacatttattcaaaagggttaaattttagacactcttgtagtttgtcccatttagcaatccattcgttcgaacagtagattaatgcaagtactacaagattaggacgaggcaagctgccgtaataccatccagtagtcaaaattacaattggagaagaatgacagtcacaggaacgcgctattgttctaaagatgctacgaagcgcgcgcgatcgatcccagggctctgttcacgtaactgatttcaaaagtcccgcaaaaatgacgttccacccacccagagacccaacctctaatcctcaaaagtaggacggctcaactgaagacaaaaatcctaacaattaaaagtagctaaggctcgcttaccacaggattcttccccattctgcgtttagccggcctcggcggccgccggcccccaagcacctggcgccccacccctcccggctcggtcgcgcgcgcaggcgcaatgcgtcatcgggccgcgccgcctggctagtaccccgcgcgcagcgccctgcggggatgttgcggtgagaggcgtgcagggacctggattggccagtccagactagccctgccaaaaagggggcctcggagttgggggtaatgtgcccaggagcagaaatctggcgaccgtggcgctgcaatcacagctttcccgtggtttcctaagtggtggcggtgatttgtttgcgggaagcggggcgtgacggaagaccttaattaaaggactccgcaggcgaacagatctcttctgggcagctacagacctctcctcggaggagtctaggagaggcctggctggaagccccggcacccgccgggccccgggcctcagatgagtgaggcgtcgtcgtggcaacgcgggctcaggtccccgcaaacttcatgccaggcctctctctcccactccgggagttcggtcccggcctcgcctgcgtctccgtcccattcctgtgaacactggaggggcggatgcgcgcaccccacgagcaaggccctcccttagtgattcccagctcgttggcgcccccccacacacacccacccccactgccaagtgtagctgtttacccgccacctctcgaggccgacgcgcccctcgccgctcaccaggtggccctcctccagccgagcccccgagtcagtcctcatggtgctctccccgcggggctgccccggcgcaaccgccggcggcccgagcccagctccccgcgacgcagcggcctccgggacctgtgggacgccggggcttcgtggcgcctggcgaggcagccgccccctgagccaggtccccgcccgcctctgtcctgccaggcgctgctgggtttgggaggaatgcgtttactctccaggaccaacgagtctgtgcaggcctgggtgtgtggatgtgtattaatataggcaattctcacattttctccgattgcttacccttcatcccacaactgtgtaaatcaaatttggaaaaactttttctcaaccttaaaatcaaatccaacctcacataaatatcactacaaactacctgatttgcatcgtttggtttggttgggtttgtttttttttaaagataactttcactttaagtaacagagaactacaaatattttgaatcatgcattctgttttacagttaagaaagaaatgggaaagatggaagaatggtgtggatatggagaagagaatgatgcagaagatgaaca

SEQ ID NO: 8909 - DNA, 6000 bp, Homo sapiens
tggtctaaagaacctatggtaaattacaaaatatggctacaaatgtcccccatcctagtattagccccctttgtaatgcaacgttgctgcactgcctaggatgaggcagtcttacttccccaccccagtcttgtgtgactaagagaatggactgtgacactgtaagattttcaaggttgtaagaggtcttacaagcttctcttagaatactgtcccaagattcctgtgtcataaatgatcacaaagagtaaggcctatatgtccaccaacactagctgccaaacatgagtgatgccatcttggatctcccagccagggaaatcctccagctgaatgctggtacatgaggagtaagccccgggcaaaatcagtagaactgcccaacaggcacctagaactgtaaaaaacagtgaacagttgttttaatccactaggtcccgaggtggtttgttatgcagccatagaacaaagattcattacttatccttattttctactgttaccataccattatcttatgcctgcagtctctgaaaactctgattttaactgagtctaacctgggaactatcttaaatatccagggaagattacaggtactgaattactaaaagtacaccactactataggataaactcatggcacaaaggccagagcaatcacacaaaataccaatgtaatctatcatttttttttttggagacagggtctcactctgctgcccaggccagagtgcagtggtgcaatcactgcagcctcgacctcctgggttcaagtgatcctcccacctcagcctcctgagtagcctggactacaggcacgcaccaccatacccagctaattgttgtattttttttagtagagacggggtttcatcatgttgcccaggatggtcttgaactcctgagctcaagcaatctgcctgtctcggcctcccaaagcgctgggattacaggagtgagccaccatgcccagccccaatgcaatatttcaagagtcttgcagaaatacaaacacgcagttactatttcattatttacatatactttgcatatccttttcttaaaaaaaaaaatctgcttctggggaaattttttttttccttagtgggaaatcatagtaaacatggagacatggaagctaagggtgggtcaatgagggaatcactttgaaagtatacaacattttgggccttaaaaaaaagtctcccttaactaacttttagctgacaaatacttaaaacacaaaaatatgacatgcccaaatcttaaaaaattagaaaaaagcttaacatcccatgagaaaatatgactatgatgttaagtctacactacaccactgtaaaaggcaaactgttctccttgaaatgaatttaatctctaagcatcaagtttcgatcttaagtagaaaccattttagggttctttctacaaagtatgaaacatcacactaatgaacaatgatcataatggaaagataactacttttaaggttcaaaacttgccttctttttaagctgttgacaaaaatgggtgtagagcagcaggtgattttaaaaccaggtgttcaacttacctagtctaaccggtagagtcagagaaatatatttgagggcaggaaaaaccagctctgaccatgtaagttcatgccagggcagaaagctgaaaattaagattaatgaaaattaaaccccagcatgcagtgactcacactcaggcctgtaatcacagcgctttgggaggctgaggtgggaggattccttgagctaaggagttggagaccagcctgggaaacatggtgaaactgtctctataaaaaaatataaaaattagtcagacatggtggcgcgcacctgtagtcccagctacccaggaagctgaggtgggagaactgcttgagtctgggagactgcggctgcagcagcctaaaaaacagagtgagaccctgtcacacactcacacacacaaaattattaccccccccacctaaactctcaaattataatttcattctccccaacttcagactttttggctcatcctatgattagcaaatgctgtatattaagataaattttttgactgcaattgaattctgctttggtgaattcaagtaatcttagtaggaactcaaaatccgattctttttaaattgtaatcattctaatgtgatcagttgattcacttatttaacagttaaaagcttcattagttaatttgttgtttaaaagtaaagtctaatgcaacgctgtgcatttcattcattcatgtcccattgttctttattactggcacttaattatctgtggtaacagaaggatgtatcagcaaagattatctaaaaattatttttattttgttaaggaacacaatagctctccattccgcagcatagagcactaactttatttttatttttttagagacagggtctcactctgtggtgcaggctggagtgcagtggagctctatcatacctcactgcagtctctgcaactcgtgagctcaaaatgatcgttctgcctcagcagcccaagtagctagtagtagcagtgcgcaccactacacccgcaccaccatgcccgtagagatggggtctttgtggcctggctgaactcccagccttaagcgatcctcccaccttggcctcccaaagtgacgggattacaggagtgagccaccacacccagacactaattttctagtacagtacagaaagtcttttatgtcgggctctaacttaccattcaatgtatgtttcagctacaggaacaaatcatgaattcctaaaacaaaccataatatcatgactttgcagtttctttatcaaagtcctagtgagccttcacatcttagttcaggcaataaataaataaatcctgtaaaatttccaagattaagcacccctcccctatgctcccacagaaccactgtacagtcatattaagataataatagttgtttatacattagtctgatgactaaacagtgagttgtggagggcagatgccatgtcaagctcattcttgtaatgtgaagctctccataatttgtaatttgactacaacaaattacaaattatctaaaaaagttttaagatatttgacagattttgcattataaaattattttcctacaataaaatgtcaaaatgtagacgattcttgaacatagagcagataaaagagttgtgtaaggtgggtatggagcggactaaaaattggctacatgagagtcatggatgacttttgtgtccaagttcgttacctgacaccttcatgtagaacataacctgggcatcctcgtgctttatctgggaaaatagccctcttccaggtggcagaaaaaagaaatcatttgtacttgaataagtaggaattcttaattcaagacacctgacccagcactaaacttggaaaaaaaccaagactagtattatgtcccctagtgactgcttcacacaccacctcagcaaatttaatcctctctagaaattaactgccatgtttctgagacaatctcgtgaacttaaataactatggcaaaaatcaagactcaaacccaggtcttctgagtctggtgctactgcctcatgcaccagtcctgtctcccaaaatgctgtagagctgttaaataaaaatattatactgacctcatttctcaaacaaactttttgctacctcaagtaaaagatctagttacactacatgtgtgccttcttaataactgtatactattggatttttaaatcgaaaattcatctttaatcctacatcttggttctggacagaaaggtggagatttaaaataacatgtaatcagaaaaatagctaatcaatcctacaaaatgggggagaaaacctcgccaaatttcagttttcacacatttaactaatagtaacaaacaacattagtcgtgacgaatttattacccagatagactttcccaatatatttactttggtacttgagaaaaagtattaagtgcagcattttggggtgagggggtggacacacatcttcaatacgcagtttcaccaaaatgagggagtttcctactcccggcgccttctatatttttacttcttaggccaacaggtccatttttaatacaatcacctacttcgagttgcagaacccacaattcaccacaacacaaaaataactctcagggcgtcacgatattcaaaaactgacgttaccaataagacaatcttggccgaatctaaggggctaccgaagtcacttcgactcgaggccgggctggccgagccggagccctgcccgcctttgccccgcgctcaccggcgagctcacgcgcgacacccgcggcccgcagggctccgaagaccccccgccccacggcccaagaggaggccgccccgcgccaaaggagggctcaggcttcttcccgtcacccgccacacgtccctgaggaagacacacaatctgtcccctgcacccgccacaaactccaccacccgaccaaaggcccctggcaagggaggcctgcgctgtggccccttggccccggtggccccggaccaagcttctccacctcatcctgagaggaagcggcctccgcgtccccaggcctcttcgtttcctcccctcccccactcgcggcctggtcccgaactagcgcccaagacggagaagaactagctccgcagctcattaccccggctcctgagccggcaccgaccagtgcgcgtcccactcgcagcaacacgcaccgccgcctttctccttggagttctaggcccgtgactgaggaaatgcagtcggcagcgaagcacaatggcgcccgcccctctcccggatccggcgcagaaccagccaccaccgttaagtgcccctccctgctcctcctccccccacttcgcggacttcctggcttctcgcgagagtggcggcgcggcggggaccgagagctgcgggcgggctggaggtaccccaccgcggggtggtgctctgactgcgggaaccgttgaagagctgcccccggggagtcagcgaggcgccactggtaagcggcagcggctggctggccggcgtgccggcagctgggctggcgagtgtgcgggcgccgggcgctggaggcccgggccggggcggtccccgcccgtctatagtctctgagccagccccttccctcccgggcgccgggtccccgcccacaggcccacctgcagggccccgtgctcgaaataacgcccagctggttggctttttttttttttttttttctttttctggctcttggtaagtggcgcagtgaatgttgaattgaatcaagcactgccttttccgacctacccctccccgcttgcttccctgcccgccctgtgtgatctaactgcaagccctttcccttaagagttggagcctgtttgtccaaccttgtgatcatttccttgtggtaagaatcttggtaaatgatggtgatcatgtcttttaaaatcgtgatagtaacctttaatagcgtagccatcgattttgcagtaaacaaattcacctatttagaaagagggaggaaaattgtgaggtgaatggtctggtgaatattagatgaaactttcaaagaactgtaaatgtggcaaactaagatgtaaatgagtactaataaataaaagggagtaggttagggaaaagctacatctaactatgtgtaaatatttagatgatatgttgatttggaataatgaatcaaaagttttttaatggaaaagatcagttattgaaacttggaagaatactgaaaggcacttgattttttttaatgacctattttgttaaggtattaaaagcaatcctttggatccaaataattccaataaatgaaacacagtgtttctacgtgtttgtcattacatcggaagggaatggagtatcagtcactatcatccttattttattgtcttggggactaacagactgtacatgtttcactatgataaattctaaaatactataaattttaaagacttaaaggtattt

SEQ ID NO: 8910 - DNA, 6000 bp, Homo sapiens
tattagctgatcttgctcaactcataacttctttatgtttcaaatacctccataaagtcaggataataataactgccacgccaatttcaaaaggtactttggggattaaatgagatagtgtatcacaagtctttctcattcagggatgtaaatgttgacatttttactaattctttagcagatcaagggtctaaggcaagtaatagtttagatatggattgaaaatacactaaggctggggctgtggggttagtaccacccatatgaaggtccacagatgctgtgcaaacagtgaggctcacacaatcattacgttattcttcttaaaggcaaatgaaaaataattttaaacttctgcacacactgaatcagtgtcttaaaaagtcactgaaggccgggcacagtggctaatgcctgtaatcctagcattttgggaggccgaggtgggcggataacctgaggttaggagttcgagaccagtctgaccaacatggagaaaccccatctctactaaaaatacaaaattagtcgggcatggtggtgaacgcctgtaatcccagctattcggaagcctgaggcaggagaattccttgaacctgggagatggaggttgtggtgagccgagatcgtgccactgcactccagcctgggcaacaagagcgaaactccatctcaaacaacaacaacaacaacaacaaaaacccaaaaaactcactttattgtctccctcaataattttaagaacttgctgtgattctaagacttgaatttcacatagtaattaaaatttcagaacaatgtgggggaaagttacaagggtataaacattttattttaccatgtaaggattgtagaaataaacctaaccactcacatcagaatctcatttttaaaaatgagataaaatcttaacactgaaaacagcaagaaggcagtatcagaattaacaacaacaacaatagtttaaggatacgttaagattcacttcggaggagcatccttgataaggcaaatcagactttcaaccacatctggattatttaatctaaagcaccactatgatcccttatttcactctttagaagaaacgacgttgtttgacagacacactcccattatttaacaatttctgcaaagaggttaagatttcaactagacttgaaaatacatttagtaggataaaatatacttcaatgttaatacaaaaggcctataaatctcagctagatagaagagtgcatctatattgagaacacgtcatctactgtatatagatcatatataatttatcatcttgcctggccttcaagagatcaagaataatgagaatctctcagccttatgaagggaagttactttctgtttggcacattctgcatttaataaaggtgacctctgtgagaatattgattgcttgtggtacaccaccaaatcattcaaactctagctataatctgaagtctctaaaagtccttttttcttttctatttttttctgacagatgccagaaaacagaccagttccttactgaaatcttgtgttaagaaattaaggaggacagatctccagggtttgatcctccgtgttcaacattacacaattttagaactggtatgctacttcctttctaggacctgtccaaaaactacgttaggcaataaactacattattactcttgggtcagggtttaaatttgtgaatttttccccttagaaacaaagggttaaatttggcccgacatggtggctcacacctgtaatcccggcactttgggaggctgagatgggtggatcacttgaggtcaggagttcgacaccagcctggccaacatggtgaaaccctgcctctactaaaaatacaaaaaaaaaaaaaaattagccaggtgcggtggtgtgcacctgtaatcccagctactcaggaggctggggcatgagagtcacttgggcctgggaggcagaagttgcagtgagccaagactgtgcctctgcactccagcctgggctcagggtgagactccgtctaaaaaaataaaaataaaaataaataaataaataaataaagggttaaattcataaaaagcatttactttataggcagtctaaataggtacattttattgaaggtttctgtcactaggacaatcctcaactgttctctttgccaagtcagtatgaagcagcaagtcctcctcccgcaagacaagacacatacttcagcttgagaatctgcacagctaagcagaatgcaggcccaaatggccaaagggaatccatctgacctgaagataattataaaaagctttgtttgggcagcttaatactagtcttaaaataatcagattgactcaaactccatatacattttggtagccttctaccctacacctcttcttcatctctttgattcctcctacctgcattactgacccaagttaatctataatgtgacaagtgttttaaggaaaaaaacaaccatcagacccacagattaatttgacagggatgaaatctgtaaggcctttatatcacataaaatgtcttttgtatggctgacaagtttcaaagaaataaactggtaaaatttttaaagcgtgtgccttgtttccaacttaactcattttcaaaactaaattttatttttttattttttagagacagggtctctgtcacccaggctagagtgcagtggtgcaatcatagctcactacagcctcgaatctcctaggctccagcaattctcccgcctcagcctcccaagtagctgggactacaagctttccaccacacctggctaatttttaaaaaaattttagtagagataaggtcctgctgtgttgcacaggctggtctcaaactcgtggccttaagcaatcctcctgccttgatttcccaaagtgtcgggattaatggtgtgagccactgcacccagccaaaagtaggtattcttaaaaatatctgtattccctcttaacaattatgttcacccaatgaggcatgagaaaacacaggcccctagtattttacatccaggttctcttttgcacagtgatttgtgacatgctaaccagtttaatttacaagtttctttttttttgttttccagctgtggatatgccctgtggagtgacaccggtacaaagaacttcaggtttcctaggtccccaaattctctaagcactaacagtttaaagacgtccttaccatacaccaccgtttgctctcatcattaccctgaacgcacttgtgtataatcacaaaggagtaacacggcacatgtgaataccgttaggattcttcacctctttttaagaagcaaaccaaaatacattaaaaaatgccaattacatagtaaactacatatttgccaatttttaaaatttatactatcaataattgagtttatttcaattaataatgttaacaatgacacatttaacattatgttagagctcaatttgtatatattaacatgtatttttaaataatttacgtatttatcgtcgaatcatgtatttttttaaagggggatgctcaactctctcaggcaaaaatgagcacctttccgaacaccgtggggagaggcagggatgcaggcagacatatcctaaactcaccctcccggcagcatcaaagtagccttcggccagggatttgttataatcagcataaggattcgggaaggccctttgagccatgacgccggaagcaagcctgcagaacaggggaaaaacagaaactaggttgagataggggcctcggccgagttgcgagggcggcggcggcgcccaggtatcccccttcctccagctccagggccatcgagccgtctcggcggtccgagtggacctcgggcccactgcggcccaactgctaggacatggcgccttcgcgaaaaagctgccagggcccttaacccacccggacaaagaggccccgttttgcaaccccgttcccacgcccgcgacttgaagcaagtgcgcctcccgcgtcctgaagcccttctcggccctggcctctcaccccgcagccccggacagtaacagaagggctattttaccgcccagttcctgccaggagggccaatcagagccttcgccgttcccgagacccgcccccttctctcttacagtttgttaaagacacaggcgtgtaatttctaaaggataacgcagggtattttaattactgggtagcagaagtgaggacctagaatcacgcggagatgtgaccaatatttcctacccttctttaatttttcttatttttaaaaagtcaaatttaagtccagagtcataagaagtatatatttttttaacctggagaagaaacagactgcttttagatctgaacatgctggtatttctgctgttcgcaatagataaaatttggcggggggtggggggataatgtctctccagggacttgccaatcttttcttttcatttcttaaaacaaacaaacaaaaaagcaccaccatcattaacaacaacaacaacaaaaatatgcccaaaggacaggatatcaaatagcagttgataatactttggggaaagcacatgaaaacacaaattacagctcttaggaaatttattctgttccttagcctaaattggactataatactggataacaaagctctaaaaaatactgaaaaccaacacagcaggagatccacaacattcaatttcaatgttttaacagtccctgctatctgaaacatttttctttcatttaaaattaaatcccacctggtacatattaggcccattctattgctcagagaattttggagttcagttaaaaagtcagcctcactctctccttttccttctctccggtttcaatgaagagtcctagctccagacctccaactggagaagctcagtctccaccccaactccctccctccttggcctaagtttgtccttctgaggctgccatcccaaactctactcctaatccctccccacacccaggtttgctcttttaaaatagttgctttcttaggaaatgtagttgctttcttaacctcatcaaattcatgaagatttagccgaggcccatggtgagtcttaagctggatatctctcatgttttaaaagatgggtgtttgaaggagcaactcacaagagagaaaaggaaaacgagagacattttatcaattattttttctttaatgattaaaggctatccatttatcccactcacagtctttaagcaattaaatattactgttgttaagcaaggcaggatggtaattgtatattttcatagtatgcctctatcttattttactaatcctttcccctaatgatggacattgtttctaacttccatactacaaataatattcttggaacatgtgcttttatgaatctgtgtgagtatccctgagacatacacccagcagtcaattgctggatcatatgagattctgtacttaatttccccaatgttgttagattgctttccaaaactgctggactagtttatattccctctaacagtatctattgttcactccaagagtattcactccaacatatcaattgtttctgtcatttccatctcctctccaacacttggtattatctagtgttctaatgtttgccattctaatgaataatgtagaatctcactgatgtttaatcttttagtttttctgtggctaatggtgttgaactttccttcatatacctgttagacaattgggctttacctgttcctttatttatttttctattagtgattgcattgttttcctgttgatttgaaagagttttgtttctttttttcccgtgtttgtggggtatattctgtatattaatctcctttcactttagttattgtagatactttctttagtttgttcacattttctaggatatcctttattgaatcacaatctttcatttcgatgaagttaaacccatctaattgtgacactgtgatttgaggatttagcttcatattcaaaatgtctttgtctactcatagact

SEQ ID NO: 8911 - DNA, 6000 bp, Homo sapiens
aagcgatcctcccacctcagcctccagaggagttgggacttcagctgcacaccaccacagccagcttttttttttttctttttctttttttctggtagggacaaggtctcactatattgcctgggctggtcttaaactcctgggctcaagaaatcctcctgccttggcctcccgaagtgctgagattacagatgtgagctaccatctccagcctacattgggtttctatgaagacttcacttaaagaattaccttgctttgatctctgatctagttcaatcccatttgccacattttataaaggagacaactaggtccaaatatttgccaaagaccatatagggaggaagcacagagccaggacaccaatgtttgactcttaggtaagagttcctaccaaaactgctgatgacttccctgctgccccaggaaaggctctgcatttagaaaacatacggcctgctagggacttgactctaatagggacagctgagaggatagttgatggagtaagggagaggagttcacatcatatcacaatatcacaattgatgctaccaccaggcccaaccattcttcctctaccacctgtggcaaatattttacccaaaggaataaacccaacagtatccttcagctgagaacattgacagatcatacacatggcagtttcagaaagccctccaacgtttctttttttttttttttttttgagagagtctcactctgttgccaggctggagtggagtggcgccatctcagctcactgcaacctctgcctcccgggttcaagtaattctcctgcctccgcctgccaagtagctgggactacaggcacacgcctccacgcccagctaatttttgtatttttagtagagatggggtttcaccgtgttggccagatggtcttgatctctttacctcgtgatccgcctacctcagcctcccaaagtgctgggattacagacgtgagccaccgtgcccagccccaacatttctttagagaaagatggtcccactttcacaggccagccaaagtaaggaatgatgaaggatggaagataactcttgacccaaagggtatttaagctctccctgaaattcgcttcctccaggaagcccttaaggatgactggaggggacaggctccacaccaaaatgctttggaggccgggcaccatggtggctcatgcctgtaataccagcactttgggaggtcaaggtgggaggatcgcttgagcccaggagtttgagaccagcctgggcaacataacaagatcctgtcactacaaaaactaaataaataaataaataaataaatagacaaacaaacaaaatgctgtagatatgtgcctgagagtctcagtttctggaccttgagttcagataggaaagttctagccatttttccagaggatgtccctctggacagcattctattcatgtatgagatgctagaacacaaatctcatgtaagaatcatttcgggaacaaaagcctctgactcacattcattcattataatccaaataaatcccagggtcccatgtggcccagtttcaaagcagcatccattttaaagaaacaaccacctcatcatgcttcctgcaagtcaccttccaaacaacttactttgcgcattcccccacaaaaaaaaaaaaaggtaagaaaaaggaaagagtccagtcccacaagactaagtgtgctatgaacttaaaagcactggtgagttatcaaagaaatatttttaaaagagtaaaatggtcatatttaggaaggcccatatagcaacagactaggaggcattattggagtacgaatgaaaatcagagtgaggcgtgatcagggcctgaccttaggcagagaccttggagagaaggggatgcgttcacaaagtcaagtaggcaaacacaatcaacaccactctaggactggctagatttggggcggagagtaaaacagaaagaggagtttaggtttctaactgcagcaattgcatagatgctggttccattttcataagtgaatacagtaagttgaagattttagtgtcagagatggtgagtttaacttaggaacatgcttaatttgaggtcctcatgaggcatccaagcaaagatctgggtgtgaatggtgtgcttgggatgatattgagctttatcccagccctccactgctaaaacctcccttcagagagagatagctctttctcttgttgcccctgccaccagcacgttgtccccaccccttcccggatttcagcctctgataagcaggtacaggaaactcacaacgatctcacaaccgctgtccttccatattcattccccaagagcttcagaacctctggaatcatcttgcagaccttatgacgaccaccaagacctgaaatggggaaagacttccccgtcttcttccaggcattctatcccacaagtcttcctacactgctggcaaggacacctccagccagccttctgctggctctccacaccagaatcaggcacagatctctatgtgacaccagtcaagtagcccccagcaccccagccccagccctaggtttaactttgtctcctcttcccagtctttgaaaactggccaatcccagaatcaaatggattccaccagggttgcccctatcccacactatgtgatagcagccaaccatggacactgacttgccatttaacaccctccagagaggagctccttgcctcccctttcagttcccactgtccctcccctctcagaaaggaagcccaaacccaagattttacttttggtcagctgctagctaatccctagaagccacgttgctttcgtttcaactcactatagtaagtttccaaaaaccaaaataaaagaagatttaatggggaaggccttggaagagctgtttccaagctatgattataaaagccttatcttcctggactgggcaatggggaggagggaggccacccatctctaaacatttctgcagttttttactttttctccaaagcagcttctcatctagaactcagacatcctgcccctgtgtcaaccataaccagtgaacactagggctatgggttctccgtcccctcccagacacttctgcaaacaggccttcatctccctggtagggctcaagccctcctcattctgcaactatgagacggcattaccctccttacagttagtgtatccagcatggtgcctgccacgtgccagcagccggtatttttatgttggctaactgtatgatttccttgtgcctctccctacccagtcctgctattgctcaagaagcttctcacaccctctcccacatctgcacccggggtccataccagccccacacctcctcgccttccatcctccctgttaaaagcctgccctgaagaagccctactccgctgacatgcccaggcactgctctggggccctcactcatatttactcagttaaccctcaggccaggaggtagacatcacttcttattctcatttgacagttgaggaactgaggcacaaagaggttccgctgttaatatggggcggagcctggattcagatgcggagccagactgtctcacacccgccccgcttaaccatcctgccaagtgccctttcccaccctctggcacttaaaccctccctcttaaaaaggccagaacaagaacaaggccccttatttagggtagctatagaaaggtttattcccgcatctgatacagggaaaagtaacagtgggaaagttggcgtatgtagaccagcgtgtcttgggcagggtccgagggctgtagccacagcctgctgctcctgagcccatcgtacccagcctctgcccagcacaggcttccgacccttcctgggctctcttcacgccatcgcactggacagaggcgtctgaaaccctgccctggccagtggcgtgagaaaaaggaggtgcggcagatccatgcgggcagtcccaggaggcaacccgcagcggcactgcgccgtccggtccgcagtccgcagatcccaggcgcttgctgctctctggcggccaaagccgggatcccgaagacccgggactcacgccttcaacgcaccgcgcgcccaagggcaccagcgagtgaccgagagactcgggggagagggcgggaggaagagggacgccgctgagggccaagggggagggggtccgggagaggagcgggaaggaacgcaaagggcaccgctaggggagagcgcgggcttgggcacctgcggagaggcgtgggtggctgctgcgggacccgagcgcgcgccagcgccgcagccccccggaccccgacacaatcgcttgtcctgagcgaagggtcccttctaccctggagtgtggcgcccgtctctcggcccgggtcgccccctcctccttcctggcgctgcccctcctcggtcccgccccccgcgccgagttgggagcgccgcagtggccgctgcctgcaccgcccggccccggagccgccgctttgcccgcttgccgggcacgctcagagcgccgcgcgcgtagcgggccccggctcttcggtgctactccacggccggcctcggggagcccggccgccgcccgggccaggcagctccgctctcggacagccgcgctccgcgtcacaggaacttgggcaggaccccgacgggacccgtgcgcggagctgcatctggagccccgcggctatgccctgtgctcccctccctgccggccgctcgttctgtgccccggcccggccaccgacggccgcgcgttgagatgactttccgcgatctcctgagcgtcagtttcgagggaccccgcccggacagcagcgcagggggctccagcgcgggcggcggcgggggcagcgcgggcggcgcggccccctcggagggcccggcggtgggcggcgtgccggggggcgcgggcggcggcggcggcgtggtgggcgcaggcagcggcgaggacaaccggagctccgcgggggagccggggagcgcgggcgcgggcggcgacgtgaatggcacggcggccgtcgggggactggtggtgagcgcgcagggcgtgggcgtgggcgtcttcctggcagccttcatccttatggccgtggcaggtaacctgcttgtcatcctctcagtggcctgcaaccgccacctgcagaccgtcaccaactatttcatcgtgaacctggccgtggccgacctgctgctgagcgccaccgtactgcccttctcggccaccatggaggttctgggcttctgggcctttggccgcgccttctgcgacgtatgggccgccgtggacgtgctgtgctgcacggcctccatcctcagcctctgcaccatctccgtggaccggtacgtgggcgtgcgccactcactcaagtacccagccatcatgaccgagcgcaaggcggccgccatcctggccctgctctgggtcgtagccctggtggtgtccgtagggcccctgctgggctggaaggagcccgtgccccctgacgagcgcttctgcggtatcaccgaggaggcgggctacgctgtcttctcctccgtgtgctccttctacctgcccatggcggtcatcgtggtcatgtactgccgcgtgtacgtggtcgcgcgcagcaccacgcgcagcctcgaggcgggcgtcaagcgcgagcgaggcaaggcctccgaggtggtgctgcgcatccactgtcgcggcgcggccacgggcgccgacggggcgcacggcatgcgcagcgccaagggccacaccttccgcagctcgctctccgtgcgcctgctcaagttctcccgtgagaagaaagcggccaagactctggccatcgtcgtgggtgtcttcgtgctctgctggttccctttcttctttgtcctgccgctcggtgagtgacccctctcccaccggcccctcctgttctccctgagcctatggcggtgccctcctggcacccagacttgggcgacccccacctgaacctagaaggttgacttagcaagtcctgagtct

SEQ ID NO: 8912 - DNA, 6000 bp, Homo sapiens
cctggatttatactagtggagtggctgccatggaataggattcgtgggggaaataacaaaaaacattcagatttaatgttgtcgaaatattatacctgttaaatttttattattcgtgtctcttgagtggattcaaacatataatcttctggctctgtatcaaagtatccttacctcatccattttcctcacgtccagttgtttgtagataatgcctcccctgaggctctgcagcaactcctgcctgcatggattttctttcctcccctttcccttttcccctccctcagcactttatcatgtagttcagctaagcctccctcacccagaaagacttcagacagaaaactctttcagagacaagaagagactttggacttgcaattagagaaatctctttgactagaaggggaagtcatctccatttccccagttcttgccagctttgtgagcccaagtggggatgtaagttgcctccaagtatataatgcaaagtctccagcccctctcaaaatcccactcagcccacccagtttctctgggttcacacccagttcagtctatgaactccagcagaagtatggctcctgcccgcctcatcaaaggcaatgtcccctctgctgccctcctgtagcagatgtgagagtgacggcctgcccagaatctcctctgctcacctgcagatgcagttccaggcaccatgacacctcccatccaaggcctgaagctctcttcttttcagccttgggctttctgcaccacaccgggacacaactcaaaagtgagggaaattctggctctcagggaatctgtccatcagtagggggtaggaatcgatggctgaatgtccagcctccccgcgctgctgtgaacaaccatgaggcatgttctacacggtctgcaggtcaactggagtgagccgcagtggcaccctgctcgttagcatatcgtgtatgggcccttctcccttccctgcctcacttcccctccccctgtgtgtgcttcccgggatctgctcccaataaactacctgcactcaggtctttgtctgggagtctccttgggggaaacctaaactaagacaactccccgtagcactctgttgcactgttttctaagcacccactgtctccctggggaccacatgtccatccccagaaaaagctcctactctgctgagggtggtcaggacttggagttactacagcgacatctgtgggtcgccagatctgtgtggaagcaaccatgccttaactcatctcagaggattccatgaaagcaccagcgggcagatggtcccaggggtctgtttgcccccattgaatagggcaggcatggtccatgagcgaagaagcctctagctgaagttggtaagtatgcactattgcaaagaatgtgtccagggcgtacaactggccaccccatcatctcccccactcaagcaacagagcttttttgcctccatatctggaagttgccctgagcatgtagaacacctgcccaatcgcagcccctccccaggaggaaagcaaacagctggctctcttgcctttgatcatgcgggagagatgctaagaggtagggagagtggggtcaggttccaggtaaggtgggaaaagcagaatcacagaatgtcacaacctgaaggagtttgaagttcatttatccaaaaatttttaattggcagccttgtggactgtgttcagtctgagacaggttctctttgaccaaaacaagatttttgctttaacgaacccaaagactatttttaaagttctcgaattccagattctcttgaaaacaatgggaagctctgacaaagtggagtccatgttcccacctgccaataatccgctggctggggtttaacgatggggaacacctttttagaccttcagggtcctgccacaggttcaatcctgtatgcccagagcttcctgggcaccagtcatttgaatgggcagttcctgtgtttaaccaggaaggtcgtgggaggatttcgaacctgtcagaagcaaagtgaagggctccagactctccggacagatgggctgaggcactcctgggattgtctttatacggccatggaatctgatagtggtggtcatcgcaaagtttgggtgaggacttcaggggctttgagcagagcaaactgtccccatccccagcttcctcctgggggcctcctccttcaccgccatctccaaaggcccacaccgcactcgtcggagccgggctttccttgaaagggtcaccttctagtgggcgcggacgctggcactgggcacctccggaagacaggactctcccctcctgcgcgcgcgacccgggtgcggtgccacgactggcggcagagggcggtgctcactgttcccaagcgcacggtagaaacccggctactgtgtggtccgattcagacgggatgcgaaggcgctgaaatccgtgcgagaggctgcccccgctgccggggactcgcgtcagcgcggccggagctacggtgcccgcgccctggacgcaccagcccgagagcacgcggtggggtgggggagctgggcatccacccttggcctggactaggaggcaggcggggaccccggggcggagtccagcgcggggcggggcgcacaggtccgagacgctggaaagagctgtggggccggagcgccaactccagctggaacccagagaccctgacacgccggaggagcccgccggggcgaggaaaaaagagggacatcccccacgcagcggctctgcaagtgcaagtccgggtcctcgaggtgaaaaccgagcggcccgcctgcgcccaaccacactgtgactctcgatccggcttccggagcagcagagcgcacagaaaggaggcgccgagacaggtaagggcttagatccctgcagtcccgggactcagtcggtgcggtgggggagtcgctaggacaagggcctctgacgcccacttttttctcgggcattccggctgctttgcctcccgccactctcgagatatgcgtcggggctggctccaagcaggcgagttggtttcaggagatcccctctgggccctctaggaccgggtagggtacggtaagcggagtctgtggtgtgcgggcgcgggcagagggagccagcgggtagctgagctcgcggacgagctccaaattgcaggggagggtgcaggtagaggggcaccttcctgaaaggtgagcaggaaacagcaagcgtccgtggggaaattcccgcgcaccgcatcctccacccacccgccgttttcttccagccaggaggcaccgcagcctttgcttctagagcctgaatttctgacttgattcctgtctttgccaggatgtcgcctctagacgccgacagtgcggccgcgttgatggggcgggaagggggctgctggaacgggtcgctcccgggcggggagtgcaatctacgaaaatgcggctgggacctgtcccagcccgggcgcgcgccctcttgtcttgggttagggggctggaaagccgaggaggggtaggactccccattcttggtcccacgctgagcagaggctgcggggattggggtgtcgcatgagacggaggggcgacctggagagaagacacctccgggtgtggacgccactgggatttgcatctcgcctcttggaggttttcaccttgggaaagcagctggcgggcgcaccccaggttagggtgtcttttgctggcgcgcagttcctgtccctcggcgttctcctcccctcgcaggagtggaccaaatgcattgttcagctgggtcatctccttgctacccagcatcccgcggcgcccacatgtggagtcgtttccaggtgtgctgagaggcgaggggaaggccactcacagctggacagccagggcccctttctataggtgttgggatctgggctctttttccagcccctcggtgaagccttgtaccctggggtgccctatctcctgcgggctgagggcttcagagactattttccctattttgagaccttggtgacaggacatggtgcctttcaggcagggttgactctgggtggagaactagggccaagtgaaggaggtcagagagcagatccaaagttggagtagggtgggaagggcggcagaggatttctttctggagctggttcccacagaacggggagcagcaggggaattcccctcccccaccccaccaccacctcctccacctacagcgccctggtcatgcactcaacagatgtctgtctagcccccactatgcaccaggcactggactgggcagcaggaatttggtttacaggaagattaggactcagagagcataaatcactggcccagggtgactcagtctgtccatgtgaaagtgaacttggtgatttccaagtctatggcttggtcagtacagaaggagtggtgtcctgctttggagagaagaccccgcagcatcctggccctcctgcttcattgtccctggccaacaggtgccacaacgttgtgacagctgtaggagcctggccagctcatgggagcatccttggaaatgttccagaagcccctgtgggagctgatgtgttgggggctggaggatgtgactgggcagacaaagaggccctggcccctgggcaaagggcaaaggtgcacattcttcttgagagttctggacagtctgatccatcctatgctgtccttcctgacagctgggcagccacggagggtttcccaacttacagatctcaggtctcctctccccgcatcccgggtagttccatctggttaggcagtgggtctggttggcctatacttggggaactcagggaatgtgaccagatgttctcctgcatgttgcccactggttgtgcctccttccaggatccaggacggtgagtcaactctccccaaggatgtgggcagggtgctaggctcactgaccctgaaagagcagaaggtctggaccctcacccctcgcacctccctcacaccacttttcttgcagacatcaccatggcagcccagaatggaaacaccagtttcacacccaactttaatccaccccaagaccatgcctcctccctctcctttaacttcagttatggtgattatgacctccctatggatgaggatgaggacatgaccaagacccggaccttcttcgcagccaagatcgtcattggcattgcactggcaggcatcatgctggtctgcggcatcggtaactttgtctttatcgctgccctcacccgctataagaagttgcgcaacctcaccaatctgctcattgccaacctggccatctccgacttcctggtggccatcatctgctgccccttcgagatggactactacgtggtacggcagctctcctgggagcatggccacgtgctctgtgcctccgtcaactacctgcgcaccgtctccctctacgtctccaccaatgccttgctggccattgccattgacaggtgaggatggtgggtggggtgagtggtggggctgggccaggctgtctctttcctcatttaggctctgacaggctgacattgctccagataggaatgctcaccaatctttggagggcaagaggaggtcttgtttctccagttgagttctgttcccccagatgtgagcaagactggggctgctgagtggcccatctctgggccatgcccccagataccacatgtgcttcagatacaggcatgccacatgacagtatgtggcaccaacacaaagggaaagcagaaagggcaggcagctactacctagaagccacatgagagttaactagggcagcttccagtcaggaaaacatgtactaggcttttcctgtagccaccctccaggtggagatgtgaaacatttccatcagctagagaaccttctgtgctcctcaccagtcaatcctcccccaccaggcaaccaccaatctgatttctatcattacagttcagtttcacctgttctttaatgtcataaaaaaacataacgtatgtgctgttgtttc

SEQ ID NO: 8913 - DNA, 6000 bp, Homo sapiens
tgtatttatttagagacagagtctcactctgtcacccaggctggtgtgccgtggcacaatctcggctcactgcaacctctgcctcccgggttcatgcgattctcgtgcctcagcctcccaagtagctagcattacaggtgtatgccaccatgccacgctgatatttgtattttagtagagatagggttaggccatgttggccaggctgatcttgaactcctggcctctagtgatccgcctacctcggcctcccaaagtgctgggattactggcaggagccactgtgcccagcccattcccttgttttaaaacagacactcatgacttggaaatggatttacatactgaatgaacagtgacacactcctgttccctgaccccacgaagtggcaaagtaggactacaaggcccaatccagaggctctggtcatttatccagcttatgaatatttactgaatacttgtactgtgccaggtgttatgataggtgtttgggggaacaacattaattctaaaagggaaacacacaggtgacttcaatacccatctggttggcattaagatagaggtaagtaaagccaccctgaactcccagattgggtactcggagaacaggctgcggcccaacctgggggggttcagtgacttcctggagacaatggcagagttgagtcctaatgcgttagtcatctgtaaagaataagaagaaccttctaagcaggggaacaacatgagtcctgtggcacgaaacagcatgatgtggccagaaaccaaaaacaatctgctcctcctgaaacctaacttttgaagtagagtggtggagatgaggctggtgaacaatgcagggactcagtgtgggaaacccaggagtttgaacttgaatctccagtataaacaaattgtaggtggtagagtgccttggtcagacctgcatttaagacagatcaggggccaggctcggtggctcatgactgtaatcccaaatcaggctggcttctctgagacagatggagtcatggaaaccagttaagatgctactgcagctgtccaggtaaaagccatgagcctgaacatgatgcagtaccagggatagaaatggagggggtgtggacagcaaatttaagaactgtttttaagagctaaaatcagaaacattacatgatttattaataatcactccctttcttaatatcctttgatagctctactactgcctgcatacaacctatagccaataggactcgcagtgggtgggtggtggcagaggtggtaaaagagaggtgctgaagatgattttcagtcagaaggaaagagctgagagggcgatcagaggaagaaaagaactttttccactgctacaacctcccagaatcccttcctctgtctttcctagagctgaagaccttcaccacagtgaaataactagaaatcagcaacattcctttgtccttgggctagaacaggggtgagcaatctgctccacagcttgtttttataaccaaagttttgttggaacatggctgtagccatttgtttatgtatcatcatccatggctgcttcttgctaaaatgacagtgtagttgtgacagaaatcatatggctcacaaagcctaaaacatatactgtctggcactttatagaaaaagtttgccaactcctgagctagaaaattgatgggaaaggtttaagaaaagattcatcggaccccaaatctccacatccagagcccttggaaatccaacaaggctagtagacttaaaaaacaaatcagtcattcagatgaggccttggcgtagaactctttaacctaactgctactaaagccaaactgaaatgctcttaggaaaaggatgttttggtgatgagggaaagtaagggagatttagagcatcggcaccacttggtgggtttttagacagtcttgcttgtttgtttctggacagatggagaatggcttcactgataaattccattgcaatgtcactgggggctaaggctgcacttcctccccaaagcccaacattcttcattcaactggactcattcttgcttcctgaaatgctcagagtgacaatgtggagaatgaaaccctgatgactgggctctgtgacaactcataggaaaatcggggggtggaatattttatgggaaatggcccaacaccagcagtaggaagcaaacagaaggtgagaacagactagacctatgtatggcagtggcaattaataaatacaacagttataccataatacatttatttcatttgtcttataacgcataattatttcttcttttttcaattcaggtagtttgagctgtttcctggtttagagtcttatcagtcaaacctaacacactttctcgttttatgactgctgtattagggttctccagagaaaaagaaccaataggatacacctccctcttgaaagattcatcagaagctatttgctctgtgattatggaggctgaggagtcccatcatctgccctctgcaagctggagacccaggaaagctggtgttgcagatcaaagggctgagagcagagagctgatggtgtagataccagtccaagtctgaaggtctgagaaccaggagtgctgagggcacaagattcatagcccagctcaagattgaattcaaagagtgaattcaatcttcctctgccactttgttctatttaggccctgaatggattggatgatgctcacccaactggacccatatctactttactccgttcaccaattcaaaatgctaacctctttcagaaacacccacacagacactccaataaaatatttaactagatatgtaggaatcctgtatcttagtcaagttgacatgaaattaaccatcacaactacataataaaaaccagtgataatcagcatatcagtaattatgcaaaatagttagattcaccttaccatagacaacaacctattgatggctactgcccgctgctgggcttctatatgaggcatttcattctgaattacttggtctgtgattccatgagggaactggtgacataattctataatcctagaaacaaaggtattaatgttatccttcatggttacctgtttcaagagacagtgggggtaaaaatacaagtagaatagtttgaaactgtgcctttttcacatttggcagacaatctgggtttctgtgatggttttggatcaaagcatgttagaaattgaagaagatgatttctaaatacatgtttacagtattattgttatttaagaatatttcttttcctcactaataagaactttaaattagagcaaaagtctaatgaaatcacagaaaaaatattaaagctgagacttcagttttctcgggtgtaataagcatgacaaagttaagccataaatctgcaagcaggaggcaaatgcagatgtttctggtaggaagccaaaatttgttatgacaattcaccataatggggcctgtttttggaattatacctaccaaacaaaaaaagtcaaaatcttcacctagtcgacatcaacaaatgtattattcctaacagtctgagaaagttgagtcttttaaaactacgtgaaaatctaagagtggcagtgcctcggtaaaatataaaactgggccgggcgcggtggctcacgcctgtaatcccagcactttgggaggccgaggcgggcggatcacgaggtcaggagatcgagaccatcccagacaacatggtgaaaccccgtctctactaaaacataaaaaattagctgggcgtggtggcgcgagcctgtagtcccagctactcgggaggctaaggcaggggaatcgcttgaacccgggaggcggagattgcagtgaaccgagatcgcgccactgcactccagcctggcgacagagcgagactctgtctcacaaacaaacaaataaaaataaaagtggcagaggctttgggtgtcctaaaagtcttgagttcaatactgcactgaaaccacctggcttaatgttacttcgtaatcaccaactgcgccctaactccgcctaaacgttttgtcatagacgttcccttagtgacaagagcgatcctggatcagaacatgtattcacaagtgttctacagggaaagaaagccgagggctcctctcaaagcactgatcgcgtcaaagtaggaaggcagcacgtcatcacaacttccccaaaagtatcagggcaaagccagccagctacacaaagttgcaagctgtcaaacccattttgaacttcttgagttctgctctcccaggatgggaaggaacaagtgggtccagaaccccgcaatcgtttttcccgcgtgctcacctaacccgctccggccactcccaagggatcccggagaaggggtccagctgcccaaatgactgggcgcctgatggagtgccaagccggagcctcactggtttacctgttttctatttcgaccggatccgcgtcaggcggctgcaccttcaccttcacctccgccatgagggcgcagttcctgacgcctggggggaaagatgcacggagcagcccggtagcaagccggggaacccggggaaccagtggaggatagcgctctgctgaggccgaggggccttcttcctcgtgtcgcagccggtccttccttgcctttcggcgggaggtggccaagctgcgcctgctccggcccacttacaggcgccgctacagcttcttattcttgttttccagaatgtcaatgcccatcggacgcacaagcctggttccttcattctgagttgggaaaccaacttttagcacttggcaactctgtgaaggaatattcttagatgcctatgggaaagcactgggaaaggaactccaggcgggtaccaggctccctgcggagcggcaggggccggtctagttgctaagaagctgagtctccaccaatcatctgcccagcacccagtgggcggggcgcggctcgccgcgtctgtggtaacccgggcggcggcgaaggaggaggcaagaggcggtgagaggctggcgactgggttgggcgcggcagagatgcattaggggtcccgatcccgggccccgcggttagaggaagaggagggcggctagaggaggggaagagcttcccttactccagccgaaaggatgcaggtgtccttggcagcccctgatgggcgggaacaaccaaacgggattccggatccgggctgcgagggggcggtccacgttgggagagttgaggggtctggggatcctgttgactgcacgttgccatttgggcctggcggatccgccttttttcttgattccctttgcgtggggcccactggccaccccagcttcctaagggcagctgctagttgacgctcgcgaattacttcctctcctacatattttttatttagaatttttcaactacttttattttatctgcctttcacttaaatggaaatgcgactatgggcaagtctcaagtccagccacactcccgtaggagctattgttgtgctgtcagtatctgtagtttatattcttggccctagatccggaactatccaacaaggcattaagttcaccccttaaatttaggtaccccatttttgagaatacagtctgtgacaaagctcaaactgcagacatgttcagatcagcattattagaactgcaacaggcaaaactaaaaagaaactagaaatagcctaaatgcccagccacaaatggataaataagtacagggaaaactaaataatacagtgagaatgcaagaagtagactataaaaatggaatgaatatgtagattataattgggcaaaatctatggattattaatgaaatttgaaaaggcaatacagagatgtaaatggttgttgtgttaaggtgagcgttttttccccctgaaaccttctgtgcattaattatgacaaccttcctccccaccctcacctccaaaaagaccagtaaggctttcatactggtagttaattattaataccaggatttataaatacagtagatgaa

SEQ ID NO: 8914 - DNA, 6000 bp, Homo sapiens
gatgctggccgcagagctgctcccccgatggcacagggtgatgggagagcgtcctgctgtccgctgctgtgacaccagcatggccaccagcccagagttcctctcatcccagcccctggctgcccatttgaccagtctcatctcttgaacatcccgttggcaattcagccttggcgccctcaaacagggcacctcttcgtcccccaaacctgctccctctggttcattgtcagcaccttctttgaggcatttgagcccaaattatggagttgggctgggcgcctcgtctcctctgccctctcacacctcacatgccagctcatgtcagaatctgcccaggtctgcctgacctccaccgccaccattgcctcccacctggagtcttgcaacgcctcccctctggtctctctgcccccatccacctagagaccactctccaatgcagtcaggggattgtgtaaaagcgtcccccaggccctcctggagcatctgtctgagaaaacatcagcatccttgcagcagctcaaggggctacaagacctgcccctggaacgcactccccatgcccccgcctgagctccggccgcgtgagcctcctcgttgtccctggaacacgaacgtgctccatcccttgcccttcactcctgctgttctccttcctggaactctgcttcctccaatatccacctccctttcttccccctttgctcgtgtgtctcctcagtggagactccctgaccaccctttcaaaattggaacctgggctgtgggtcctccaggaagcagacgccgagacagcgtgggaggtggagagatgtgttggggtgaggcctgtgaaggatcaggggtcaggggacaggggcagctgagctggggccccgcctggcacgcgtcccctccctcctgcactctcccacctcggctgtggccactgcaggtcctggaggctcacgctccttccctgagccctggccactggaccttctcaggctggggtggccacacttgtccatgcacagaaacgatcaggccagggggtgccgtggcacccaagagggccctgagtctcacacccaccccctcccacccctcctctcctggaaatagcagccccaccttctcctgctgatcagggccacttaccccgacagaaaggcggctcctcgtcttgtctgctggagctcaggagctcaaagtgcctgggagccatccacagctgtgtccccagtaagcaggtgtccctcagagatgagaagcttgagccctgcagagcccagagtttggaaagcacagattcccctgaggatgcttgggagggtgccaggcggggcccctcctgctccttccctggtccgaaggcctgtggtcttcttgttggagacgtgacgccatggaaaggactctgctctgtcatccgtgtctgcagggcagagtcagccttggaggtgagtgccccaggctggtgtgcctctggaggctgctcctgggtggtgtggcagcccagaccctggtgggcccatggccgggggccatgccggctctgccttcatgggaagagggtcccctggccagatgccacactgtgtaggaatctctgcctgtggatctgaggtccataggcccctggattgcagcgtaggctcaacaggcaagacaggccgacgcacacccggagcaggtctgtggtccatgagggctaggggaaggggacccatggagccatctcaccagcagctatttgctgtcctcagagaatgtccccttcttggggctgggtgttgaacgcttgctggcggtcagacattcagaggcagcagcagcaggtgggccttgggaggtgggggtcggtgccctttggcccacacgtagcctccagggtggccactgcactcggtggggccgtgctgcactcactgcattcacctcaaacatcccagttcgagggtggccgatgacagaggcttgctaatgtcacgtcttcagggtgaatggctccttgtgggtgtttgcttgtgatacgaaaccaacaagctaggcccccagtcacgtggccgtccacatggctctggcccagagctcctgtctccatctctagtccttttcctccccagcccggaccagcctgccgggacattggcctctgcccatgaatacagggatggtctcccctggcgactttcttttctcatcacaacatacacaacatagctgctccctgggacagggccccccagggctagacgggctacacagggaccagccacatgcaccctgcattgccgtggccacatcaagccccaccccagaggacagtggcctcctgtttgggcaaggacaggggcctctggcatggctgctggtcatgctggtgcgcttgctggcctcaggctgggctggacatgtggccatggagagggtgcgcctgcgtgacctcgggcgggggagctcaccagcactgcagggaggcaagtcctgcccaactttatggtcttgcaggggctggtgaggtcaggtaccaagcactcccaccgagtctggctgagtctagggggcgttcacggccgccagccactgtcatcatcagacctcggggacaagccaggccctctcctctctaggtagcctccatttacagcagcttagagaagtttggtaactcagccggggtcacacagttgggtccccactgccaggggccaaaccccggggcctccttctgacttcccgcaagcgtgccctgaggtgacccacaggcgtgtgatggatatgtgtcaccactgtggtgacaggctgcagaagtgggtcccctggccgatgccacgctgtgtgggattccccgcctgtgggtccagattccatgggcccctggatcttggtgcaggttccgcagggtttcagaacagctgtggggcaggtgtgggctcagctgtccctcctgaggctctggggcagagagaacaccaggaaagctccctctgtctgggtcgtctggctcaggccagcactgcccaggctctccggggctggtcagttcacggggaagcctgggcagctgtggatgacaggggaggaggggtggggagggagaatggctgggcgggcctccagaccccttcatccttggttctgcttgggattccaatttatattccccattccaagatggggacactgaggctccagccagtgaaggagagagccagggccccctcttaacccccacccaatgccatctcctgcagcctcagtgggtatttggggaggagaagggcctggggaggagtcctctcaacaaggagttctggtttgggtggggacagtgagtcaagagctgcagcaggcatgggtggcagctctgatggccccacagccccttgctgcccagctccatggaacttttccccttgaaaacttttccctggtccaggcagagtccctccacactgggtgagttggggtggggtgcagggaacgtgggggagcctgtatgaggagtagggtttgcaggtggagtgggatgagtacaaccaagcagtcagagagggaagccgaacccctcccccaagagcagactcctagaagccgtgaaatagtgggctgactggggccacgggtctgggggttcctttctgcagtcagccctgaggtggcagcagaggaatcccagctcctccttccccaaagtttctgaagcgccacggggggcgaggggaaggggcaggtccccacagtatggggaagctgctataagtaggggagtgacggtgcatgtcagcgcccggggtcccctctgcagcccctcccccagacacgcgcactctggcctctttgaggcaccagggatgccttcggctgcttccttctcctgtgagcggagttgctgcttccttctcctggggcgcggctccctccctgcctgctgtctgatgtgtgtctcgctcttggtgggtcctcagcctggcgctggtggctgcttccctggcctgtgggtgtctgtgtatctgagtgtgggcatgtctgtctgtctgccctcagtgtttcaggaggaatctgtccttgacccggtgtatctgagcgcatgtgtctggtggtgggggcgctccctcctgccacctctcctctcctcccccgtcccctcccacaggcgctaacacagccaccacctgcgccctgagcgcagtgacctcgtctgtccgctgcagtggcgactgcccctctgtccacaggggtccgtggctgggctccgagcggcttgctgctccctcctcagcctgaggccgccggagcccaggctagacgcgctcccctccggctgggtccgcccggcgcctcatcttcccttatgtaactccacatctgcctgcgccttgcgggtcaccctggaccctgcactgggccctgtccacacggaggctggcacccagggtccgtgcaaacgggaggtggagcggacccctggtctgggcaccggctttccaagaccccctcctccccatcccttctcctccagacgttccttgccccggagacccacattcccaaaacatgcaccgaggaaatgccccgcagggcaagtccccggagcgcgggtgcaggcgtttcccccacccccaccccgggtccccacaggcgccagggctctccatgatgaccgggcaggggtcaccagggccgagggcacgggaaaggccgagcaacccagaccccggctccgagtgcgcgggctgactgaccgcaggcgagcccccagacccggtcaagccccggccgggctcccagccagctgctgtgagcgcaggggctgggctccaggcagcctggcgggcacgcggcgctgtccgtggtgctgccggcgccgggcggggcgggggcggggagggggcggggcgagggcggcagccaatggcgggggcgctgcgcggggcgcgcggggcggtgggctgggcgcggggcgcactcggctgcgcgttgcgctccggctgcacggtcgcaccggcagcggctcaggctccggctcctctcccgctgcagcagccgcgctgccggccccactgggctcggatccggccccggccccctcggcaccgcctgctctggccccggccccggccccgcggaccatgcgctgggcgcccccaggggaacccgacccggccaagggcccgcaaagacgaggctcccgggccggggcccctcccggccgcccagctctcggccggcgccctgccccgcgtcccggagccgcgtgagcctgcggggccatggagcgcgcgccgcccgacgggccgctgaacgcttcgggggcgctggcgggcgaggcggcggcggcgggcggggcgcgcggcttctcggcagcctggaccgcggtgctggccgcgctcatggcgctgctcatcgtggccacggtgctgggcaacgcgctggtcatgctcgccttcgtggccgactcgagcctccgcacccagaacaacttcttcctgctcaacctcgccatctccgacttcctcgtcggtaaatccccagcccctggccgctggggacccaggggcgcccagcgtggccgggccagcggggactggaacacggacctgggtggctcccgcaggcacacgccccaccaggggacccggcctgggaagggggcgtccggagcccatggggtggggggcacaggcgaagttccttgccactcaggcctcgggacaggggctggggagagatgtccccgggaagggacacgggcactgggcgaggcgcaaggcgcaaaggcagcgggtgcagctctggctcctgcgctgtagccaaacaaaggctgctgcggacttaggacgcgcggagggcgcagtggggcggtttagagaaggtctgggggaggggacatggaagggggatttttagagctgtgttgggggaagggacggtggggaaggtgggggttgggggagacgctcggaggagcgtgctctcacgtgtccaggctctgctgccggctggggggcg

SEQ ID NO: 8915 - DNA, 6000 bp, Homo sapiens
acagttcattgctgactggacggggaaagagagaggcagcgggtgccccgaggtatggtggggaatcctgaatttaaatgagaaatggccccttcccagttttataaataaagtgtgttttctcccagcttccctggagaattcacctcccactctgagggaaactggccctgaattacttatctctttcgagagagctaagctgcccaattacctgcttagagaacaccaggcctggaactctcgctggtcttttttttttccttgtgacagggccccactccgtcacccaggctggagtgcagtggcacgatctcggctcactgcagtcttgacctcctgggctcaagcgattctcccacctcagcctttcaagcagctgggactataggcatgcaccaccatacccagctaatgtttgtttttctgttttttttgagacagagtctcgctctgtcccccaggctgcagtgcagtggcatgatctcggctcaatgcaacctccgcctcccaggtccaagaaattttcctgcctcagcctcccgagtagctgggattacaggcacccaccatgacgcccggctaatttttgtatttttagtacagacggggtttcgccatgttggccaggctggtcttgaactcctgacctcaggtgatctgcccacgtcggcctcccaaagtcctgggattacaggcgtgagccaccgcacccggccttttgtattttttttgtagagatgaggtttcaccatgttgccttgactggtctcgaactcctgggctcaagcaatctgcccaccttggtctcccaaagtgctgggactacaggtatgagccaccgcccccggccctctcactggtcttaatggcctaggcctcttgggaggacttaacctgcagggccacagctacagttgaggctcatcttggagagctgatggaggagagagagcagggcagacaggcctggactctggccacagggcagaatccacccctcctaccagggcctgcctggctggagatgagatggtcaacaagcacactggagtctgtatgaatctctgggtctgtatgcctgctacacatatgcatgcccgtgtgaagatccaagtcgcagcacggactgagggacaggtgtccctgcacacagggggacaggtggagggcagctgccacacctatgtgaagcggcaacaagcgtgaagccagcacagctatgttgtgtgttgctcaggctgtcccagggtcctggcgcttctccctggcccctgccctaggggtctccttcaggtccctgcaagacccccacacgcagccccacaaaatgctcagatgcacactgactggcacccatcactccctcaccccacaccccagacagaggatgtgccatgtcagtggccttgctgtcaggcccccaccaccgttctgcccaacagagctgaccacggctccctccctccctggcctctcctctcttcacccaaagggcctcacaggttcatttgaaaaggccaatttatttctgaaaatggaaaccatttccacagaacgatgctctcacaagctcacagctggctggaacaatgcccagcccacgaacagagcaaagggcctttctgagccctgagtgctgggggtacagacgggggagcacccccggctcaggccctggtgttgcagcgggcatcggtgaggtgcttctgggaggaggaaaaggcccctggggctgctgcttttgtggccaggaggacctgacacctccagccggcctccccggggtcctgagctcagcacctggcagtctcccccatccccactgccctcagggtccccatcccttccatcatgcgcaccccacctccaatgtgaccggcgggcggtggtgccagaccagccttcaggacaggctcaggagagcagagctagagtctgggaggggctccgattcccagactcaccagataccggtggagggaagaggacccagactcgtggttggcttcagaggaagccagacacacagtgggatctttgcatgggaagattctgtgctctgagggatgcctctgacactgggctccccactactgaggcttaagggaagaccctcctggaacaccctgctctgaagaaggtgtgggtggcagtcggtatcctgcagggcaaagaccagcaggggtgcccagagctcaggccacacgggggtcactgggcaggctgccagccagccctggggggcagaggaaggcaccggcactagcctgggcccctcccaaaatgcatggaagggagaggcccccagcaatgcccccagggaggcccagagtcaggcagtgtggccagccccaccccaggacagcagctcggtgacagcaggcccccagggaggcccagaatcaggccagcgtggccagccccaccccaggacagcagctcggtgacagcaggcctgggacattctcccagtgcccggtgctgaggccatggtcggccgctccccagccaagaccagtgaccgcctggcccagcccacaccctggtcaatgcctgggccaccacatgccaggcctggcctctctgtgtcacgcctctggtttccaggagctgtgaactgacccctcccgaccccacgaacaccccaaatcacaaaattcagccccaatgcaccctctcctcacggctgctaatcaccatcccctgaccttgtgggcgtcaagctccacttatgtgacaaactgtggctacaagccccacgctccctcgagacacacccacagatcccccccaccgccatccccaaactggctgaagaggagtgtgagatatctcagcagggttccctgaccccggactcaacatccacatggcacagcccatagaagggtagctcggggcccacccacagtgtaccctcaggctggcgacatcagggtactcagggcgactgcccaggctcctgtcctaaccaatagacttgacagagcaactctcaggaaagaaggccgaccatgagtgtgcggtgacatccttgcaaccccacaggcagcgggcacagtctcgatgggcagacacatctccccagactgaaaacacacagtgaccaggcacggtgggtcatggctataacctgagcactttgggaggctgaggtagaggctgaagctcaggagatcgagaccagcctgggcaacatggtgaaaccccgtctctacaaaaaaaaacacaaaaattagccaggcatggtggcacatgcctgtagtcccagctacttgagaggctgaggtgggaggatcacctgagcccagggaggtcagggctgcagtgagccatgatagtgccactgcaccccagcctgggtgacagggcaagaccctgtctcaaaaaagaagaaaggaaagaaaacacagaccctctgacccaacacgtctccgctgaggagcggctctgagactggcgactgctcgtgtcagctgtggcgttgcctgcaaagcaggtccagatgcggccgagctgcacacacacgggttggataagccagggtgcgtccagcaaggaagaaaagcagggagaagggaaggacttaaagaccaacccagagcagagtgtgatgctcaccacctctgcaggacggcgggagagttacgtgtcagcgtgagaacgtcttctctgcagcctttcacagcttgcctaggctgagttcctcttttagcaaaagacaaaaaaagaaggtgggttgcctatggccaacaagttctgcttccacatgagggcatacagaccccccagatgcccacactcagccaaggacatgtagacccactcagatacaacgcagagctcacccacagagacccccatacaggcagacacaggcccacacacgtacatgtcctaactggcacacacacacaggaacacaccatgtacacacacagggtggggcaggagacccaccaagacacccatgttcacagataagggtgcccaggcccacagtgactcccggacagaggcacagatgccttcagtgccctctgcccgaagacctgggcacacccagaggcccctgcatggagtcccttcctgacacacaggcgcacacgtgcctcagccgcccactgaggagtctgcctgggtaagtgaatgctgaggagaccctgggacagccgactgcaggcgctactgcagctcaggggaaggtggggcctgccttccgggctccacgtcagcaagggggatccgcctccctccctcaccagcatcagcactgacaccaggctgggaacctcgcagccggggctgaggcagccagcagggcaggtcttgaaactcctgaaacctcagctggaggtctgtcagtgaggaccacacctcgccctccatccctgcgactgcctgtactggccaaaaccaggaacacaccaaggctaccaacttctggactcgaagcactggacaggtcagtggagagaagagtagctggaccagcagggtctgcagcatctctcgggagggtgtgagggagggtgcagactccaagacccctgagggaaggaccttcagattcaagggagccagagatgagcttgggaggtgtgtttccaaagggaccgcttgattctacgcagcccgtgcatctgcgggttgctggggcagggacggatccacatctcttcccaggagggtggccagcagctgctctctgcgggaggagggaactgatctgctgaagtctcaccaggaagaggcgggaggaggcccccacacaccccaccaggctccctctggccccatgtccttgacctggcaaagtggccgcagtctctgccagagaacctggagtggctgtgccctaacagacggccggatctcaaagtctctggttgtttttctttcctagaatccagcccaaggaggcccccaaccagatacccaactccaaggcacctcccacctgcccagggcgcaaatcgtcaacggtcccagctacaatgcaggccgctgggcacccagagccccttgacagcaggggctccttctccctccccacgatgggtgccaacgtctctcaggacaatggcactggccacaatgccaccttctccgagccactgccgttcctctatgtgctcctgcccgccgtgtactccgggatctgtgctgtggggctgactggcaacacggccgtcatccttgtaatcctaagggcgcccaagatgaagacggtgaccaacgtgttcatcctgaacctggccgtcgccgacgggctcttcacgctggtactgcccgtcaacatcgcggagcacctgctgcagtactggcccttcggggagctgctctgcaagctggtgctggccgtcgaccactacaacatcttctccagcatctacttcctagccgtgatgagcgtggaccgatacctggtggtgctggccaccgtgaggtcccgccacatgccctggcgcacctaccggggggcgaaggtcgccagcctgtgtgtctggctgggcgtcacggtcctggttctgcccttcttctctttcgctggcgtctacagcaacgagctgcaggtcccaagctgtgggctgagcttcccgtggcccgagcaggtctggttcaaggccagccgtgtctacacgttggtcctgggcttcgtgctgcccgtgtgcaccatctgtgtgctctacacagacctcctgcgcaggctgcgggccgtgcggctccgctctggagccaaggctctaggcaaggccaggcggaaggtgaccgtcctggtcctcgtcgtgctggccgtgtgcctcctctgctggacgcccttccacctggcctctgtcgtggccctgaccacggacctgccccagaccccactggtcatcagtatgtcctacgtcatcaccagcctcagctacgccaactcgtgcctgaaccccttcctctacgcctttctagatgacaacttccggaagaacttccgcagcatattgcggtgct

SEQ ID NO: 8916 - DNA, 6000 bp, Homo sapiens
aatttgggatttggagggagtggtgagacctggtcccagtgggggagacctgggctgggagggtcaacggagcaggagagagcctgggaagggagggaagctgcaagagcaaactcccacagcacacaaccagggtgaccctcagccccaactgcttgagactgagagggctccagctcccaggtctccggacttgctgttttaaaacctcgaaagtcccaggaaaaccagagtgagttgtttgtcctaccctgagcctcccagcctgccagtgccatcttacttaggcaacctgcagacaccatgtggaacagccatcccagctcacttgaggcccaaaactggattgccgagtgtctataacgctgacagggacctcacataactctggtggccaatcactctccatcctcagcctagcgcacaagacagccacggcaacgccccgagtgtgtcccactcaggcaaaggcagagtgtgtgacccccctccaggccatccttctcccacccagcctctccagctgccctgcagccaccagggtgagccctggcctctgtgtggaatgaagtgtgtgcacatcacaggaggctcacagcagcctggtgacctaggggccacgtcatgcttttcacacacaggaaactgggggtccaggcctggtgaagctggaattcgaaatcacctcctctccagcctgccaccccgacctgccctcggcatccctggccttcccggggcttatcccatgcagcagccgctgcacttgtgggcagccacgcctgcttcctcttctggttcttccctgagaacacagctcatgtttccagaaagctggccaaggtccaaggggcggcctgggaatgtgaaggacaaggatgccgatgactgaggcttgatcagcctgtagcacagcccccagaatctgccaacagccccagagatgcctggagcgcagccagcgtgaggctggaaagcggctccgccctccttgcccgcctgcgaacactcactgtgcgtacacatgtgcaggtgccgctctgtttttaaagatcctccttcgaacaccgtccgtcctggaacacgtgcaatttccatgctgtgggtgggaaaatctatagccaggctctaccgattatgtttattacgtatcttctgtgcctctaacacatccacgtttctgccccacccgccttcgtcctcataggaaaccaactactctgccactgacataataaatgcctgttgttttaagccactgagtgtgggggcatttcgttatgcagcaatagataactgattcaggtgttattgtcaacttaattttttcaattttaataagaagccttcctgctagcaagagtcacccaacagcggttgggggcctgagggaagagaaggttggaggctggagagatggtggctctcctacatttggaagcctgaagcctgctgcaaaccagtgacgggtttcgcacatcctgctggcatggcctcatcctgttcaccattgcatctgctccactagtgcaacacaaacccagtgagcgccaactgagcgttggagggactcagggtaagctagccaatgaaacaagcagggacccccacccgtgccgggcagtgttggagggactcagggtaagctagccaatgaaacaagcagggacccccacccttgggagcgtgcttccaaggacctcttgtgtggtgactctttggacgtgattgtcaccccaggcacagatgactaccttgcttggtaataaggacatgcctcgctcacaccactcaggaaatcacagaaagccaggctgtccccagcacactggctgccccagctcagcacgcctgctgcaccctagaatcacagccgtgcccgtggacctcggtcctcgctgcccatgggaccggccggctcctcaacaggcagcattgggagtgttgggatcggggcagcaggtccccaaggctctccaacttgcaggagacactcgcccccggagccctgccccccacaaggcgtgcccgacttcacgtgtcagtgaaggcatccggctggccaagggtgtggctgcatccccaatgggcatgaccggacctggcctgtcccttcccaagcacctcaccggcactttctttaaagagtctcagctgtttaggaagggcttctgtctgcagaaatcagaagagaaaggggcaaacaacgtggagttaagagcttccagccgctgagccatccggtttgtgagtgcacagaagagctcagaacggccgagcggcgtggctgccaggggtccccaccggaggcctgccatctgccttgtgtagaacaaggccttccaagtgacattttcctatgtggttttaagcaaatgctccaacacaatatttgcactatgttgccttttatgattttgtaagctcccaggccaactcacagataaatctttgaaaataagggcagcttagccaaaaggtcaggggtttaaaaaccaaacaatgagcttaggcagagggagagcacaatcgctgcatcctcctgctttggctggcagagggacagactccagtggccattgctgtggacttcctctttgtgggggtctcgacagaggcgcctgatggcccagcccgtggtcaggccccagtgttaccaagacagtggtgagcgcctggacctcacactgtccagcacctgtactccctggcatggtgtggatgctaaggtccccgcccaaacctctgtacttggccgggcgcagtggctcacgccagcaatcccagcactttgggaggccaaggcgggtggatcacgaagtcaggagatggagaccatcctggctaacatggtgaaatcctgtctctactaaaaatacaaaaaaattagcgcctgtagtcccagctattcgggaggctgaggcaggaaaatggcgagaacctgggaggcggagcttgcagtgagccaagatcgcgccactgccctcgagcctgggtgacagagcgagactccatctcaacaaataaaaaaaataaaaaaataaaaaaacctgtgtacttaactggtgaatcgtgtcttccagaggacaaatctggcctactccagcctattctagttggatggaacacctcacctcacacccgacagcccattcgacctcgttcattccccgtggagacccatcagtaacagccctgcccttcattcagccgctattcccattttacagacgactcaatcgaggcacagagacgctaagcacactcgcccaaatgtgaagtagcagggccaacattcaatcctatctactggcttccagcaaagggatcactggcgtttcctttgatgccaagatttctaagctctgatgtttgtgagctgcagccccctgacaagagtatcaggctccggttgaacagagaagtccaaagcagggcgagaacggacgaataatcacagagtcccgctgccagccaccggctcagaagccttgaattctcctagctgggcgggcccgggagggggttcctcagcctcccgcttccctcaacaccctgcgacccccgccccagcctgcccaggtttcctgctcccagcacagcaggtgcagccagccatgtgcacaaaggccaggctggttccctgggctgcactcgagcagctcctcccagccctgcacacatggggcagcagctctacccaacctctcccaggggttctggggaggagggagcaggggagggggcggggagggcccagagaagggacagtagtgccctgggggcccctgggcaacccagacatggaggggggggcaagcttgtgcctggccacctatgccagtgccaccaggtgctgggggggacacggaaaggacaggaatcttgccctcacctggctcccgagccaggggccggggcaccctgtgaggacactcagagggagggagtgtgcaaagcctgcagggcctgggaggatgcgtgctggggctgcctctcccaaatcctgctggggcgcaggctctcagggtggcttctgatgacaaatccaggcagtaataaggggcccagggcatcacatcccatagcgtcatgagaccagcccagggtgccagatgcagggccctgagtggggagggtgctgctctgggcacctgctttctgccctccctcattcacccctccccagactttgatgaaaccatctgtggctcccggcctctgcaggacccagcccctcagctcctcagcccctgcaggtgtccctcggtactgcctcacgccatcctgccccaggtgataactatgccctgagcccccaccatttccactgggcacatcccagaaatacgcattcacagaccaggcacgcccatgactgcggccagattttaaaaggaatcaccagaaatgtaatctccagtggtcctagagccccctgggcacccagcttctggcaccctgtggacacccaggagtgggggtcggcccaaccagctgcgcagccgcccagccctgccagcggggagcttcctccctccctgccctccggatacaccctcaccccaactgagcgagcccagggttgggggaggtgcatagttcccttcctagccggtgcgagaaattgcggagaacagggaagagggtggcaggaagggtctggtgcacgatacccgccgcgcccgctcggaatcctggttccctggagcgctcaccccagcccgccctgccccggggagcgcgagggggcgacccgccaggctgcacccgggcggggcggggatggcggcgggggctgcctccctcctccgccgccaccccccactgctgggcgcgccgcgcggccgccggctccgtggagacgcgcagagccgggagggcgcgggcgcggcgggaggtgtgcggggctggggtgcgcggagagcgcgagggaggagattctgagcgagggaggggagcgcgcccgggcagcagtgcgtgcgctcctcccggcgccacaagctcgccccgcgcagcccgagccgggctgggcgctgtcctcgggggcctggggaaccgcgcggtttggagatcggaggcacctggaacccgtggcaagcgccgagccgggagacagcccgaggaaccacgggttctggagctaggagccggaagctgggagtccggaggagagcggagcccggagcccggagcccggggcggcgcgtctgggtctggcgcttcccgactggacggcgcgcccgctggtcttcgccacgcgccctcccctgggctcccgttcatcggtccccgcctgagacgcgcccactcctgcccggacttccagccccggaggcgccggacagagccgcggactccagcgcccaccatgcgcctcaacagctccgcgccgggaaccccgggcacgccggccgccgaccccttccagcgggcgcaggccggactggaggaggcgctgctggccccgggcttcggcaacgcttcgggcaacgcgtcggagcgcgtcctggcggcacccagcagcgagctggacgtgaacaccgacatctactccaaggtgctggtgaccgccgtgtacctggcgctcttcgtggtgggcacggtgggcaacacggtgacggcgttcacgctggcgcggaagaagtcgctgcagagcctgcagagcacggtgcattaccacctgggcagcctggcgctgtccgacctgctcaccctgctgctggccatgcccgtggagctgtacaacttcatctgggtgcaccacccctgggccttcggcgacgccggctgccgcggctactacttcctgcgcgacgcctgcacctacgccacggccctcaacgtggccagcctgagtgtggagcgctacctggccatctgccaccccttcaaggccaagaccctcatgtcccgaagccgcaccaagaagttcatcagcgccatctggctcgcctcggccctgctggcggtgcctatgctgttcaccatgggcgagca

SEQ ID NO: 8917 - DNA, 6000 bp, Homo sapiens
ttctatataaaaggcccgtattgctccttaagagatccaactgaccctagtttttaagacagtagaaaacaggagtcagttattttggagatatgttaaatcaaatgacaaatgttgatgcattctttaacattcttaatttttcaaaacctgctctttaatctcaaaatttttcaaaatatcactaacaatttcctgtaggctagatcttggcttggttatatgatcaatgcataaagaatttttaaaaagcagcttgagaataacaatctatattaaaaatcaatataaatccaaattacatatataaaataaaaatataatttatataaataaaaagttgaaataaagactaaataggcatattctgttgcacagtgaaaaataaaatttataaagttaatggctgggcgtggtggctcacacctgtaatctcagcactttgggaggtcaaggcaggtggtccatttgaggtcaagagtttgagaccagcctggctaacatggcgaaaacctgtctctactaaaaatacaaaaattagccaggtgcagtggcatgcgcctgtagtcccggctacatggaaggctgagctgagatcgcaccactgcactccagcctgggcaacagagcaagactccatcttgaaaagcaaaaaacaaacaaaacaaaaaacaaaaaaagttaacagtgacatttactgaagtcagccaatgaataaaaggactagagtagtattgtttttatatagcaaatcaaaagtaaaataaagtatgtctgtcatgctcctgaatttccttgggtccgaacttaagagaacccagataattataccactaggctctggaagtactagaaagccacagttgagagggacgctattcccttgtttatttatgtatttatttagagacagagtctcactctgtcacccaggctggtgtgccgtggcacaatctcggctcactgcaacctctgcctcccgggttcatgcgattctcgtgcctcagcctcccaagtagctagcattacaggtgtatgccaccatgccacgctgatatttgtattttagtagagatagggttaggccatgttggccaggctgatcttgaactcctggcctctagtgatccgcctacctcggcctcccaaagtgctgggattactggcaggagccactgtgcccagcccattcccttgttttaaaacagacactcatgacttggaaatggatttacatactgaatgaacagtgacacactcctgttccctgaccccacgaagtggcaaagtaggactacaaggcccaatccagaggctctggtcatttatccagcttatgaatatttactgaatacttgtactgtgccaggtgttatgataggtgtttgggggaacaacattaattctaaaagggaaacacacaggtgacttcaatacccatctggttggcattaagatagaggtaagtaaagccaccctgaactcccagattgggtactcggagaacaggctgcggcccaacctgggggggttcagtgacttcctggagacaatggcagagttgagtcctaatgcgttagtcatctgtaaagaataagaagaaccttctaagcaggggaacaacatgagtcctgtggcacgaaacagcatgatgtggccagaaaccaaaaacaatctgctcctcctgaaacctaacttttgaagtagagtggtggagatgaggctggtgaacaatgcagggactcagtgtgggaaacccaggagtttgaacttgaatctccagtataaacaaattgtaggtggtagagtgccttggtcagacctgcatttaagacagatcaggggccaggctcggtggctcatgactgtaatcccaaatcaggctggcttctctgagacagatggagtcatggaaaccagttaagatgctactgcagctgtccaggtaaaagccatgagcctgaacatgatgcagtaccagggatagaaatggagggggtgtggacagcaaatttaagaactgtttttaagagctaaaatcagaaacattacatgatttattaataatcactccctttcttaatatcctttgatagctctactactgcctgcatacaacctatagccaataggactcgcagtgggtgggtggtggcagaggtggtaaaagagaggtgctgaagatgattttcagtcagaaggaaagagctgagagggcgatcagaggaagaaaagaactttttccactgctacaacctcccagaatcccttcctctgtctttcctagagctgaagaccttcaccacagtgaaataactagaaatcagcaacattcctttgtccttgggctagaacaggggtgagcaatctgctccacagcttgtttttataaccaaagttttgttggaacatggctgtagccatttgtttatgtatcatcatccatggctgcttcttgctaaaatgacagtgtagttgtgacagaaatcatatggctcacaaagcctaaaacatatactgtctggcactttatagaaaaagtttgccaactcctgagctagaaaattgatgggaaaggtttaagaaaagattcatcggaccccaaatctccacatccagagcccttggaaatccaacaaggctagtagacttaaaaaacaaatcagtcattcagatgaggccttggcgtagaactctttaacctaactgctactaaagccaaactgaaatgctcttaggaaaaggatgttttggtgatgagggaaagtaagggagatttagagcatcggcaccacttggtgggtttttagacagtcttgcttgtttgtttctggacagatggagaatggcttcactgataaattccattgcaatgtcactgggggctaaggctgcacttcctccccaaagcccaacattcttcattcaactggactcattcttgcttcctgaaatgctcagagtgacaatgtggagaatgaaaccctgatgactgggctctgtgacaactcataggaaaatcggggggtggaatattttatgggaaatggcccaacaccagcagtaggaagcaaacagaaggtgagaacagactagacctatgtatggcagtggcaattaataaatacaacagttataccataatacatttatttcatttgtcttataacgcataattatttcttcttttttcaattcaggtagtttgagctgtttcctggtttagagtcttatcagtcaaacctaacacactttctcgttttatgactgctgtattagggttctccagagaaaaagaaccaataggatacacctccctcttgaaagattcatcagaagctatttgctctgtgattatggaggctgaggagtcccatcatctgccctctgcaagctggagacccaggaaagctggtgttgcagatcaaagggctgagagcagagagctgatggtgtagataccagtccaagtctgaaggtctgagaaccaggagtgctgagggcacaagattcatagcccagctcaagattgaattcaaagagtgaattcaatcttcctctgccactttgttctatttaggccctgaatggattggatgatgctcacccaactggacccatatctactttactccgttcaccaattcaaaatgctaacctctttcagaaacacccacacagacactccaataaaatatttaactagatatgtaggaatcctgtatcttagtcaagttgacatgaaattaaccatcacaactacataataaaaaccagtgataatcagcatatcagtaattatgcaaaatagttagattcaccttaccatagacaacaacctattgatggctactgcccgctgctgggcttctatatgaggcatttcattctgaattacttggtctgtgattccatgagggaactggtgacataattctataatcctagaaacaaaggtattaatgttatccttcatggttacctgtttcaagagacagtgggggtaaaaatacaagtagaatagtttgaaactgtgcctttttcacatttggcagacaatctgggtttctgtgatggttttggatcaaagcatgttagaaattgaagaagatgatttctaaatacatgtttacagtattattgttatttaagaatatttcttttcctcactaataagaactttaaattagagcaaaagtctaatgaaatcacagaaaaaatattaaagctgagacttcagttttctcgggtgtaataagcatgacaaagttaagccataaatctgcaagcaggaggcaaatgcagatgtttctggtaggaagccaaaatttgttatgacaattcaccataatggggcctgtttttggaattatacctaccaaacaaaaaaagtcaaaatcttcacctagtcgacatcaacaaatgtattattcctaacagtctgagaaagttgagtcttttaaaactacgtgaaaatctaagagtggcagtgcctcggtaaaatataaaactgggccgggcgcggtggctcacgcctgtaatcccagcactttgggaggccgaggcgggcggatcacgaggtcaggagatcgagaccatcccagacaacatggtgaaaccccgtctctactaaaacataaaaaattagctgggcgtggtggcgcgagcctgtagtcccagctactcgggaggctaaggcaggggaatcgcttgaacccgggaggcggagattgcagtgaaccgagatcgcgccactgcactccagcctggcgacagagcgagactctgtctcacaaacaaacaaataaaaataaaagtggcagaggctttgggtgtcctaaaagtcttgagttcaatactgcactgaaaccacctggcttaatgttacttcgtaatcaccaactgcgccctaactccgcctaaacgttttgtcatagacgttcccttagtgacaagagcgatcctggatcagaacatgtattcacaagtgttctacagggaaagaaagccgagggctcctctcaaagcactgatcgcgtcaaagtaggaaggcagcacgtcatcacaacttccccaaaagtatcagggcaaagccagccagctacacaaagttgcaagctgtcaaacccattttgaacttcttgagttctgctctcccaggatgggaaggaacaagtgggtccagaaccccgcaatcgtttttcccgcgtgctcacctaacccgctccggccactcccaagggatcccggagaaggggtccagctgcccaaatgactgggcgcctgatggagtgccaagccggagcctcactggtttacctgttttctatttcgaccggatccgcgtcaggcggctgcaccttcaccttcacctccgccatgagggcgcagttcctgacgcctggggggaaagatgcacggagcagcccggtagcaagccggggaacccggggaaccagtggaggatagcgctctgctgaggccgaggggccttcttcctcgtgtcgcagccggtccttccttgcctttcggcgggaggtggccaagctgcgcctgctccggcccacttacaggcgccgctacagcttcttattcttgttttccagaatgtcaatgcccatcggacgcacaagcctggttccttcattctgagttgggaaaccaacttttagcacttggcaactctgtgaaggaatattcttagatgcctatgggaaagcactgggaaaggaactccaggcgggtaccaggctccctgcggagcggcaggggccggtctagttgctaagaagctgagtctccaccaatcatctgcccagcacccagtgggcggggcgcggctcgccgcgtctgtggtaacccgggcggcggcgaaggaggaggcaagaggcggtgagaggctggcgactgggttgggcgcggcagagatgcattaggggtcccgatcccgggccccgcggttagaggaagaggagggcggctagaggaggggaagagctt

SEQ ID NO: 8918 - DNA, 6000 bp, Homo sapiens
tctgagaaaacatcagcatccttgcagcagctcaaggggctacaagacctgcccctggaacgcactccccatgcccccgcctgagctccggccgcgtgagcctcctcgttgtccctggaacacgaacgtgctccatcccttgcccttcactcctgctgttctccttcctggaactctgcttcctccaatatccacctccctttcttccccctttgctcgtgtgtctcctcagtggagactccctgaccaccctttcaaaattggaacctgggctgtgggtcctccaggaagcagacgccgagacagcgtgggaggtggagagatgtgttggggtgaggcctgtgaaggatcaggggtcaggggacaggggcagctgagctggggccccgcctggcacgcgtcccctccctcctgcactctcccacctcggctgtggccactgcaggtcctggaggctcacgctccttccctgagccctggccactggaccttctcaggctggggtggccacacttgtccatgcacagaaacgatcaggccagggggtgccgtggcacccaagagggccctgagtctcacacccaccccctcccacccctcctctcctggaaatagcagccccaccttctcctgctgatcagggccacttaccccgacagaaaggcggctcctcgtcttgtctgctggagctcaggagctcaaagtgcctgggagccatccacagctgtgtccccagtaagcaggtgtccctcagagatgagaagcttgagccctgcagagcccagagtttggaaagcacagattcccctgaggatgcttgggagggtgccaggcggggcccctcctgctccttccctggtccgaaggcctgtggtcttcttgttggagacgtgacgccatggaaaggactctgctctgtcatccgtgtctgcagggcagagtcagccttggaggtgagtgccccaggctggtgtgcctctggaggctgctcctgggtggtgtggcagcccagaccctggtgggcccatggccgggggccatgccggctctgccttcatgggaagagggtcccctggccagatgccacactgtgtaggaatctctgcctgtggatctgaggtccataggcccctggattgcagcgtaggctcaacaggcaagacaggccgacgcacacccggagcaggtctgtggtccatgagggctaggggaaggggacccatggagccatctcaccagcagctatttgctgtcctcagagaatgtccccttcttggggctgggtgttgaacgcttgctggcggtcagacattcagaggcagcagcagcaggtgggccttgggaggtgggggtcggtgccctttggcccacacgtagcctccagggtggccactgcactcggtggggccgtgctgcactcactgcattcacctcaaacatcccagttcgagggtggccgatgacagaggcttgctaatgtcacgtcttcagggtgaatggctccttgtgggtgtttgcttgtgatacgaaaccaacaagctaggcccccagtcacgtggccgtccacatggctctggcccagagctcctgtctccatctctagtccttttcctccccagcccggaccagcctgccgggacattggcctctgcccatgaatacagggatggtctcccctggcgactttcttttctcatcacaacatacacaacatagctgctccctgggacagggccccccagggctagacgggctacacagggaccagccacatgcaccctgcattgccgtggccacatcaagccccaccccagaggacagtggcctcctgtttgggcaaggacaggggcctctggcatggctgctggtcatgctggtgcgcttgctggcctcaggctgggctggacatgtggccatggagagggtgcgcctgcgtgacctcgggcgggggagctcaccagcactgcagggaggcaagtcctgcccaactttatggtcttgcaggggctggtgaggtcaggtaccaagcactcccaccgagtctggctgagtctagggggcgttcacggccgccagccactgtcatcatcagacctcggggacaagccaggccctctcctctctaggtagcctccatttacagcagcttagagaagtttggtaactcagccggggtcacacagttgggtccccactgccaggggccaaaccccggggcctccttctgacttcccgcaagcgtgccctgaggtgacccacaggcgtgtgatggatatgtgtcaccactgtggtgacaggctgcagaagtgggtcccctggccgatgccacgctgtgtgggattccccgcctgtgggtccagattccatgggcccctggatcttggtgcaggttccgcagggtttcagaacagctgtggggcaggtgtgggctcagctgtccctcctgaggctctggggcagagagaacaccaggaaagctccctctgtctgggtcgtctggctcaggccagcactgcccaggctctccggggctggtcagttcacggggaagcctgggcagctgtggatgacaggggaggaggggtggggagggagaatggctgggcgggcctccagaccccttcatccttggttctgcttgggattccaatttatattccccattccaagatggggacactgaggctccagccagtgaaggagagagccagggccccctcttaacccccacccaatgccatctcctgcagcctcagtgggtatttggggaggagaagggcctggggaggagtcctctcaacaaggagttctggtttgggtggggacagtgagtcaagagctgcagcaggcatgggtggcagctctgatggccccacagccccttgctgcccagctccatggaacttttccccttgaaaacttttccctggtccaggcagagtccctccacactgggtgagttggggtggggtgcagggaacgtgggggagcctgtatgaggagtagggtttgcaggtggagtgggatgagtacaaccaagcagtcagagagggaagccgaacccctcccccaagagcagactcctagaagccgtgaaatagtgggctgactggggccacgggtctgggggttcctttctgcagtcagccctgaggtggcagcagaggaatcccagctcctccttccccaaagtttctgaagcgccacggggggcgaggggaaggggcaggtccccacagtatggggaagctgctataagtaggggagtgacggtgcatgtcagcgcccggggtcccctctgcagcccctcccccagacacgcgcactctggcctctttgaggcaccagggatgccttcggctgcttccttctcctgtgagcggagttgctgcttccttctcctggggcgcggctccctccctgcctgctgtctgatgtgtgtctcgctcttggtgggtcctcagcctggcgctggtggctgcttccctggcctgtgggtgtctgtgtatctgagtgtgggcatgtctgtctgtctgccctcagtgtttcaggaggaatctgtccttgacccggtgtatctgagcgcatgtgtctggtggtgggggcgctccctcctgccacctctcctctcctcccccgtcccctcccacaggcgctaacacagccaccacctgcgccctgagcgcagtgacctcgtctgtccgctgcagtggcgactgcccctctgtccacaggggtccgtggctgggctccgagcggcttgctgctccctcctcagcctgaggccgccggagcccaggctagacgcgctcccctccggctgggtccgcccggcgcctcatcttcccttatgtaactccacatctgcctgcgccttgcgggtcaccctggaccctgcactgggccctgtccacacggaggctggcacccagggtccgtgcaaacgggaggtggagcggacccctggtctgggcaccggctttccaagaccccctcctccccatcccttctcctccagacgttccttgccccggagacccacattcccaaaacatgcaccgaggaaatgccccgcagggcaagtccccggagcgcgggtgcaggcgtttcccccacccccaccccgggtccccacaggcgccagggctctccatgatgaccgggcaggggtcaccagggccgagggcacgggaaaggccgagcaacccagaccccggctccgagtgcgcgggctgactgaccgcaggcgagcccccagacccggtcaagccccggccgggctcccagccagctgctgtgagcgcaggggctgggctccaggcagcctggcgggcacgcggcgctgtccgtggtgctgccggcgccgggcggggcgggggcggggagggggcggggcgagggcggcagccaatggcgggggcgctgcgcggggcgcgcggggcggtgggctgggcgcggggcgcactcggctgcgcgttgcgctccggctgcacggtcgcaccggcagcggctcaggctccggctcctctcccgctgcagcagccgcgctgccggccccactgggctcggatccggccccggccccctcggcaccgcctgctctggccccggccccggccccgcggaccatgcgctgggcgcccccaggggaacccgacccggccaagggcccgcaaagacgaggctcccgggccggggcccctcccggccgcccagctctcggccggcgccctgccccgcgtcccggagccgcgtgagcctgcggggccatggagcgcgcgccgcccgacgggccgctgaacgcttcgggggcgctggcgggcgaggcggcggcggcgggcggggcgcgcggcttctcggcagcctggaccgcggtgctggccgcgctcatggcgctgctcatcgtggccacggtgctgggcaacgcgctggtcatgctcgccttcgtggccgactcgagcctccgcacccagaacaacttcttcctgctcaacctcgccatctccgacttcctcgtcggtaaatccccagcccctggccgctggggacccaggggcgcccagcgtggccgggccagcggggactggaacacggacctgggtggctcccgcaggcacacgccccaccaggggacccggcctgggaagggggcgtccggagcccatggggtggggggcacaggcgaagttccttgccactcaggcctcgggacaggggctggggagagatgtccccgggaagggacacgggcactgggcgaggcgcaaggcgcaaaggcagcgggtgcagctctggctcctgcgctgtagccaaacaaaggctgctgcggacttaggacgcgcggagggcgcagtggggcggtttagagaaggtctgggggaggggacatggaagggggatttttagagctgtgttgggggaagggacggtggggaaggtgggggttgggggagacgctcggaggagcgtgctctcacgtgtccaggctctgctgccggctggggggcggggcacgcggagggggctggagcgccagacacctgttggggctgtgaggtgcgtctcccagacgctccaagcccgcttggcagtagtagtagcggctggcggctggcggctgcaaccaagtgccctttcagccaggagaaaggctttctccttgtctaagctgagaccgagggttgtccagcgccagggtaggggctggagtccagcgggggaggggagaaggaaattgtcttctttcctcctttgagggctgggagggctggacagaagtccagggaatcccgactccaggctctcgggggtcttgtggtggccagagttccccatgcctggatcatccctcctgcccccaggcccaggggacacagatagtgctgggagctatgtgggggtgaaggctggcggcagggcagagtttgtggctgacaccaggtggaggggtggtaagatgaggatggctagttccagaaaagcagccaccatgtgacccca

SEQ ID NO: 8919 - DNA, 6000 bp, Homo sapiens
gccggcggtcgccgggcccgccccgcccgccgcgccccgccccgcgctcggccggctccgcaccccacccgccccgcccgcgcgtcggcccccacagtcgcctgggggtggcccggagagtcgaggtgctcatagtggagccctggctcccgggcggacggagccgcacggtagtagatgggggtgtggccgtggcccccgactctgctcggcggggccgttcctgctttgccatccgtgtgggacttccacgacagtggaggcacgagagctgggccccatatgctgcttgcccagcttgggaaagaggaggctgctgcaaaggaccgatcggcgggtacgccagcccggcccacccctcgcctccgtgagccgcgtctgtaaaactgggttaagagccgcctgtctgtgctgtggggggttcccaaggaagggggagattcctgtgctgcggggctggggagaactgggggtgcgggttcttgcatccggagtcatgccgaatgtctcctgtggggcctggcagagtccctgctgacccgtgtgtcccaagatgtcctaaagcttaaggccacactgtcccctttgccacgaacgccctgtccctttggccgactcttctcatcctttatgactcggtacagacgtgggttaggcttctcatcgcagcatgctttggccctgtgtcagggtggccctgaccctgctctggaagtgtctgcagagcatctgtgccccccgcccctcccctggcccggctgtgtgcagctcctgtcctccccagcacaagcactccacccggatagttcccagtgtcgggatctgttcataaaatgccttccagttgcacaggtcaggtgcacaccttacaccttcacagaactctgaggggtgcaaaggcagctggagattctacttgtattcctcattcaacggacaagtatcagtatctgggtgcccctgtgggccaggcagtaggaccagaagccagcaacatagatcagcctggatcttatgctggggggcgcagagtgagttgtggggagcaggcagggaaggcctgggtgagaggggggagggctgaggaggggagggtattgcgctgctgagcgggggcgggggcccgaagggggaggtcagaggtcagagggccctggaggacagacaggctgcctctcgaagctgtacccagaaccctgtgactgccatgttgtcaggccaggcaaggaaaggcaggggccaggaagcccacagggacaagaggcaggctgctacttattcagcccacataacactcctgagcggtgggcacaggtgaggtcagggaagctcaacgaagatgggccagcacctggcccaggccacacacaaccaggctgaccccgctgagccggcctgttgtctctgctgtgggaaaatgcagctgtgggcagctggcagggggtgaaggtcagtgccctccctgccccctcgggtcactctacaaccccccagtcattcccccgtctcctctggccccttgggcctgctctccaccgccctggcttctgcctctcggcacacagcatcctgaagtccatgggtggggccaggtgagctgggcagttgatggcggagctgggatttgaacccaggaccctctgcgccctgacagccctcaatatattgggctttggaccacatgccttccttcccatagagctttctacaggcaggcgtccctccaggccccattccccagcctcctttgcacatccagcaccccctgcgccttttcatggggatcaaagggcccgagtgccggcctgaccctggtgcagtcactgaggtcactgtcttgctggccttctctgggtgctgggtctgctgtgcctgtctctgcccctcttccctcttgcctgtctgatgcagagtgacccatcccctttggagcacttgctgctgtggggtactgcaccaagacccttattttaaagataaagaaatggagtctcagagaaatggtgaaataatatgtgattctcccagtagatgaactcattctaggcactcagtcaatccccaagacacagaatcctggggtccaggctgcagggagtttggccagacgacaccagggctggctgtcatcacatgtcacaagcacatcagggtgtgagtggctgccactcctggacagactgcctcccttccctgtctgtctgcccctgctcaagccccttctccctggcctccttcctctctacccttcccttcctgaaacccctcctgccatctctctgtcccctccttgtcagctgacttctgagctctgtatacagtctgggcttgggtcaaggccaagggcagcaacagcccagaaagagtaaagtgctcggtgcacggggagaagggctggctgaggggcgagtgcgcagggctccaccccctggccggggctggggagaaacactggctgccatggagcaggatcccttctggaccccagttctgacctctgcccctccttccagtcagctggagccccctagcaggaggagcggtttgtctgagttcctgcggtcccgcttctgtgcagcctgctgggcagggggctgggagggaggaaaaggaagcgggggcctagggaagccccagcgtctgcaaagagctcacgtcggggagaaaagtaaggtctgcccagaaacctcggggcttttcagagtccagggattttgtaggtcgtgggcctgtttgtcagaatgggacaggggtggcttccttttgtactgcatgcgtgagtgtgtgtggggtgtgtgtgtgtgggggggtgggtgtgggggtgtggcatggggcattaaaggggtcacaggaggctattcaggatggaaaggaaggccagagggtgggatttttgtctgggggccgcaggggttccccttgcccagtctcttggtcctcttgggcacagctgctgcttcttcaaaggccagcttaggtcacttccgctgcccacagcactgccctctccctggccccctggtgggatgactcgcactcgagaccactgcagcctgaggctacccttacatctgggggtgacttctgctgaaacaggctctttctccgtcctccccaagactgggggcctcccatagacccacagaacgccaggttgccagtggggggcagatcgggattaggggtaggcgtgtccctgacctgttactttcacacccacccacttgcgtctccccacttttttgggagaggccccactctctgtaccctgatgtctgtgaggtgcatgggagaggcagcgtccatactccccgcttccctcggggtcctggggagtggcagcaaaaagaccagcgagccttcggagaattataactttatgtgggaggctggggcgcgtcgcacactctcagtcgccgtcaccgcgggaagatggtgccatccacgttctcctccaggatggtctccacgcgcctccgctgccggggagagaggctggggtccggcgtgtgcggaggcgggcagggcccctcccctttccccgcccctaccggggcttgtctgcacctcttggcggtccagggggtccgggatccgcgcgggcttcagctgcggcggcaggaacagctccagccggatggcggcgcgcgcggacttctgccgctggatgagcagcgcgatctcctcggcctgcggggcccgggtagctgagcgcgcgccgagccccgccccgccccgccccggccggctccgctcaacgctcccggtgcgccccctctgccctccgaccccctcgcctcacccgcatgcgggtgtagcgcagccgcagggcgcggactcgcccgcgggcctccgctgccttgaggacgccgaggagccggttctggcgctcggcgggcagctcgagcgactgcgtccacgggcgcgggtcgggcatgcggtaccccggttccaccgacccgcacgggaaggtggaggccgccgcgcccacgtcctccagcaggtcgccgaagagcagatggcggtggcgctgcgcagggagcatggccgccagtccctgcggcgtcagggcccagcccggcttggggggctctgtcgcgggcgcccccttggcacgctcctcaccctgcgccgtgcctggcgcgctcttcccgcttcgctcccgcgggcccttgcgcccgccctccttcgctggcggcggcatcctcccgccctgcggagggaggagggcgtcccgtcggtgccggggctggcaccgggccctgcccgcccctcggcagggccccaacgtgcgccccagctcccgcccgctgggctctccgcagtcggttttgagttccgcacccccagcctctgagctttgcccaggcgctctccctctcccaagcgcacgtccccagcagctctgccatcggctgatcctgctcagtcctgcagtcaactaggactttctgatcaactcagttgtaggaaatatctttcctacccgatggactgttctgtttgaattgagaaaatgctgagaccccactgggttgatctcaggccctgccacatggagagctctaggtgacgcctgggggaccttcgttgtgcccctatgtctgcggtccccgacagtcagggtctcccaccagacagctcgctcttgcccttcgaggcctagatggttgtggggagcagagcctagagggcaggtgacagaggagggagggtccaaaagcccagctggctcctcccttcccggccccagcctacagctgccaccttgtccagccagggctgggctcgctgtgccagaggcagagccacggccagccccagcggcggctaacgcccccgcccctccttagctcctgcagccgaggcccagcccccacctcttggtccctacaccccctgcttgctgccttctctggtcggaagaacctccgccgtagcccagactctttgggcttgttgacgcggttgcccagcaaccgggagtcctgcccctccctcgaccaggtggggcgggtcgtggcggggggcagggtcccctccggagggccctgggttagagtctgggcgtggacgcgcccctcataggggtcattggggcatagaggcatagagccggcttctccagcttgggtgagcgtcctttccaggcggccgcagacgcgccatcctaggggttgtgggcccaggttcctggcttgaggggtctttggggttagttttgtgggtggggccctcggctatgaggagacctttgtggttaaggcccattcccttctgatggccagggggctctggccccagccactggtgttcacagaaagggataatggggcagaactcaggacccctcacctcttctagggcaagtttggggtctcaggggtcctggtgtccccaggactagagctgggttttgctgaacactgtgtcttgggatcttgggtcctagatactagattttggaaatctatttgtgcattcctttgttttgtaactaattctcaattaactacttaatcattttataatttcttcaggcactcataagtgtgttctagaatttcctaattcacgtgcttattccacagtttaaattaggcaaaaattagtgcaaaaagtccaatctgttacgtatctattacttccacgagatgtctgtactctctctatattcacagacctgccgctgggacaccttgctgggagtttggaacctgtgagtttgggagtagggctgtcccagctgaggagcagggtcttagctgagcttctggccttttggcaggaggctgttgggtgttcccattgtttttgggagactgccctggcctctcagtaagagggtaaattttgacattcagccctatgtcccagagccggcaccccatcccacagctaggcccatccttccagccctcaagcttttgctgctccccaggaaggcccttcctggtgctgttccctcccctcctgcaggtgcctttggggtcctgcctg

SEQ ID NO: 8920 - DNA, 6000 bp, Homo sapiens
tttaaggaccacaatggtggctattttaactggcaaagtaaagaagtgtctctttgaggatgtggcattagagctagactggaagacttaagaagatactagcttgacagaaatccagggaagtgagtcccaggcaaaggggaagagcagattcaaaggtcctgaggtgagagagagcttggcaggttccccaagtattcagagcataggacagagaggagatgatatcagagggataagcaggggctgtttcctataggggtttggaggtcagggttaggaatatggaagccactggaaggtttttaacaggggagtgacatgatataaatccatattcaaaagattactaagtgctttgagtagaagagactactgggggcaagagtagaaactgaaagaccagtgagagaccccagtgtttcagtgagaaatgatggttgtttggatttagatggtggcagtgggtccatctgtttgtctaccgctttgttcttccctcctttcttccattcttctatctcttcatccatccattcatccatccacccatccatccacccacccatccatccacccacccatccatccacccaccaacccatccacccattcatccacccacccatccatccatgcatgcatccatccatccatccatccatccatccatccatccatccaccctcccatccacccacccacccatccatccatccatccatccacccacccacccatccatccatccattaactaaacactcagagccaggggctgtgctgggtgtgtctatggggagtcaggtacaatgctgagataacaagaatgaaatacacatggttcccagcctaaggggcttacaaaacagcagggtacacaaaattgcaatgtaatgttatgaatgctccagttaaggaatgcatgaagcaccgagagagctcatgggaggtaattccctatgctctgtcctggaggagatactgatgtttgagttgggcctttcgaaggacacgggagttggacaggcagcagaagagtgttcctggcaggggcacacagcttgagtaaaaagcaaggaggcagcatgagtgagcatggccggttctggaaatgtacagatgtctaggttggttgaatcaacagatgcgagtggggacgctgtgggagaggagtttgggtcaacttgggaagacgtggagcagcatatgcccatgactgggcctgccccttccgctcagctctgcctgcccctatcagagctgaataattgaattaagtaccagctcttaaacaagatgcagctgtttagcagatgttgcttccaccccagatggaggtgcatcttggcgacgggcacaacatttcgaaggcgtctaatttgtgaggctgtggagaggaaagaacttcaagatgctggcattattatttaataaccatcattaattacacactccctccctccagcaccactgcatgtcaaacattcctgccggattgggactgggggcacagaggcgggctggcaggtgggcttgggggttggacttgctggttctgattcagaaaaacaaaagaagaaaagggaataaagtcatcaatccacaaagccttcaagaacttttataataatggaaaatgacttctcttgcatttttcataaaatgagtacaaataataactgctattgattgaacccccactcagagccaggggctgtgctgggtgtgtcttagacattgcctccaattccctaatcctcccaacagccacgcatggccctacctcagggcctttgcccttgatgtctcctccgactgggaaggttcttccttcagacacccacatggctaactcccctacatctttcaaagctccacttaaatgtcagctccccagagaggccttccctgaccaccactccctgaaataatgtcctccacattcttgacctccttcccttgctttttctttcatcacctgatatacgtatatttgttaattgtctatttctcccttttagattttaagctcccaagggcaaggatttttgtttcattcactgtggcctccccagcactcaaaacaatgcttgacacaggacagagttcttttttcttttttgagatggagtctggctcacttgcccaggctgaagtgcagtggcacgatcttggctcactataacctctgtctcctgggttcaagcgattctcctgtcacagcctctggaatagctgggattacaagtgcacgccaccatgtccagctatttttttttcttttttgggggggtatttttagtagagatgtgatttcatcatattggccgggctggtatccaactcctgacctcagtgacccgcctgcatcggcctcctgaagtgctgggattacaggcatgagccaccgtgcctggcccagagttctataaatatttgttcaatgggtgggtgattcatcagtgggtctcattaaaaaatgtgcagaagagtgttagggagataaaatctctttcccaggcattacacagccagcaaagagcaagctgagatttgaattcagctctgtctaattctaaagctctgctcttttcattaaggactttgtttttcttctccaaagaacttattaccacttacatattattattattatttttgagacgaagtcttgctctgttgcccaggctggagtgcagtggcatgatctcggctcactgcaacctccgcctcccaggttcaagtgattatcatgcctcagcctcccgagtagctgggattacaggcatgtgccaccacgcccttgtatttttagtagagatggggtttcaccatgttggttaggctggtctcgaactcctgacctcaggtgatccaacacccccccccccacccctcggcctcccgaagtgtcaggattacaggcgtgagccaccacgcccagcccacttacttattatttatctattcatgtgtttaatgtctgtccttcccactacaatggcagctccactgagggcagagttcatctgttctgttcacagctgaatccccagccccaaaacagtacctggcacccaggaaatgctttataaatatacgctgaatgaaggaaagaaggtctgggatatgggaggctggaggtgttcacacccttgctgggtctctgactgggtgagacggtggggagctccaagatgttttccacttccccaacccctcccacatacagacttcttattcactcttggaagcaatgctgcaagggaagtattatccaaaccattttacagatggggaaattgaggctcaatcagagaaatgatttgcctttctcaaggtcacccagctagtaagtgtcagagctgggatttaaacctaggtctccagagttcacttgtcatgcaaaagggacccttaatgcttgctagctctgcccacccaaaggcaatagctagaaggtccagaaggtccagtcacaatctatgcatttccccatcaaggtcaggggtgtcaggaccaatgtgaaactcatgcttaattcacaactcccagctttgtccatttaaatgaaaactttcatgttattttaaccaaaatcccctgtcgacttcaatgaaagctttgaatccatgaggaaggtcagaaagggttttttggaggtagcacaggcgcccagtggaaatcatattagcatattcattatcatcagggccctttgaatgtgtttttgagctgttcccttcaagtgactggagacaatggctcctttctgttcacaaattcctgggcttgaagtgggctgtggccagctcctgtgtgcttctctgcactttccaaatggtcacagggaacccgtgtcgcataaggtaacagggaggatgtcatccaccaggagtgctggtggtgaatgaggctctttgtctgggtttggaagaaatatctcctcaagtcacttaggcagctatggtggaccccaaagatgggctcaggtaacaaaatatgttgttaaactgtcttctaaggaggctggaccctattaacaggagatccctgagtgtggcagagtcagggctgggtctggggtaacaaggtagttgctcaactctagaaagtgccaggatcacccagggagcatttagcaaccatcagtgcccagcaccacctcaccaggccatctggacccaaatcttggcgagtaggggagtaaacaggcatcaaaggtttgtaagtgtccccagatgcagacaggcagctagtaagcagagcagaatggctctctcctcgaatcagaggggaggagaaaagagaagttgtgggtggggtatggtggggagggagggctacaggaaatcctctgggcatgtgtcgggaaaagagaacttcaggggaaaaacactcttttttttttttctctctctaaagaaaattctcaaactacaggaagtggagagaacagtacagtgaccctacacgcttgttaccagcctcacctgtcacccacatggagtccttcccatttgtggggtttccaggtgtgtgcctgtcccagggaggccacgtgcccctgctgccccagaaccttccttctgtaaagcccacgctgctctccagtgattctgacagtagatccttggtgggaacacagagctccagctctcagcccgggacaagctttgacaggagagccagctactgggacacaagtccttttgtgtgaagggaaaaaaaaaaatagttctaattaaaaagaaatccccacctatttggactaattcctccatgactagcttctccttagttctcctgttttcggacagggcctgaggccgatttcccctgaataggatcaaagaagtgaggggactagcctagggcctggaacacccagagggtggctgctgggggcgtgagaactgggtaggggtgcctccaggaagtcctcttatgtgtgcttctttgttcatttgacaaggatttgctgagcacctactatgcatcagacgctgtgttctaggcaagggggatacacctgatggaagaaggtccttccctagacgtagctaacatcccagtgtgggagatgacacgaaacagtaagtaaaatctaccgcgtgtcaatagatggtgttaaatgctacagagaaagttaaagcagggaaggagacgggggagggactgctggagtgggtggtaatttttaatgaggtacccagggaaggcatctctgcagacccacacaagtgagatagggagccgtgctggaggggcaccccaggcagagggcacagcagatgcaaaggcccatgggtgggagttctccttccaggagtggtgatcaccttgagtggctggaatagaggaagggctggggagagctctgggaggtgaggtcagggaggcaggtctgtaggggaaactgaggaggtcagactgtgtgacttaggaggcctttgtttttcctctgagtgagaagggcagtgatgggtgggttttgagcaagaggactacaagctccagcctaggttttaacaggacatctctggctgctgagttcagaacaagttgtagaaggcaggccagaggcaagaggaggctgttgtgtcaccccaggtgacagacgatagtgggtcagactagggtgatcatggagggcacggatacgtttagaaggaagagccaatagaatttgtggactgcaagaatgttggaatatgactcaggacagccagggctgactccaaggtatttgacctaagcagctcgaattatagagttggcatttcctgatatgaaaatcctgcagaaggggtgggttttggaggcacaatcaggagttccattttggacaggtgagatttgacatgcctgtgtaacacggacggagctgtggagttagtagctgggcatgaggctggagtgcaggggagacgcctggcccggagtcaccccagatggtgagtgagatcacttaggatatgattgtagatggtgagac

SEQ ID NO: 8921 - DNA, 6000 bp, Homo sapiens
tttctttaatgtcatgcaacatacccttctaacaaacctgcccatgcatcccctgaatctaaaataaaattgaaaaaataaaaatattgggaacgtttcctgtgatggatgcatctagagccagcaggggtggagtgaaggagagaggggttaattctctcttaggggcctgggaggctcaggaagtcttcatggaggagggaccatgagcagagcctgaaacattctagggagaggaaaggatgtggcaggagcaggggtgtggcagctctttaaggactggggctagtgaggccgcagctggagtgccagcaggtgaggaactggtgtgtccagtgtgggagattctttggttttaagatctgggctatgccggaagtagtgtggcacagtggttagggcacaagggatttgcgtttgcaagctcttgtccatagagcttgtgcccctaaccactgtgccacaccgcttcccagcacagcctagatttttttttttttaaacggagttttactcttgttgtccgggctggagtgccttttttttgtttgtttgtttttgtttttgtttttgtttttttttttggagagggagttcttctctgtcgcccaggctggagtgcagtggtgccatcttggctcactgcaacctctgtctcccgggttcaggcgattctcctgcctcagcctcctgagtagctgggattataggcatgcaacaccatgcccagctaattttttgtatttttagtagagatggggtttcaccatgttggccaggctggtcttgaactccttcctgacctcaagtgatccgcccaccttggcctcccaaagtgctgggattacacatgtgagccattccacccggcctctgagcctagattttaataccagagaatctcccatgctggacacaccagcgcacacctgcttgcactctggctctagtcttgctagtcccagtctctgagtcctgcctttctgaacttcagtttactcatcagtattcgataggggatagactacctcctgcatagggttgttgtgacagttaagtgaaggaagcctagcacagtccctaggatattgtgagttctctctctctctttttttttttttgagacagagtttcgctcttgttgcccaggctggagtgcaatggcgcagtctcagctcactgcaacctccgcctcctaggttcaagcaattgtcatgcctcagcctcccaagtagctgggattacaggcacccaccaccatgcccggctaatttttgtatttttagtagagacggagtttcaccgtgttggccaggatggtctcgaactcctgacttcaggtgatccgcccacctcgacctcccaaagtgctgggattacaggcgtgagccactgcgcccggcctgtgagttctcaatcaaaggacattgtttgttagtaatttgcacccagtcatcttggttaaaaatgtttagatacacaaatactccccacagtgttgccattgcctatagtcgtcaggacagtaacatgccgaacagtttgtagcctgggagcaacaggctatagcatatagcttaggtgcataggagactatactatctagggttgcataaatacattctctgatgtttacacaacaacgaaattgcctaacacatttctcataacctatccccatcattaagtgacacatgactgtatttgtatctacattacctggggcttgagaaacatctttgtaaaagagacttgactgcccagggcaacgaggagcagaagtggactaaactgggacaaaaggatgcccctaaatgtggccgtgtgtgtctccgtgggagagttgcgtaatttccatcatcaccatcccggcagttcctggaattcatcttttgatacctgggcagggaagcgggggaaggggctccacctgatgccttctccccacccccatggggaattcttggtgctttgcactgggggatggtgcctgtctggtgagcatggggacagacgggactgactggcagtactccaaacttctcactcgccaaaaggcccacgtctcacccttttcaggagcatctgcagtgatgttctcagagaagttggagacctcccaaatacccacccattctggtgtctctctgcatggagaaccagcagatggacagtgagaccccctctgccaaggacttggaatacggctctgctttaacagtttggggacacccccaccccatgaaattttctcagacttgggagaagaaagggaccagagagagggagagctaggacagcgctatatttgtgtagatggggaaactgaggctcagagatgtgaagggagtagctcagaattacatagttggtcagtttccaggcaggcttttctctccgtggttggtttactttctacactccttgaggtaactttccccacctacctgtgatctgccagccaaaaggtgttgccaggttcaccccaagtcctcgcccctcacctcagccagatgctcctagttctgtgcctttagagaaacacaaggctctcattgaacatttatccctccctctcttcacctagcaaaagagcatgtatgctgtctttgcctcaggcacttttcattgttgtggattcagtggtgaatatggtgggggttaatttggaagcggtggggggagtctggagtcacagcttttcaagtatttcttcactctttcctccaaaatacccgcatttctttgtctcttaaacatatctccaacctttagtaacttgcagtcccttgactcacaatgttttcccttcctccttcccatgtggaatcttgccatcagcttgaggcatggtggggagattctagtgataacttctggggccaagggatcccatatggctctggttttcaaggagactagcactatcttcagaggccacaggtcatggacgaggtgggcaggaactttccagaacacacctctctgagttgagggtgaagcttgcatggtttatttcccccttgtctcctgcatgttgtgaaatgttattcttacccttgggtggctgtaatagtgaaagggacgttttcttgtttgagtcagatctctttgggttgtaagtgaaagaaacttgcatggaagtggtagaacaacattgcgaccaatagctctggagcatgaaatctcagtttcaaccctcatagggagggacagattcaattctcgctttgtcccatgtccagaatttcaggacagggagtaattggttcaacttaggtcaagctcccttggccaccacgagccaaacagctgtggctggaggaatgaggtcatgggatacagaatcgttgcttctatagtaactgtgtaaatggtggggaaggttcctagagagggtccccagaaaagaggggagctgggtaggtaaaggttcattcaggatgctcatttgggagtgggtctggagacacagtgtctttgcccctaatgtgctcagtttggcctcattagcatctagtaggtttgatgatcctctttaggctcagactcttctctttcttacctcatacccccaaagggccacggcaaccacaaaagcggctgttttcacatgcgtccgtgtgaagagaccaccaaacaggctttgtgtgagcaataaagctttttaatcacctgggtgcaggcgggctgagtccgaaaacagagtcagcgaagggagataggggtggggccattttataggatttgggtgggtaaaggaaaattagtcaaagggggctgttctctggcgggcaggggcgggggtcacaaggtgctcagtaggggagcttctgagccaggagaaggaatttcacaacgttaatcgctcggttaaggtggggcaggaacaaatcacaatggtggaatgtcatcagttaaggcaggaattggccattttcacttcttttgtgattcttcacttgcttcgggccatctggacgtatatacgtgcaggtcacaggggatatgatggcttagcttgggctcagaggcctgacagctgtggcattgtggactttgtcttcgtggtgctcgtggtacgagagagtcagcctgaagtccagtccaggctttccttttccctgctgccttgtgttcaaggaggcaaggcagagcagaaagagctggcctctggtgttatactgagcccatttcaagtcctagctctgccattgctatatcagaacctgggcaaaacaggtaacctctttgagcctgattttcttatttatgaaactggaacatgagcaattaccttgcaagggttagggataatctttattgctgggtctgaaacttgactgtgcattagaatcacctggagggcttattgctgggacgcacccccagggtttttgattcagtggatctggagtgtggcctgatcaactgcagtttaagcaagttctaggtgatgctgctgctgctgctggtctggggaccacattttaagaaccactaatctacatttacaatatttctcgactgacatggtttgattgtgtctctacccaaatctcaccttgaattgtaataatccccacgtgtcaagggcagggccaggtggagatgattgaatcatggcgtggtttcccccacactgttctcgtggtagtgagtaagtcttacgagatttgatgattatataaatcggagttcccctacacaagttttcttgtctgctgccgggtaagatggcctttgctccaagttcactttctccatgattggaggcctcctcagccacgtggaaccgtgagtcaattaaacctctttcctttataaattacccagttttgggtatgtctttattagcagcatgaaaacagaccaatatatcaactgagggggattctgcagtaccttgcattcttccccacccctgccagaggacgtttggcaatgtctggagatatttttgattgtcttgattggttggggtgatattactgacatctggtggtagagaggctagggatgctaaatgttatgcaatgcacaggacagccctacagcagggaattatccaaaccaaagttaccaatccagcagtgctgaagttgacaaactctggcttacagcaagtctctggtcctagctttacttccaagctgtgatgccctagcaaagtcattgcactcttctaagcctcataattgtgcagaattagtcccaaaaaactttgcagctctaacatgcaacaactttagtcaaaggacgtttattaagtaccagcaatatccaaggcatggcggtgtttctatgcaaggcacttctcttttatggaattgtacactcggcaaacactttgaaaatgtggttgggttttatattgtaatgtgtaatgattgcttctacaaccttgcataaatagtactatgatttttttccttgtccttaatggaatttagaaaaataaagtcacagcatcatagctttttatttttgttgatatgtcataaatgaatgcactaatgagggtgtttggggcattagcttgctaattggtgatagtaactatggacatatgtgcaaaacaccataatcaaaattttcacacttggttaatggaagccaacattttatttgagaattataataacatatttattgcaattagtcctgatctacaatatattgttaatttacagtagttctcacagtgactagctgattgaggtagaaaatgtagaaggtcctgcagaaatggaccaggcaagagctttccttggctgaatatttggctgttgtccttgatttctaagctgctgttggagtgggggaacaagataaaaagcagagagatcagttagtagagagatgggggtggtttggaccgcagtggtggcagttgtgatgagaaaaggaatttgagaagtatttggaagaataatcattgggacatgaggattggtgggatatggagaagtttttggaatgtcatggaggggccattgg

SEQ ID NO: 8922 - DNA, 6000 bp, Homo sapiens
agggagggcctggaaggaagttttatagggtggagctggaaggggctacatgcagaaggaggtcattgtacccttgggttgtttgtgattagcatctcaggtgtcctttcccacctgaggtcctcctcaacctggggacccttcctcattgttgcttacttatcaggactccacagcttttgcccagagattctttctaccatttggggcacaaactgaactttctgcctctgaaaagagaggccacagcaaccaatgtcaaaaggaaggattcttaggttgacagtctcaaaatacaggctttagagtttcaactgagataataatgtatcaagaggaagggcagaagccaatgtttatgtcctaaacaataatatgccacacacatcaacaatatataaacataaataacatttaggaagggtgaatgatgatttaagaggcagtatatttcaatacaggaaaaataagaaactttaagattcatgttatagagcttaaaatgacatggttccacaggctaagtggataagggggatttagagagaaaaacaaggttgtcaattgaggggacatttcccctacccttcctctctcaaccaagacctggtggtgagggagagagcaacaccacttgatgagtttatggacatgatcacaagcgaccagcaaggccctggaggtttccttccctaccaatatggcggcaccagcaggcctgtgagctgctatctctgtggccccagagagacccagggggcatctgaaagtttcccaagcccttgaggaaagcaaggaagtaccataagggtgggtcagtctaagacaaggctgtggggggagggagagtgcatcaaccagagtccagtgggactcacacatcagctgctggagccagccgggaggaatgccgagggcagaaaacagattctccctccttcctgtctccagctaacattgctgtaggactttctccttagctaaaaatggggtccttgtcacacgaccatgaaaaattaggcttgcagacactttgaagggtgagacgggcagggtttactgggcgaaaaggaaaaaacgggaaacagggactctctgcaaagtcagagtcctgctatgggattcccgcctctcaggctgaatcccaggctccagcctggaacaggagaggacaggctcctccccctgccaagggcatgaacttcagtgactccaccccattctcccagtgtgcaggccagggtttctccggggaccccttcatacttggctgtgtcaacatgagcccttccaaacataggtgtcaccctggggtgggggtgagggaatctaaaatggtgagcttaaacctgaaatgaccaagaaaaaaatctagaaatgactccattgacttgattaaaatttccatctttgggtagaatgagagattgaagtcaagtgtagggaaaaaaatgtcagttttttacatatctgaatttgtgttttgaaaaatggtactttctacatgagcatctgaattaatgcagttgacgggactcgactctgccagtgatgagtactgtcctgtggctgagtcttagctcagtgtctttccatttcttcatcagtaaaagggggacgttcaccactctgcctgtgtttcaagacttattggaagggtcaggaaatgtggtccactcctgaaatcaaagcattttgggaggctgaggcaggaggatcatttgagactagaagtttgaggcctgcctggacaacatgtccaagacattctctgtacaaaaagaggacaaaaattagttgggcatggtggtgcggacctgtagttcctagctacttgggaggctgaggcaagaggactgcttgagcccaggagtttgaggctgcagtgagctataattgtactgctgcattccagcttgggcaacagagctagatactgtctctaaaaaatatatgataataaaaaagacttattgagaggcttgaacaaggtaacgtggtaaaatactctgaaaatataaagtgtcatagatgagcaacatggtgatgactaccgcagcaacaacaatgatgacaatgatgccatggtgagacatgtgcttaaaaaaccagggaggacacagtgcctgccttcaagatgcataacatttaaggaatgtgcagaagagctggaagagttaaacatattcttaaaaaagattcaggtgggcagatcatgaggtcaggagtttgagaccagactgacgaacatgctgaaacctcatctctactaaaaatacaaaacttagccaggtgtggtggcgcatgcctataatcccagctactcaggaggctgaggtggtagaatcgcttgaacccgggaagcggaggttgcagtgagccgagatcgcaccgctgcactccagcctgggtgacagagcaagactctgtcttaaaaaaaaaaaaaaaaaaaaaaagagttccagtaagctgtaaaaatacaaccacaacataaaaggaaaaacaaattatcatttgatagacaagttttgttagaatgacaacttgaaaacaattcagtaaccctttgaaatcacacaatgatggcatttggctttgacagctgtgtcaggatacgaaactcaccaagaatgtgaaaacgtggcctcatccccagagctcatgagctgctgcgtttgctggggactggggacatgggaaagagcaggccttgaggggtaactgcctcctgatggtgagagccgagtgctgtgacatcgggatcgtaggacattgaagcagaaggccagcatgcatgcctgtgctcacttaacaactggtatcttctgtgatttactatgtcaggcagtgggaacacaaaaataaagtgagttgggcctcagccttcaaaaaattagagttcaaattgaagactcatgaggattgggaggaactggaattctcctatgtggctgggagagtgagaagtgatactactacttgggaaaatgttgtggcagaacccataaagccaaacctatgcacaccctatgacctagtgattccctcctaggtacctacatggcagaaacgcatgcctagattcccccaaaagacttgcacaaggatagtcatcacagtatcacccattgtaattccacagtggaaaggaatctaacagccatctgcagtagactggggagtgcgttctggcagcctcacatactgaggtcatctaatgctgcagttcccagccagggggattttccctcaccctatcctgccttgatatttggcaacgtctggagatatttggggttgtcagggctacggggtgctactagcatctaatgggtcagggtcactaaacctcctccagtgcacaggagagcccctacaagcaggaaggatcccatccaaaatgccactcaacatgaatgaggtggagaatccggtcctgcagcagtgggaaggaaagagctacccacacacaaaccatatggataaattcaaacctaagactaagcctgtttgtggaagtaaagttttcttagaaagtcaatgtttgggaaagaaaggatcacctgctgactggctctggagagtttggtgataataccctgctgtgcgaccaaatgcaaatccctggccctctctgggcccatgtgcttaaatactgagcatcaaccttgcacaaacacctccacgggctctggaaaccacaactctgaaaacctctcccctcccaacctcagctttatcatctataaaatgggcacaccatactgcctcctccacagggttttgggagatgagatgatgtgtatgaaagggtaccaggaactgtgaaaaacactgcccagaattgaggagttcttttcattactcaagatcacacagtacagaggtggcaaaacgaatttcccaggagaaaacaccatcacccctaaaaaagcaacctttcctgggtgctctgaaagggaaccagaagtgataaaacagcttccaaacagaagcttaaaagagagagacagagagagagagaaagccactgcacatctaagctttgtgtatctaagctttgtgtattgagccaccgttcttgtttggaggggcaggtgagggtggggaaggagtgggagaatgagttgcaggggtgatgctgaaatgcactacctgtgtagggaggctgccagctctgctgtgtgctcaaatgagtgggccagaatcactccctttctgtcctggaaaaatgttggagagccctcagatacgtgaccatcgggcagctttctgtccccaggctggcccttcaggacatgagggtgagggaggtgggaggcaaagcttttctgcagcatcttaggactcagatagacttttagagctggagacaccacaccctttctctacccctaggcccctccattttgcaaacaggagaccatgtagggcaggaagaggagcctgggcatgaaccctgggtcctgctcttcctagctgtgtcctgggacaaattactcatgttcttcagctggtgaaatggggctgccgccacctgcctttctgcccagcagtgcagatggaacggatggagtgcaagtgtggagagcagggcctcttgcgcacgaggcgggcaacgcggggtagctgttttattaggaacgtccatcgcctcagtgccaggtgggagtctgcatggtaaccttgctgctaagcatggtgctaaaccttatgtatgtcaacaaacttatttaattttctttgcattattatcatcatcactcaacagggaggcttgtgaggtcaaagagcttgcccaagtcacccagcagaaatggcagcgctgggaccccagtgcaggcttcagcctccagactcccctcctttggtcactctgctctcgtgccccaacaatggctctggcagctggtgttgtcaggtagaagtgcgtcctcaaggaagtgccaccagcaagaagggcagggatgaaatgactggtctgtcacctacaattttcatcaaggctctgggaccaataacaggaactgcggcttttatttcttgtccagaggattgcaaactcaaaagttttcatgaaatcttcaaatttatcaatgttggcaaccagtttaagtgttttttcttttctttttttttttttggcggggggtgggggtggtaggtgacagggtctcactttgtggcccaggctgaagtgcagtgattcggtcgtggctcactgcagcctcgacctcctgggctcaagcaatcctcccgcctcagcctcctgagtagctaggaccacaggcatgtgtgaccacacccagctaatttttttttaaaaagtttttgtagagacagggtcttcttgtgttgcctaggctggtcttgaactcctgggttcgagcaatccttctgccttgggttcgagcaatccttctgccttagcttctcaaagtgctgggattacaaacatgagtttcttttttaatctgtgaaaaatgtcagtgtgtggccaggcacggtggctcacgcctgtaatcccagcactttgggaggccaagacgggtggatcacttgaggtcaggagttcaagaccagcctggccaacatggtgaaaccccatctctactaaaaatacaaaaattagccgggcatggtggctcatgcctgtagtcccagctactgggcatgagagtcacttgaacctgcgaggcagaagtttcagtgagctgagattgcgccacagcactccagcctgggcaacagagcaaggctctgtctcaaaaaaaaaaaagtctgtgtgatgtggctcacagaccaccagttgtcacccctctcccacaaggctgcaacccctgtaagaaatttatgtgaccaagcctccactgcaaaatgggagtatcatagcctggtttaggatcagaagagattaaagaaagtgaacgccaagtgtctaatacagagtaaggcacacgtcttaatctgcttggctgttacaacaaaataccacagact

SEQ ID NO: 8923 - DNA, 6000 bp, Homo sapiens
agatggggtttcaccatattggtcaggctggtctcgaactcctgacctcaggcaatccacccgcctcggccttccaaattgttgggattacaggcgtgagccaccgcgcagcccttcattttttaaaataagaaataaatgaaaaaagatgatcaagacaaactcttcatacagtgcccgctgtacaaagtaagaaattaataatggtcacgtttgtgattattatttaaacaccaagcagatattaaatattagggctcagagagggcatgcgacccgcctgaattcactcagctgcagagctggaaagagaactcaggcctttttccccacgctggaaggggtagctggggcggagaggtggggggagcggtgaagaaaccccaagcggcccaagctgtgggtctgggttgggagactcgcaggtgtggggcggggaggtaaggtgacccttgctcagcgaccgcgcccgcaagaaacgcattcccaggcctcccgcccggggtctgcaggtgacgggctggggggagcacgggaactagctagaccagtttgtcgtctccatggcgaccgcccgcgcggcgccagcctgacagtccgtccgggttttatgaatgggtgacgtcacaggcctggcgtctaacggtctgagccgctggttcagacgctgacacagaccggcccgggaagggaggggggagactgtagctccgcagctgccgcgccgtgggagggagaccctgctctgaggtctttgagaagaaaatttaaaaagcagccaaaaatgggaaaaaacattaaaaaatcacgaactgttgcaggttcaggaaatttttgcaaggagctgcaaattcaaggtggaatcgaatgcagcctcactccactgcgctctatctagttcacttcccagccacccagccccaaacttactagactttcccgaattaattgctcccacccgggagggatctgggtaggccctccgggtctcaggaacacgaacagcaacattatttaggaattgagaaagcccaggggagcagatgtaaaggagcgcccgctttaaatttcggtcctgatatttgtagatcagggtccgagaagcatcttccaagagggtccggaaacccaggctctctgggctatccagagccagccgcttctccgttcgggcctcaatttctctcatctgtgaaatggagctggagaagtgagaaagtgaatatgggaaaaactgattcctgaggtcttttcattataaggcaatgcctgcttagcttccttgcctccttccagaggagcccagtgcggccctcgcctctacccgctgccctgcccggtgccctgccaccgacccacccttgctgttctgaaacccgggtcgtctttccacactgcgagcaggcactagacgagcaggaggctggacctaggagcgcgggtcacgcccccatgccgcccattggctgcttttgaacgttctgagcccgcccctccgggggccgtggcgtgtttataaaagacaagctgtggctccgcactctcattccacgttcttaactgttccattttccgtatctgcttcgggcttccacctcatttttttcgctttgcccattctgtttcagccagtcgccaagaatcatgaaagtcgccagtggcagcaccgccaccgccgccgcgggccccagctgcgcgctgaaggccggcaagacagcgagcggtgcgggcgaggtggtgcgctgtctgtctgagcagagcgtggccatctcgcgctgcgccgggggcgccggggcgcgcctgcctgccctgctggacgagcagcaggtaaacgtgctgctctacgacatgaacggctgttactcacgcctcaaggagctggtgcccaccctgccccagaaccgcaaggtgagcaaggtggagattctccagcacgtcatcgactacatcagggaccttcagttggagctgaactcggaatccgaagttggaacccccgggggccgagggctgccggtccgggctccgctcagcaccctcaacggcgagatcagcgccctgacggccgaggtgagatccagatccgaccactagatcatccttataccgacggggaaacggaggccagagagggcgtgggcgcttgcaccacttccgtcccatccttgcgggtacctggctatgcgggggtgcctaaggagcctggaaaaagcgctcccccgtcgtgcttcctggggaagggggcgttcgctgcgctcggagcggcgtcccttccaacccgccggtctcatttcttctcgttttcacaggcggcatgcgttcctgcggacgatcgcatcttgtgtcgctgaagcgcctcccccagggaccggcggaccccagccatccagggggcaagaggaattacgtgctctgtgggtctcccccaacgcgcctcgccggatctgagggagaacaagaccgatcggcggccactgcgcccttaactgcatccagcctggggctgaggctgaggcactggcgaggagagggcgctcctctctgcacacctactagtcaccagagactttagggggtgggattccactcgtgtgtttctattttttgaaaagcagacattttaaaaaatggtcacgtttggtgcttctcagatttctgaggaaattgctttgtattgtatattacaatgatcaccgactgaaaatattgttttacaatagttctgtggggctgtttttttgttattaaacaaataatttagatggtggtaaagttgtagtgacttcttgggttgaggggaggggcctgggctgggggttgacccctgaccctcttcacagctggttctgggaggagaattggagggctacatctggattgttgctcttaccggcctgaatgagtgtttccggtgtctttaaagtctattcttcccccaccatccctgcccatttccctgctccccagtgttataaaactaaatactccagacctctggggtttctcacagtgatcattgggccatctagatcacctggggaggttgttaaaatgcagatgaacctgccagggccccctctgtattgggagtattgagcaagccatttaagttggagaacctggccgctggaccacccacttccttgccaagatgtggataaagtgagacccagtggaaagggacttgcttagggccatagcttgtgagaggcagtgattctatcaccccattccccagttggaggtgcctcccccaacagcctacctctgggttccagcaggcagccctggggctcctggctcatccaagtgggtgagcaagttggcagggccaggctgggcacagctgccgagacacctgctctgggtccagactcggcctcctcactctggcctggctctgtcggcagttcaaacaaatctcccccaccaaccccggggctcctgcgtaggatctgaggagtggacgagtctcattacccagctcctgagcaggaaaaatatgtcattggcaagggtctaagaatcttcctggacatgtatgtggatttctactcaggggagcatgtatgagtgtctacgcctgtgtatgtaacaggagtaagctgatcttcccccactactcccacagtggggatgggccaactgttcacatataggcttgggggagggggtgtaagtaggagtatgcttgggggtgtgtgcagaagggcaaatgagagcacatgtgttctgcagataagtgtggaacctccagctgtttgggcttgtgtgttctgcctaaatgcattgtaggcatctctgcatgggtctggcatgatggatgggtttgtgtgtctgggggccacagaaccacactgtgggtttctgtgtgtataactgttctatagattggttggcattcctgggcctctgcgggtctggagtgaaggtggggacagctgtgtttgggcaaacccttcctcaaaagttcacgtggcaactccctgggctatcgttaggtcctgggggcaccaaccctcaaggattgctgccaggtaaacccccctgtattacatatggagaaactgagtcccaggaatgacaaagaacttgtcccagacaggtaagggctattaatatattttgtcaataaacaatagaataaaatcaatagcccttagcaccagaagcctggctctgctcaactgaaccctttacaaaaacgatttcatggatccctgtggggctaaaggcaagactgtgatcccagttttacagcagaaggaacaagctcagagaggggatgaacaaaaaatcaaatgaaagattatgatttgagcactaacattaagccaggtacaccccctccacagtttatggattttatcgaagaacccagtacttgcaggcgaattatgttctttgctacctcctccccaccggctgctgtattacagtactaacctcacggaatgtagtacagaataaatgaaataaagtaagtgtgtaaaacgtttagcacagtgcttggcacagaatgtttcatagttataaattattattgtcgcctgtgagtccttggagtgtcctcggaggcacacgtgtgcacgcacgcactctcacgtgtgggcccccgcctgcaagcccacccacggggtctgagcgggttccccctcgcgtactccgacatgcagggcctttttccaggggaggaaggggctgcggcgggggcctgggccacctcccccgccattcaggcacactctggattccacgtttccctctgttcccctttggcccagacccagcccatctggaggccggctccgcggcggcctgggagcgtttccatcagctgggcccgaggaatgcggagctatttaacctgagcatccccaggtgtacggaggcgcctggctgtctggggcccgcagcctttggcacagccgcgctagacaaacagcgcgccgcccccgccctgcccctccgcccccagctgcagccgggcctgggaaccggcgggcgccggcggcttgcataagaggctccgggcctcgcagagggaggggggacagaggccaccggtgtgtgtgcatgtaacacacaaaaccctgctcctttggaaatcattaactccttaacccctcctggacaggacgaagccaggagctggggtggaagatgccgagaaacccgaggaccaagtttcttgggcactggactctgcctttccggggctgtactgttaattttatttaagaaatacagagagcttattgtgtgctgggcaccatgctaaactctttacaatatcaattcatttaatcgtcagaacttgttaacgaggccagtgctatcatcatatgctcattttaataagagcaaccaccaccactacaacaagagtaataggctaacattttagtagggaggcaggtagaacacaagcccagaatcaaccttgatgctcatcacttcacctgtcagagcctcttcttttttggaaaacgggcttcagaacctgggcttcaaggattaattgaaccaatgcacctaaaaagcatagcacaggctcatggtagatacttagtgcatattgcaataaagtgttttgagcggattgtctcaacagccctaccaggtgtgggcctactggtatattcacttttttggtttttttgagacagagtctccctctattgcccaggctggggtgcggtggcaccatcttggctcactgcaacctccacctcccaggttcaagtgatcctcctgcctcagcctcccgagtagctgggattacaggcacgtgccaccatgcccagctaatttttgtattttttttgtagaaaagggttttcaccatgttggccaggctagtctcgaactcttgacctgaagggatctgcccacctcagcttcccgaagagctgggattacagatgtaagccaccgtgcccggcctgtgttcacttttcagatgagaaaacggaggcatcaaagaggtgaggtgaccca

SEQ ID NO: 8924 - DNA, 6000 bp, Homo sapiens
ggaggagagtgagcaggtgggtggggagctacttgtaccaataccctatccatattggtttcgtctgggttttcccataggccagagtgcccaaacctgccctcacctgacatgctgacatgaggatggccttgtcacatgtactgccatctatgacagaatttggtcttggatattctgttccagaacccagaggtggtggtaggcagaggaacaaagtcgactgagcctctgggggaacaagaggaaacaaaggaaatatttaacaaattaagagacaatcggaagtcaatgagaggaggcaaactatcaatggtcagatgagcagggagtccccagcatgggtgagcccaccctcagtggggaagggaacttgcctgtggtgttagcttctatgatggaagtccatgaagaagaagttctacaaatggggaaattgagacaacacaagcaaactaagaaacttgggacacatagtagaaatctagacggttcttttaatggacagactattctttaaaggaggtcctaaaactgtagagatcacagtccccgctaggttcaccaccccacctggcaggaaatgttgtgagaaggggtttaagtgtaaagtaaacttgtaacaagagtggctggcgccagtctaagcaagaggtaccacaaggaatttgtgcacatccaggaatgtggagttccacaactctcaactagcttgtgggaaagcatagggctgcttttctgttgactaaagctatgaaagaactgaaaagtgtggcttgccaggaaaacacttgctgtccccaaggacactagcgctgaggacatgagaggaagcaacacccttggatctgccatcacttgtctaagaatggcaatcatccagtaacagatcagccttggctttcaggccaacaaatttcaggcacttgtaataagctgtgcaaccatcgccactattttcttacccaattccttttcagctccagcaggtcctgccagtcaccttgtacgacttaccccactggctttttacatttcagaattaagaaatatcatacagcaaacaaagggttgagttaaaaaagcttgtttgcacattgttttaggaattcagaacacatttcccatagaaacaatgcagacaagccacaaaggcagatggttcccttccttctgcccccacccaaaagtttagcctgtgatgttctgaaagcacagtattattccccattaaattgttcctgaaataatgccttttgagtcataattcagaatgcctaactgaattttatggtggctttaaatgtggccccaaagttctttgcactctatgtgctctccccttgatcctggctctgatgacttgaccaaaagaataaggcagaaaggatgctatgccagttaattttgtgattatagaattactatgataccaaaaccagatagtactaaaaaaccccaaagaccactatccctaaaaaatacggatgcaataatccatacaaaatattagtaaatagaattcagcaatacataactatataccatgatcaagtgagattttttttccccaggagttcaaggctgctttaatatgtaaaaatgaatataatccaccatgttaacggactaaataaaaatcacatggtcatatcaagggggaagggaagcatttgacaaaattcaacacccattatgatgaaactctcagaaaaataggaatagaagaaaactcttccaacttgatgagcatccacaaaaagtccaggctccctccacggtcttcctggtaacatgggagtgagggactttcacaggctggcagggatggaagtcttggctccctactcagtcttctctgacggtgacccattcattgtgggggctggactcctcattagcctggtagtctaggctccccatctggccttggtgagtggagatggggctgccgattttctgtggtgtttagatggagtaaagcagatgttgctaacaggctttcttttttaaatttgtataaacttaagagatataagtataattttgttacatcaatatattgtatagttgtgaagtctgggcttttagggcacccatcacccaaataatgtgtactctacccattaagtaatttttcatcacccacctgtctcctattccctaccctcccgagtctccaatgtccatcatttcacaatttgtcctagtttatacactatttagctcccacttataaatgaaaacgtggtgtttgattttctgtttctgcgttatttcacttaagataacggcctccagttccatccatgttacttcaaaagacatgacttcattttttttgactgagtagtattccattgtgtatatgtatcacattgtctttatccaatcatctgctgatgaacacttaaactgattccatattactgttattgcgaatagtgccgtgataacatatgagtgcaggtatcatttttatataatgatttcttttcctctgggtagatacacagtagtggcgttgccactccaaagggtaattctatttttagttctttgccatatctccacgctgttctccaaagaggttatacaatttacattctcactggcagtgtgcctgaaggttttatgtcttgccaagtcttagttctttggccagagagagcaggcttttggggggcctttcttgcctgtgcctgttggtatttctgggtggctcacttctttagctctgactctggaatatgaatcaaaaagagattcctgggacttaccgctaggtcatccgttgggtcctggggtccctggcccatctgcctctttctcttcacctttcagaggcttatgtttgctttgcacacaatgtcccaaattttagttacttttagcaggatggatagggatggatagatagatagtccatctattctatcttcctggaagcagacacctgatatttttggatatctggattctgcctctactttattatttgactggatgtggaattctaggctgtactttagaatttgaaggttttgctgcactaacttcttcccttccagcattgccttctgattttttttttaatgggatcttctctcctttctgctctctctgtgtcaccctcaaccttcaggacgttttttttttctctctagaaccccaaaatgtcatgaaggtgtccttggtatgtatgtttctcctgtcttttgggggggtactcttacggcttctttaacttggagacacatgcctcaggagtatagaattgttccactgcttatttgacaggttcctttcctttatgcttttcagccttcctggaactctgaagagccagttgctgcatcttctggaacagaagatgcctctaggtttcttttctctatttttctgcttcttttttgtctattttacttcccaaaagagtcctttaatcttctaatatttctctacaatattgatatggtcataatgtatatgtccctcaccccaaattcctgtgtcgaaattctcacttttaagattatgatattacaaggcaaagtctttggagggtgatttcatgaatgatattagggcccttaatttaaaaacccaagggagaggccaggcacagtggctcatgcctgtaatccaagcagtttgggaggctgaggtgggcggatcaagaagtcaggagatcgagaccatcctggttaacacggtgaaaccctgtctctactaaaaatacaaaaattggccaggcatggtggcatgcacttgtagtcccagctactcgggaggctgaggcaggagaatcatttgaactcaggaggcggaggttgcagtgagccgagattgcaccactgcactccagcctgggcaacagagggagactccgtctacaaaaaacaacaaacaaacaaacaaacaaaaaaaccaaggacacagcaagaagatgctgcctgtgaaccagacagagagtcctcaccaggcaccaaatctgctgatgccttgatcttggatttcccagcctccagagctgtgagaaacaaatttctgttttctaaaagccacccggtttctgacattttgttacagcagctagaacaaactaagcttttggctatcacatttttcatttctgggtcttccttcatcttatctgattttttccgttttgcacagtatcacatgtttaaaacggaataacttgccttgggtcatcttttttcctgtttgctaccttgttttctctgggctccttttaaaaacattctctttactatattgtgtgcctcctccagtttccttgtgtttgtttgtttggggtttgtgtggttacctctttttggtctacctttcgtgttgaaggatttcatctacctggtcatcctcagccatctgttaacagtggatggggaggtacagggaagctggctggagagtgagctgtgtatcttgtacctgtgcttctagattccatcctcttctgctctgctctgccctggaggctgatctgcatggcagcatcaccggagcttctttgcactctggactccagtggattcagccaatgaggggcactggcaggaggtcagacacagagaggagagaatgtctaagaagtctgtgtcccggaaccctccccactgagctgtgatttggcagtggttgcattcttcttctgaaggtgacagtccctgtggttgtccctctctgatagcctcagcctttcttgggttctgggaaataatcacagctccactctgctgctcaccccaggggcttcacggtcccttgtggtttctctcaccatacctttcctctacaaatcgcctcctcattaaactcttttctgcctgcttctgagtctgtgatctgtatttcttgccaagccctgatcacaccagaaacttcatgtgcttgcctgtcagctggtggacttcatggcaacatggctggcctcttcgctggcacacaccagagtatacatgtgttggtctgctggggctgccagagtaaagtcccgcagactgggcagcttaaacgacaaaaacttattttctcacagttctgggaggtggaagtctgagatccagatgccagcagggtgagtttcttctgaggcctccctccttggctcacagatgactgccctctccctgtgtcttcatgcgatggttcttcggtgtacatctggtgtctctgtgtccaaatttcctcctctcataaggacaccagtcatgttgggtttcaaaactttttctcatggccttattttaacttaatcaccgctttaaaggccccatctctgaatatgccaattctgaggtactgggagttaggatttcaacacaggaattttagaagacacagctcagcccataacagtttttatctggagctgtttctctggataagttaagtacgatggggtctgtctcttcaaaataatcctctaatccatggtttgataagtgcacactgggctgcaggtctttgggaacaggtcagaggaaagggccagaaaaatggccccactgttcatgatgaaaaatttcaaagaatccccctatagttggccctcgggctggtctgcaccctcttctgtgtgtacagaatcctaaaatagcttggttcaatgtctccagagaataaactgacctcctgcctttggggagagggaaacctgggatcagggaggcacccactgaatcctctatcagactgtctttcagcactgcccttggggtatcgtgccttggcccaagggctattgtgggtttctgcaggatgcaccagctgacttcttgctgctactctcctccatagccacttagtttatgtttttttctgcctttctgcctaggtatgttaccaccagttcatctacaaattctcatagggagagaatttagactggcagatattcagcctcagagaaggctatttgtagatattagctgtttctcttctaaagcatctgtgttagtccgttctcacact

SEQ ID NO: 8925 - DNA, 6000 bp, Homo sapiens
ggggaaaggagaggaaggagctggccttaaattcctgttcgtcccctgacttggtctgagtcgtccagcaagtcactttctccccttaaaccttggtttccccagcggtagcatggggacgataaccctgttttgtgagttgttgctgctattcttcttattaattacagcaaacacttattctaagtgccttacaaggatttgctcatccaatcttcaccatctctattttactataaggaaattgagatgtggagaggtgaagtcacttgcccagggtgacacagctggcaagtggcggtgatgggatttgaacccaggcagtctggctgcggggtctgcgaggattaacgccatgaggtggaggtgcttaagggcgcacggcctcggcgcctgtggctcccgcaggctcgcccctccccgtcctggcgcccccagccaagggcggcctccccgtcccctcgaagttcccttcccatggagtcccctccccaagtagtcccctccccctccctgcggtcccgtcggccccggcggagaaagcgggctcgcagaggtgcagagcgcccggagtcccaggtggggcgccctcgttcgggtcccgggtccctctggggaggggctagggtgtgccccggctgctccctacgccccccggcgggctggcggccccgtccccgcgctgacatttctttggttgttcatgtcacggcccttcagtctgcgcagttttacaaatgtgctggcgagatgaaaggcgccgggaacagcgactggagaacaagttcggaaaagcttttaacttccagctcccacagacaaagcgggaggagggggaggaagggagggaagggaggggaagcacagagtggggagagtagaggaagggagcgggaggaggggagtgggaaggaaggagggaaggaggaagaggagaaggaagtgtggggagaagagagaaagggaaacggggcactgagagtgcgggatgaggacagagagaaccagaataggacaggcaagagggagacagagggagactgggtgccccgaagaaacagagatgggaagagacagagaaacagagagagggagacagacatggaggcagagagaacaggacagagggagggggaaacggaaagagaacgacagacgcagggacacagctaggagataagcagatggggggaggggagaagggtgctagagaagatgtaggggcaggtagcaagagactgacacccattcagaaacagtcagagagaccagagacactgagggggaggagacagagacaggagtggaggcagtcagagaagcgaggacagatggacagtgcatgagaaggcgacagacagataaagggatgacagagaagtgtagagaagaagaggaaaagagccagggagaatagcagagcctggagctaagagcagcctccccatccccaacacacacgcgtgtatgcactcacacacacacacacacacacacacacacacacccttcactgacccctgctcaaacctgcaggctccctggagcagaccctgctgttagggcgttcagactagagcagtggctctcaactgggggtgactttgcccttcaggagacatttggcaatgtcaggacacatttttagttgtcacaactggggagggggtgtgctgctggcatctagtgggtagaagctggggatgctactaagcatcctacatgggacatgcccaatgacgaagaattatctggcccaaatgtcaatagggccaaagtggagtgaccctgggctagagagagagaaatgcccatggacccagatgactactccaggggaaaacatgtcccctgtgccaagacagggctgtgtgcccttctgatggagtgggaaggagaattctcacaagcgcctcctcttggaatccttccctagccatgcctctctccccaagtccttcctcatcctacccaatccctggaggagtggtgtctctcttatttgtagactcaccacacgatataaaaaagcacacgttcaaactctaactacaaagcacttggcattttatttgcccagaggcaatattgcacaacagttcagtgtgcaggctttggccccagcctgccttggtttgaatcccagctctgccataaactaattgtgtgaccttgggcacgtttcatagttgcactgtgcctcagtttccccattatgaatttataaatttgttgaaagtaaaaggaaattatctgtgtaaaacatttaggagaaggcttgacacatggcacaggttcactaaatgttaactgttgttactatcatctcattttctcttcacatcaatgctgggggaagtggcttgcccacgtgtcacacagtctgcatggggcagaactgctctcagagcccaggcctgcccagttcttcctctgtcacactacactgcctcttgctgcccctgccacactgcagcaggagtcccagcttaccttctcccagaccagagtgagaggtctgacccaggcccaatgcgtcaacctgatctctctacttgccgtctgaatgatcttgctatttcaacaccgtgtctcagtttcctcatttgtaaaatgggctaatactagtatctgattattgtgaggacttaaaagcagaactatggcacacagcaagtgctcaataaacattcaatgtgttctcagagcctagccatagtgctcacaacagagtggacactcagagaaagtttgttgaaggaaggaagaattggaaataacggtagaatgagcctgaaaataggaaacattgggataggaaaacctgagggtctaataaagagtcatggggagctgggtgcagcagcacatgcctggtgtcccagttacttgagaggctgaggcagaatgatcacctgagtccaggaatccagcctggacaacatagtgagacccccatctcaaaaaaaaataaaaataaaagagagagaagagagagaccagagcaaaagagaaagatgtgacaacagttcattcaataacatttattgagcacctactgtgtgcatgcagatgtgacagcaacagtgtcccagaccaaaacaacctgtggacaactaagtaggtctgactccagagatgaacagcacacaccagagcctggaggaagaggcaaagaaggaatgggaactggagcaaacagcaaaagtgagtcagagcgggaggagagaaccaaaagtgaagagatgcacctggaaggctggcctctggtctctgaaagcatgaaagagtggaggctaagaatagagaggagaggggaagagagagatggagaaaaggaaggcgatagaaaggcaaggctggaagagatcaatgaagggaaataaaccaagagaaggacgtaggggagggaacagactggcacagtggagaatacatctcaaaataaataaatgaatgatggagtttagtaggaggggccagaggggcagccagcaggagaggtgattccaatcatcagcaagacggactagggtgtggagatggagatggaaattggggaaggaggcgaggaggagagaaggataggggcgaggtagagctgggggtcctggagggccctgccccctctttgccatgaacttcagcagctgcttgtgggtgattaaatggctggtcattggcagcttggcgggacagaggtctgcagctgtccagtctcctgttatccttcactcacctatctggaagccatggggaataggggggcgggcaactcctaaggggacctacaacccaagacaaagggtgggtctatgggagtcactggtcctatcctaccatcaacgacctcatattgggaactcaggagtggggtgggagggtctcctccattaggcctcatcccagagagatgaagtagtaaggagagccaggcagccaggagaaagaaacagggccaggtggaaaaaacatcagggagcagaccagccggatttttaaaagaacggaaaacccaaccagcaaggagtttctgggcagtgggaagattttattgggagacttctccaggtcaaggtggcaccaagttaaggatggaggtgtcttgttttgcctgcttactttgttggttgcaaggatgtccagcgggactctccagaggaaaagcccacaagtttctctcccggggacacccgacctcccacctgcctggagactcagccctgggcacctggtcggtgtccacctcaatgcacagtgactgtttctgaactggcagatctggtctgtgcaaggtgcctttctgggcagcaagccggggcggccactgttcgagaagcctgctcctaccctggcctgcgcccctgctcctctgaaggcggcctcccgcagtagtcagggggcggaaatgggaagccctattcgcagtaaaatcaggtggggaaataggctctggtctcaaactgcggccacctggggagctgccaggcgaggaggtagatggtccccctcctgggggcgctcccttcgcgcggatctggggttggaggagggaggggcactgtcccctggggggtttcctgggactgggccgcccgagagagggaaaggctgtcccctcctggtgtaggaggggcgcgatccggggggcgggggctggggttccccggctgcgggggtccgggccggcggccgcctgcggcttggcgctgcgcggctcctgcccggcgggccctgcattctccgagtctccaccagaggctgcgggaggaaggaagggatccgtcccttgcacacttccccccagtcagacacgcacactccctcgctcccgctcgctcgctcactccctcgctctctcgctctctcgctctctcgctcacacacacgcgcgcacacgccgccgcggctccccctctcgctcccgctctccctccggctcctgcgggcggccgcggggctccggactcgcccgctgcccgcgccggggctcccgccccacgcagcgtcccgaggcggcaggactagggggagccccgggccgctccccgaggtaagagcgcggggtgccgcgggaggagcggccggatcgccgccgaggggaggctgcccggcagggagggagccccctggccggcgggagcggccgggcaggcggcgcggggggcgagcctccagccgcaggaggagccggggtgcctgcgcccggccctgcgcgccccctcctctcggccgggagggcggggagggagtttcccacgtccaaactttccccggcgcggagccgagccgcctctcggcccgaagcccgcagctcccacccgtccccacaacctcgtccgccgcgcgcccgggagcctccgggacccccgcgggccgaggggtggcagcgccaggggccgagccggcgcgccaaaaggggctgggaaggtggcgcacagccctgacgcgagggctgggacccaggcgttcccggtcccccaaccctgctagcggggctcggctccccggcccctcccagaggcggggtccggggccgggaaaataccgcacggcgcgagcgtgtgcgcgcggtgtgtgtgtgcgaggtcgtgccgcgtccggggacacccggaggctgactccagccgcggcgacacgcacggttctggtcccctctgagccggggaggcggcccacagggacccctgccggccccaccggcgcgaccccccctgccctatggccgtcgggcgggctggcggtgagcgagagccagcgctgctctcttccttaggacccgactccggagacaccgtccccgctggggaagaaggacggggcccccgacagcctaacgtccaaagagagcgccacttagggctaaccctcgggggccgcggcgtttactgtgaagagtggactgcgtgggcgcgcggggtgccgggcagccctgggtgggcacagtgtggacccgtctcgctcgcgcctccccgctgcctcttctctggcaacgtcggg

SEQ ID NO: 8926 - DNA, 6000 bp, Homo sapiens
ttctaggccgggcacggtagctcactcctagcactttgggaggccgaggcaggcggatcacgaggtcaggagattgagaccaccctggctaacacgatgaaaccctgtctctactaaaaaaaaaatagaaaaaattagccgggcgtggtggcgggcgcctgtagtcccagctacttgggaggctgaggcaggagaatggcttgaacctgggaggtggagcttgcagtgagccgagatcacgccactgcactccagcctgggaggtggagcttgcagtgagccgagatcacgccactgcactccagcctgggtgactgagcaagactccgtctcaaaaaaaaaaaaaatagtgttctaggcactttgtaaatgttaacatattcaatcattcctgttaggaaagtatgatgtgattatttctattttacagtcaaggaaatgatcaacctgtttattcattcatcaaacatttattgagcccctacatggagccaggccctgtactgggcaatggggatagagaaatgagttagactttagaatgcataagattccccttggaacttgcttaaaatgcaactccaggctccacctccagagagtctgacctatttacaagggtgattctatggctggtggcggtgggatcacacttggggagtgtgcagtgcatgatcttttattctacaataatggtgtgtgtgtgtgcacatgtgtgtgtgtctgtgttgtggttgaggtccaggaacgtttctcagtcaagatgacatctgaaccggaactgaatcagaaaggatgaacgagcttcttcctgtgcaagggacaatcttcttacagggtaatttaccaagaaccactaaacctaaaaatgtaactactttctgaccctcacatgtgtgcacaagacaacacatagaaggatgttgattgcagcattgtttgttagtgaaaaactggcaataacctagctgcccaggagtaagtcagtggataaataaaatatggatcatatacctgacgttagtagctatccacggtacagcactatgtgccaggcactgttctatgtgcattttgtgtgacaaaacaaccagaggagataggtactcctattactttgtatgtactattattactgccatcaccaatcccttgttttacagataaggaaactaaggcacagagagttatacaactcacccaaagtctcatagctagtgagtgataagagtgggatttgaatgtgggttcttggtgcaagtgcacgaagagaaaaagaagagaaaaagcagtgggtgtctggagaacttcaaatggctcagaactccagcatggggtagtagcaggtggctaagagggaatggagaggattccagaatggttaagatagcagtgctagtttgggctagatgagagaagtcctgaatgccaagctgaatatgaatttgaccttacaggttagcaaagggacttgactgaaagattggggcccgtgagtggagatgatgggtttgatcagggcccacgtgggaatttaagtaggagtccagaaaactgccctcctgagcttcctctttcatctgtttcttgctcaaatgacccactcccacttggcgtacaaacattccccgccatggcttgtttacaatctgtcttaacccctgcctcccactagatactagtctatttctctaccttcctatccctattcacaataaaacttcccaaaagcatggtctctactcactgtctccacttcctcaattcccattctctcctcagccatttccagcctggctcccaccccactacaccaccaaagtcaccctcttcaaagccatttatgaccttcttgtagccagatgtgacaggagctcctctctgctcatcccacaccaactctccccacattgacacagtggatcctgcccttcttcctgaaactctcggcctctggaaccttacttctgggtctcctcctacctcactgggtggattttcctcttctggtgacagaggcacccttgtgctcaatcgtgggaatcctctgctctgtgtatactcattccctgtgatgtctggtagcccacagccttaaatagcatctctctgctaaagaccgtgaaatttatgtttcctaccataacctcctctcccctgccccgagctccagactcatgttcaactgcctactctacatggctccttagctggcaaacagacctctcaacctaacgggtccaaactgactcctgggtttcaccttccaaacgtgctcctctgttgttaccactttaataagagacagcatcatccaccctcaatcaaactgaacacctaatcagtcctaaaatctaggaatcagttatttaaacttcttttctagtactgggtttctcagcctctacactattgacattttgggctggatactttgttgtgggggattgtcttacactgtacatctacactgtaccttctagcatgtttggtgtcttcctctaggaggtgacaggatccacggccagatgccaggcccattcagggtcagccctctctgctaaggaaggccccagtgtggggatggggtgcagcagggtaatgttgaactgtgactcatggccaggcagccctggtacaaacctagagggcccaagaggcctttagcccctagatgctggtactagcccctgctccagttgtgataaccaaaaatgtctctgaatattgccaaacattccctggtggtcaacattgctcccagttgagaaccattgccataatataataaatatacaaatgtatctatcataagtgtacatttgaagacattttcacaaatggaacacaagtgtgtaaccagcaccaggtcaagaaacaagaggctgggcatggtggctcatgcctataatcccagcactttggaaggccaaggcaggtggatcatctgagatcaggagttcaaaaccagcctggccaacatggtgaataactctctccactaaaaatacaaaaattagctgggcacggtcgtgggtaccttgtaatcccagctacttgggaggctgaggtaggagaatttcttgaactgggaggtggaggttgcagtgagccaagatcatgacactgtactctggcctgggcgacagagtgagattctgtctcaagagacaaaaaaaaaaaaaaaaaaaaagaaagaaacaaaacattatcagcaccctagaagcctgcttgcaatcactacctcttctccccaaggggtaccactatcattacttttttttttttctgtcacccaggctggagtgcagtcgcatgatctctgctcactgcaacctccgcctcccaggttcaagcaattctctgcctcagtctcccaaatacctaggattacaggcacccaccactacacatggttaatttttgtatttttagtagagatggggtttcaccatcttggccaggctggtcttgaactcgtgacctcatgatccaccagccttggcctcccaaagtgctgggattacaggtgtgagccaccgcgcccagtgccactatcattacttctaacagcttagatagactttgactattttttactgtatttaaatagtgttatagggtatgtattcttttgtgtctggactcttttttatcaaggttctatttgtgagattcatccatattgttctgagaattgtagatggtattccattgtgtgaaggtactacgacttatttctctattttactgttgacaagcatttggtagattccaatttggggctattatgaacaatgcccctatgaacattcatggtaaatgtcttttggtgatcacaagtagtcatttctttcgggtatatacctaggagaaaaactgctgggttgaaggatatgtgtacgttcaccttcagtagatgtttccaaatagtttcccaaagtagtttttgcctaactacactcccaccagcagtgtgtgaattgccaggatttctccttgacttcactcttatggtcacgtgtcacatccgatccatcagtgggtcctgatggtttcactttcaaaacctaactggaatcagacaactgccaccactctagtctggctgtcatcaccccccagcttggggtctgcaggagcctcctaattagatttccagcttctactcttgccattctttagttgaaccttcgcccagcagccagaatgatcctgttaaattataaattggatcacatcattcccctgctcaaaaaatccaggatcctccccaaagccttcagaagaccacatgatctgcccttctctcctccctcatctccagtcactctcttctccactcactctcttccagacacaatggccttgctgtttcttggacagtcgggactccttctcactccaaggctctgcatttgctgtttcttcttctagagaactcttccccctagatctttgcatagctggcccttctcatcagtgaggtctcagctcaaataccacatcttctaggaggccttctcaggccacccctaaagtagtcctccctcttacccattatcccatggccctagttttaaacatacatccaatctcaaatgatctcatctatgcatttgctcacttataatctttttctccttattagaatttaagccacttgagggcaagaagccagtggatctcatccaccgacgtatccctcgcaccattgaccgaaacacaggagcgctatcgacatgtgccgaatgaatgaatgaatgaatgaatgagccccaggtgtttaggagaccctaacagaggtgcccccgttgtagggacgactctcacctgcagatggcctcctcaggcccttcgggtggcactggggagcccagggcctcccagcgaagtggccagattcaggaacccttcgcacagcgggcactaggaccctgcgcggcgccgcgtctcgcggggggcgggcgggcggagggggttgggggatccgctctttctccctcctagagcctggttgcagccacttgtgcgatcccggaccttgccgcggccgcctggctcctttccgcgccatgagccgcaggttcacggtcacctcgctgccccccgcagggcccgccagaagccctgacccagagtcccgccggcattcggtcgcagacccccgccacctcccgggggaagacgtcaaaggtagaggccgcagggggcggggcctgccagggccgggcgggacgagggggaggggccggggcggaccgtctgttgaagggggcagggccaagaccgggggcggggaggggtcccagccctaggcctgagaggggaatggagccaggactaggaaaccaaggggccggggccgcggaacgcaaagtgtggagggggaggggccaaacgcgaggtgggcgtggccacgagggaaaggggtggggccagggaaggggtttggacggaggcgaagggggcgggtctggtgatggaaaggccggggtcaaggtggagagtaggccgtagggcactaaaggggcggggacatctcgagtagggagcgggaccagagtgaggaggtggaactagggaaaaagggggctgtgtgttgaagggggatggtcaggagcccctaaaggggaggcggcgggactaggttggtttggggtcaggaaagggcgggactagtagggaatgagttgggccaggaggatgggagtggggcctgggaggggggtggggtcgagggcgggaggaaaactgagtcagggttgccgaggcaggtgccaggtcagcgggtcctcggtgcctggcggatcctccaatcctctagctccctggaggcttagcggacagcgactggggatcccgggaaggagacgggaggcagggaagttagtatggatcctgggcagcgagattcagggaggatgccgtagggtcgctgatcccgactcttggggacccacttagctccttgtctgctcgagctccgtaagggttggg

SEQ ID NO: 8927 - DNA, 6000 bp, Homo sapiens
cttcagaaccaaacacagatgtcagagctatgtgatacagaatttcaaataactaatatggtaaaaggtctaacagtaaaagtagacaatatgcaagatcaaaagtgcaatctcagtagagagatggaagctatgagaaccaaatggaactggtcaaaataagaaacacactaatggccaggtgcggtggctcacgcctgtaattccagcactttgggaggccgaggcgggcagatcacgaggtcaggagattgagaccatcctggctaacgcggtgaaaccccgtctctactaaaaatacaaaaaatcagccgggcatggtggcgggagcctgtagtcccacctactcaggaggctgaggcaggagaatggtgtgaacccgggaggcagagcttgcagtgagccgagattgcgccactgcacgcctggaggacagagcgagactctgtctcaaaaaaaaaaaaaaaaaagaaacacactaacagagatgcagagatgaagagtgcctcatggagctcgtcagtggatttgacacagccaaggagagaatgaatgaactcaaagataggtcaagagaaattattcaaactgaaacactggggaaaaagggtgaagggaaaaaaaaccgtcaaaagagaacatccaagagttgtgggacaatatcaaacactcaaacatattatagttagattcccagaagaaaggagagagaacaggaaaagaaacatttgaagaattaaaggctgagaacttttcaacattaaggacagagcaaaccacaaaatccaagaagctcagagaacatgcagaataaactcatatatatatatatatatatatatatatatatatatatacacacacacatataaaattagatatactcgaaatgctaaaacaaaagaaaatcttaaaggcagcaaggaaaaagaagacattgcatacagaggaagctaagaattatggagacgtcagaaactatgcaagctagaagccaatggagtgaccttattgctgatgctgataggggaaaaacacatacacacacaaaaactgctcacccaaaattccggaatcctatacccaaatgaaagtgtctttcaaaataaaggagaaataaaccctgtttcagataaagaaaaacggaattcattgctccttctacaagatactaaaggaagtttttcaggcaaaaggaatatgataccagaaaaaaacctgggtctacacaatgaaattaagagcactggaaattgaatgaaggtaagtacaattaaaatcttttttaaattaccttagaaataactgaagtgagctgggcatggggctcaaacttgaaatcccatcatttttgggaggctgaagcaggaggatcccttgaggccaggagttgaaggccagcctgggcaacagccccaatacctccatctctacaatagagggtcacaaaacttttttttttttttttttttttttatgtggagtctcactctgtcacccaggctggagtgcaatggtgtgatctcggctcactgcagtctccgcctcctgggttcaagtgattctcctgcctcagcctcctgagtagctgggattacagacctgtgccactatgcctggctaatttttgtatgtttagtaaagacggggtttcaccactttggccaagctggtctcgaactcctggcctcatgtaatctgcctgcctcggcctcccaaagtgctgggattacaggtgtgagccaccacgtcctgccaatctttttctataaaggagcagataggccgggtgcggtggctcatgcctgtaatcccaggcactttgggaggctgaggcgggcggatcacctgaggtcgggagtttgagaccagcctgaccaacatggcaaaaccccgtctctactaaaaatacaaaaaaattagccaggcatggtggcgggctaatcccagctactcgggaggctgaggcaggagaatcacgtggacctgggaggcggaggttgcagtgagctgcgattgcgccattgcactccagcctgggcaacaagagtgaaactccatctcaaaaaaatacatacatacatacacacataaaataaataaatacataaaggagcagataataaatattttaggttttgtaggccatatctctgttgcaaccactgaactctaccgttgcagcatgaaaacagccatagacagtaggtaaatgaatgagcgtgactctgtttcagtaaaggtttatggacactgagatttaaattccatatagttttaatgtgctacaattaagttgtgatttttcaacatttatcaaggtaaaagccattcttagttcatgagccgtgcaaaatcaggcagtagagtggttttggcttgcaggtgggcagaccatcttttttgctaaccgcctggtctaaggcaagcatattagcaatgaattgtgtacttgcagcacatgcaaaaatttaaaatactgataaaatgaatcgtggtatatttctaagatgaaattctacttaacaacaaaaacaaatgaactattgattaatgcaacatgattgcttataaaataattacgctgagtaaaagaagccagacaaaaaagactacatactatatgattccgtccataaaaaattccagaaaatgaaaaccaatctatagtgacaggatgtagatcagtggttgtttgcaagtggttggtgggtagaggggagaaagcaagagaaggaagggattttaaaaagtaaaatgtaggacaacagcaagaagaacaggagggaagaaatgggaatttattgtaaggtctttatattatacatgaagcgggacattttttgaaagtaaattctggcccaagcttcacaacgaccacacaactgtttagtcctagagttgtggtggtgggaatggggtgggggtcactgttccatcactaccaaaagcaagaatccagctggctggatgaccagcgcagtaaactgagaagggaataaatatctcaaattgcttgagcacgttactcttaaactgggatgacttaaatcttccttcagtgggcactaagcatcttttaacctcaatgatgatttatttcattttatttatttattttttgagatggagtctcactccgtctcttaggctggagtgcagtggcgcaatcttggctcactgcaacctctgcctcccaggttcaagcaattctcctgcctcagcctcccaagtagctgggattacaggcaggcaccaccatgcccagctaatttttgtatttttagtagagatggggtttcaccatgttggtgaggctggtcttgaactcctgacctcaagtgatctgcagcccttcacctcccaaagtgctgggattacaggcatgagcctcacagatgatttagaacaaagactagaaatgttttcaaacttctagtattaataattttgcattaaggcatctgtgtaaatgtgatactttaaattcctataatgttcaagataatttcaagagcttggcactgtgattcacgcctgtaatcccagagctttgggaggcgaaggcagtttgagaccggcctgggcaacatagggagattccccaccccctctataaaaactaaaaaaactagccaggcatggtagtgtgtacctacagtctcagctactcgggaggctgcaacaggaggctagcttgagcccaggagcttgaggctgcagtgagctatgatcgctattgcactccagtctgggtgatagagtgagactctgtctcaaaaaaaaaaaaaagataattttgagaattctaacagattattcttgtactaattacaaatatgtatttgaatagatttagacttttgattttaagatgaaatctcgtttgtattgacacatttgaaagcactcatgactcagtattcttataaatgtattacatttacaagaattacacaaggacttgaaaggctttgttagaaacctgtgatacttagaaaaacgaattgaatttataaatgcagtttcaaatgttcaaaggattttaattagcttagtttattaatgggaccaaataactgatataatttactagatttatgaatagaactgtaaaacttggctgtgcgcggtggctcacgcctgtaatcccagcactttgagaggctgaggcgggcggatcacgaggtcaggagtttcatgggctggaggtctcaggataataaagaactgttgtggttgggggtgggaggtggaagagagtcatcaagcaactggaattatgggaacttcagcatgaagacctagcactagaaattcgggaggccacaatcacaatatcagggatataaccaagggaatggatgtctaattggaaagaaaggaatatcactgaagacgagaaggaaatcagacctgataagccagagcgctgctttagatgagtggccactatttcgcacaacttaagggggcacggttcacgtgaacgtctacgtaaatggcgctcccaggccttgtgcagtgcataacctgcggacccgtatgacatgaacctgctagatccccaagtacccaagaactgatgacaggagttcgtgtggggagacgagacaggaggtaaaaaaataatccttggtaagcaaaaattggtcataattgtggagtatttactatatgcttggtgatgttctaaacactctcaataaccttgtgagttcaatatttttattatcatcaatactattttacagatgaaagaagcaaaggaaacgacagctggtctcgagcacactcgctcaagagcgccacactctacaccgtagagtctacagcgcagacgaagccaactcctcagagcgctcaccgcgctctttccgcagcctcccccgccgccggccgggcgtagcgcagggtcacgtgccggcgcggggcggggccagcggggcgcctgcgcgcctgcgcgccgctggccgacggaggggagcctgccgatgccgagcgggtgctacgtcccgcggtcggagccgcgtcttctcccggctccgccaccagccggggctcgggtgggggcccggggccccggggcatggccctccggagtgcgcagggcgacggccccacctccggccactgggacggcggcgcggagaaggcaggtacggaagccgaccggggcgccgggagcggcctgcgagggcggcccggggggcaggggcagctggcggaggcggcgccggaggggcgcgggctggggacccggggctgctgcggggttccgggcggcgagaggaacaggctgagggcccagggcacgtctgatgaggagagggcctggaactgggggggctcgggcgggtgccgagctgacccgagggagcctggcggcagagtcgcgtccccaggcagaagagcgggcggcggcttcgcgccccggctttcttccatctggagaggactgggactcctcgagcgcggaggccaggcccaccccgtcccaggcgtccgccacgtccgcaggctcccggagccgcctccccgaggggtatcagctctcccgaactgcattcaccgtcgccggcttgattgacgcgctgcccgcgtaccgccgatgtaattaccacacagttcttcctttaaggtgcacagttcagtgattcttagaaaattcacaaagttgtgcagccatcgccgctgtctgattccaaaacgaaacccttacccattaataggcactccgcgttccccggtattcacgacgcctggcaaccacgaatcgactttctgtctgtcttctgccacctattttaatgttattcaattgtgtaaaagcggccgggcaccatggctcgcgcctgtaatcccagcgctttgggaggccatggttggaggatcgattgaggccaggatttcgagatcaggctgggaaacacagcgaggcctcatctctacaaaaagtttttaaaagttagtcgggtgtggaggctcgagcctgtgatc

SEQ ID NO: 8928 - DNA, 6000 bp, Homo sapiens
ccctaggcaaatttatttcccttttaaacctcagtttcctcatctgtaaaatggagataatcataatgccagcctcaggattgtggaacaagatttgacaggtaatgtgttcaaagagcttagcacagggtctggcacaataaatagctgaggagtggcagctatggttgtcactgttgtcatggtgattgttagctcttttgctacagcttcctaaccctccgaaggtttactcctgcttcctccctggcgcctcatgtttctcctcacaacagccagcacgatcctgttaaaaactagattagagctggtctcttctgcccactcacggagctttttgctctagagaaaacacccaagctgtcaccacagggccacaggggacctgccctgtctcctcccctccaacctggctcccgctgctgcggccacactggcctcctagctgtcctttgaacagcaaaatccacttctgggacagagcaggtgtggccgcaccccagggccttttcacttgctgttttctcccctggaccgtgctttctgcagacagctcactcccacactcccttcatgtcctctccttgacagcggcacattccccattcaggagctttgctttcctccggagtccttgccaccatctgacctgctctatgtttctgttttttattctgcttcgtgaatgcttcctccaacttcctgagagcagggattgtggttgagcacacagttggtgcccaagaaatactggttaaaatgaataaataagaactgcaaggtcactgtaaaataaacaaacaaacaacaacaacaaaaaaaaaaaaaacagaaaatacagatatgcatcttttaaaagtatcccaacacattccgaacaccagccattctgagtctctccttttctctggggcctttttgcacatgtagttccctctgcctaagacatccccttcattgacattaatgactgttcctcactgtgtccccgaggtccaaaagcacacctcacttttgaggaaggagataatttgggagtgggccagggccatagggcagatgggtcacgtggggacacacccccactgtgcctggtttccagacaaggaaacagacccccggagccaaatcccatccctcaagtgacacagccgtggtagcacctgggtcaaaaccagagaattcgtctttgtggggagcagggatttaggcgttcagagcttaggagttgtcgaacatacaagaaagtgaggctacttctgccctgtctgccctcatctccccatccagccctctgtgggaaagctactgatgtttgtaaatgtttaactggacactctcattagtttaatagcttttcatatggcaaaggtcaccatcatctgcaaattcgcctactccccttaactactgacttagccctctttactaggtatatcatttattgcttttgctatatccttgtttattttgcaccttcgtctgctgtcttgacctggaagggtgagtcaggcctgtactgctggactgtgcttctgtccatttctcctggaatgtctgaggctatttcaggaaatattcagaatacagatagtcactacaattttgactcctttatgaattagagttttgatatatgaaatgactcttggtctcaatttatacttttggtaccaaatgctatatggagggttctgtgttcctctgttcctccctctttctctcttctccttttttttttttttttcatatctctgcaagacatttgcccccaagggtctaaacaactacttttgttaaattttgatttttgatcaaatcctggttgggacaggacctaagtttcagagtcagaaagtaggtggtaaaggagataaatgtattcattagtttttggttactataatctttcaatatatatcctggaatgtgtatctctgtgcacttagtatggagtagtttttgtctgtttgtttcttttagttttttgagacaagagtcttgctttgtcgccgaggctagagtgcactggcgtgctcttggctcactacaacctccacatcccgagttcaagcaattctcctgcttcagcctcccgagtagctagaattacaggtgcccaccaccatacctggctaattttttgtgtttttggtaaagacagggttttaccatgttgaccagttggaggctggtcttgaactcctgacctcaagtgatctgccaacatcagcctcccaaagtgctggaattatacgagtgagccactgcacccagcctctgagtacttttgttgtacataaaataagagtgacttaaacaacatagaagtttcttttacaatttaacaacaacattaaacaaacaaacaaaacagttcaacacaggcaaaacagggctggtatgggtgctctctgccacaaaatcccaaaggagcctagtatgcatctaacccccaccacatgcctcatagcacaaaatcgttgctggagttctggccatcacatctgattccagacagccaaatggaggaagagcagaagggcacactcccttattgttaactctttccctgtttgccagaaggaatacccacttgtgactgcagtgtttaccccaagataactttgccacaaaatacctcgcttttattattatttttgccttgctctagtatattgactttggaaacaaaagacatcactctatttgtagcattctggttttagtcgtggtatttccatttacaaaacaaagtaattctcgatcgctgaaaatagcaaatcctagcattcctatgtgtgatgttaacattgttcttgaacagttgttgaccaaagattcgtttgatgaatccagtttttctgaaatagatgagtctgatgttagttctggttagaaataacttcaaaaacagtttttacatgttattttcacattgaaaatcagtcagatttagggctgggcttggtggctcacgcctgcaatcccagcactctgggaggctgaggcgtggggatcacttgaacccaggagttcgagaccagcctggcaacatggagaaaccccgtctctactaagaaatataaaaaattagccggacattgtggtgcacgcctgtaatcccagctactaaggagactgaggcacgagaactgcttgaactcgggaggcggaggttgctgtgagccgagatcaagccactgtagtccagcctgggctacacagtaagactctgtctcaaaagaaaaaaaaaaaaaacagcagtcagaatcagatttgcttcagcctcaaatagcacgtttacataaaattaaatgagtgctggcaacgagctgcacttttttttctaaacaggaaacgggctaaggagactactcaaagtcgcatttgaattcattggcctgtgcttgatgacatggccatgtgcagctacaaagaaggctgggaaatgtagtcctttagttgagtggccatttgtctaacaaaaactgcgccttttttttattttttcttttttaagatggagtctcgctctgttgcccaggctggagtgcagtggcatgatctcggctcactgcaacctccacctcccaggttggagccgttctccggcctcagcctcctgagtagctgggattacaggtgtgcgccaccatgctgggctaatttttgtatttttagtagagacggggttttgccatgttggccaggccagtctcggactcatgacctcaagggatccgcccgcctcatcctcccaaagtgctaggattacagacgtgagccaccgcgcctggccaataactacatgtttttgaatgcaactgatacgtttgctgaaatagtaatcttataatgatggttcattgagccctcactatgtggcaggcacagttttagcactttagtgcatgttcctagcaacagttctgatgttggtactgacagcctatagctgttttgcaagagaagactctgaagcacaggaggttaggtcacttgctcagcttgtaagggttgaagctgggatttgaacccaggcaactggttccagatgttaccgcaggggagagctccaagatggcccgagtctagaacagagaaagaggccaaagtggggggccacttcttccaaaatattcctgagaagccagaaatgctgaaggttgcttgccatcccctccactgctgattacagtaacaaattgttaaacacactgggcaaaccaaagtaatatatctgctgtctggcagtggccagtgagttaacaatttacaaatcctaagctaagtcattgagaaaggcccttccaccttcaaaatgtcagattcccaagcagcccctgccctcaaaaagcttcagtctcaaggtatgtgcctgcatgcacccacacaagaacaacctgaaatgaaggggtcatgggccctggtgaggacgcctgagaaggtgaggcagccagaggtctcctggaggacggagtcttgtagaaagcttggatgtggacagcagagggggctggtgctccaggctgggaggacagcacaggcaaaggtgtgccactgctgtctgggagcttcccctccctccttgggtcctcttggcacgcctggagtgggcctcacctgtgctattagtcaagtcagcttcctaagggagggaatggagtctgaggcccccagaagggagggggcagagcgggactgctaggggatctgactgcgttacaccccaggagtggctcctcccagagaggaaaaggaggtgaccagaaaggccactgagcattgggttcgctcagtgaaggtatgaggaaggaagtcccagccctgtgagggaattccgtgtgtgggaaccgtggggaggagctgccaggattcaggagtttcctgggtgaggcgtggccacaacggacactcctgctttgtactagaaggaagaagtatggagttaaagactgcagcgtgaactgaggagtcccggacaggccgcttgctgcagaggatccagtccagatcccaggagagcccctctgccccttcggacctcgtctcccatctacaaaacgtgaagattggcccagttagcgtgtctctacaaaaaggtgcatataccactggtgagttcacttgatacctagtaggggaatcttttccttttttaaattttcatagtcatgtattaattctcatgtgaattagacaaaaataacgatgtcaccaaacctgccatttcacgataatgatcagtaacccttagaggtgcttaccctatgctgggactgttggaaacagcataaactcaccagcatccttatatctcacaacaaaccacggagttcatactatcactatcccctacttacagatgaggagatgaggcagagagaggcaaagccacttgcccagggtcacccagattgtaagcagcagagccagggtcaaactcaaacagctggctccagagcctcactcctggcatctcccatattactgctcagactaaggatagatagaagaaagttgttagtaacagcacaggtgggctgccactggtagctgacaaaggggtaaacagatggcagaatggctctggagggctagaggaagtggtctccaaaggccacgtagagagtgatataatttcaggaggaaaaaaagccagattgaaatcttatttcaggtaaccatatatttgcatcaggtaatatgtttacatggttcacaaatcaaaactcttattaaaagatatacagaggcagggccaggagcggtggctcatgcctgtaatcccagcactttgggaggctgaggagggtggatcacaagatcaggagattgagaccatcctggctaacacggagaaaccccatctctaataaaaatacaaaaaattagctgggcgtagtggtgggcgcctgtagtcccagctacttgggaggctgaggcaggagaatcacttgaacccgggaggtagaggttgcagtgagctgagattgt

SEQ ID NO: 8929 - DNA, 6000 bp, Homo sapiens
ctgttaacatcttacatgagtatatttgttacaattaaccaacactgatacactgttattagctaaagtccatactttatttatatttccatagtttttgcaaaatttccttttcctgttccagtattctatcaagggtaccacactacattgagtcgttatgtctttttaggttcctatcgtttgtgacaatttctcagactttccttgttttgatgacctttgaggagaactagtcagatgttttgtagaattttcttcattgggatttgtctgatgtttatctgatgactagactgcagctatgggttttggggaggaagacaacagaggtaaagtgccatttgtgccgcatcatatccaaggtacctactagcgacgtgatttgactgttggagttgactttcatcacctggctgaggtcatcacgtttgtcagtttctccactgtaaagttacttcccacctgcccccgcccccgccccgccaccccagcgctttccataaaacactcttggaaagggagtcattatgtgcacctcgcactttcaaaatggggagttacagttcccctcctcaaggactgagttatctagatacagaatttggaattctgcatgggagatttctcttttctacctgtttgttcagttatttttatcagtatggactcatagatatttatttcatactttttgttacagtccaatattaccttatttattttgtcactcaaatttttccagctttggccattgggaactctttcagttagctcctacccccaccatttgtgtgtgtgtgtggtgtgtgtgtagtgtgtgtggtgtgtgtaggtagtgtatgtgtgtggtgtgtgtgtagtatgtgtattgtgtgtatggtgtgtgtgtagtgcgtgtggtgtgtgtggtgcatgtggtatgtgtgtggtgtgtgtagtgtgtgtgtagagtgtgtgtgtggcatgtgtgtgtagtgtgtgtggtgtgtgtagtgtatgtgtagtgtgtgtagagtgtgtgtggcatgtgtgtgtggtgtgtggtgtgtgtgtgtgtgtagcatttctttactttctggcactatcagatgctctgggctcatcttgtagtgtttcctgcccaagtcctataaacagcaatttcttcaaggagccttggatccttttattggagaatggtattagaaaccaagatttcagtgctacgtgtgcttgttgctatggagtatcattgcttctaggccctctcgcctgacagtaaggaaataaatgtgtgtatactagcccgtgtgtgtgtgtgtgtgtgtgtgtgtgtattatatatatatataactttctgtatgtaatcatctgcatctatattaagctaaacatgagttcattctggtatctccaattctaatctgttgccacatggatcattctagcctcctcctcaggggtcatttttatcagaagcaatgttgcttagtaacatagcagacatatgtttatctgtttccaggaaacagagcttccaaaggtcaaattctcatgcaaaagaggaaaaggttttgttaaccctttacttacattcatcagtgaggctctccactgctctgaggataaagaacaaattacttggcctgtaaggctctgcagtgacctgacctgctaagcccaggctcgtctcctaccaggttccttatcaggccctccatgacaaccatactggtctcctgcaactctcaaactcgtcacacacttccttctaccccaaggtcttcgcctatgctaggcgctctgctggacttctctttcctcccctctttatctggttgccttctactcatccttctaatctcagctcagtccacacttttacaggaagccattcctatccccaagactaggttggcacccttgtttgaggcttgcactctatacttttatttggtagcatttactataactgcaatgttacatttacttatccttttctcccactagaatacaagcttcctgagtgtagggatggagtctacctagctaactagtatataatatttgcccattttctctgttctttattcagtgagcacttatccagagcttcctaggtgttagccccttttctagtgtctggggatactgcagggagggaaacaggcaaaaaccctcttcttttggcacttattttttaggggaggtggcaataagcaaacagaaactaatgtcagttggtaagtgctatagagaaaaattcagagtgagggagtaaagagtgctggggcactgctatttttgaaaggatggcctggaatggcgtctctgagaaggtggcatttgagcaaagacttgaaggaagtgagggaagggggtgagtgcgggaaatatcagaaagaaaaacgtcccaggcagaaggaacagccagcgcaaaggctgaggtaggacagcgcatgactgagggaaggaacagtgagtgctttaaaggcggtatctcatcccattcccataacacttcctacatccgtttcacagaggaggaaaccgagctccaggagggcagtcctttacaccagggcacccagctgtgggggtggagctgggatttgaacaggagtgtggtgccagggctagcatccctttgaagtctctaacaacgggccaggcctctgcaaggctgggaggaaatggaggccttcccagccctggtggacctgcctagggctaggctatgctggccttgaaggcacaggcatccatcatccagggtgacttccagtctcctggttggggagggctgcacagaactttggaggagggcaggtcaggctccgctcatgaggtggccgaggagcaggacatggcacactcattcgcctgtccttccacatggccaacttctgctggccttcccagagccctcaaagcctgcacattcacaatcctcatggacagaagtggatacaggctcagaggccagaggtactaaccgagaccacacgattcagctggtcaccgtgtcttcccggaacctgcacgattcagaccaaagctgtctctggggttggcgtgtgttccccaaagaggaaacgtctccatgaatttggtactctaggcacttcgctggactcatcttaactccggccctgtaaaggaaagaagtgaaagtcaccccttttcacagcctgttcacccacacccacctaggtcttctaggtgatcagacatgggtcctgctctccaggagctgccaatccgatggaggaggctgacccttaaacaaaatcacgaccgtcagagacaagagcaaacagtgcgggcaaaaggagagcccagatggaggggcccgtggggtaagtgggtgtgtgcccagggaggggttccaggagaagaggccccacagctgggccttggagggtgagggtgtgtttggccattggcaatgcccccaggagaacacccctcttgggcggagcactccactgtcccacggagaaaaaaattgcagagaaaagggggagggggatcgtcggattctttcttgcagccttcaggtggcgcccttgagccacggagccgcaagcgcccgaggagaccgtcccgacctaaggacctcggagaggacccggggtcctacctgggggctgcgtgcggggtgggggtggggggaaggggaagtggcagagtgggggtgaggagtggggaggcacctgcgcttggcgcaataggggctctccggtggtggggagggatcttcttcagcagcccccgcccgccccgcccctgcgcccgtggaccgcgggctccaagccccagttccctaagcccaggcgccggcgatccagatctgcctggaggggaggggaggacggtggatcggagcccccgcaccctcgccccagcccatcacccgccttcctgtccctctccttgctaactctccgggcgccctcgccggccgcgggcggagctccctccgcggcgctcggcgagccccggcccccgccccttctcccgtccctccgtccccggatcccccccccgcctccccagcggccgccaccgccgccgtacagctccgcgcggcgcgagtaggtacgtgcgcctcggcagtggctccgggccgggccgggaagggggcgggagaccgggagggcgaggcggtggcggccgggcccgcgccctccgggctgcgccgcaggagagagacccccgcaggcgagacccccgcaggcgtacgccggctgcaggaaggcggacgggcaccggagaggacgcaccctcgcccgccggcggccgggcgcccttcgccccagcgtggtgaggcggggagggaggcccggcacaggtacgcacgcggagaggggaccgctgggggcggcaggaggccgagggccgggggcggggagtggcggcgaaggacggcgagcctgacctcgcggcccgccgaaggacatgcgaccaggggacccggcctccccgggcctccgcctggtccggttcggccttccgggtcccgcgtctgtgggcaagggcaggagcagggggtgtggactgggccggcgggagcgggcgcggtgggcagccggcgtgctggggctttctgcgcgcaactttgggtacaacagcgtggacctgcgtgtgcgtatctgcgcgccccaaggctttgtgtacaactcgtgcgtgtgtctatcgactgggttttgtgaagcttcacccacagccgctgtgcgtccctctctccgggtgtcagtgcgcgcggcgggtggggtattgggcccctgcgggtcttggtggatctggcttgggtctcactcccaggggcactttgtgtgtgtgtgtgtgtgtgtgtgtgtgtgtgtgtacgcgcgtgtgcgtgtgacggggtactcgcgtggcccgaagatccgagggtcacactacgtgacttctgggtgtctgtgggtactgctgtgggaacagctgctgggggagtgtgtgtggaactggagtgttcctttcaggacctgtctgactgcagatgaaattagtaactggtggggtcgtggggtgtgaatggtgggcgggagcagctatgtcagttggtgtgtttctgcttatgttagggtaattgggcacggcctttgtgtaactggtgaatatctctgaacctgggcatgaaacagagagatgtcctaactctgggtgagaggaatcctcatttttctctgccctctcactgtggcatcctaagaaaaaagttttgggttcctgcagcatgaaggagagctctgctcccagaatttgggagctccagatttcttccagggtgtggaggcatcaatatatcagtctgggaaaggggttcctgggccactccaggagctgagttgggtggaaggtgctgagggtgtgggtgggggccacttctgagcacccatgtggcacccactgctggtccctgtttgtggctgggcactcaggaaaatgtttttggtgctaagagtaaaaagccaaccaacaaacacatctcttttttctgtctattcactggaaagtaaaagcagtctgggcgcaggctggggacccagatggaattcaaacttatgcctgctctcaaggtgctcacggttgctgataaacagctggataaaatgaagagtctatgagtgagggatgcagagccagggaaggctggtggagtgatgccaccagcacaggggtatgagtttgcaggtttgtacatgataataattcttagggaatctgcattcaactcctgtcctccaccctcccatacatgccatgggatcttggccatgttttatgaaatagagacagtaattccggatcgtggggctggtgagggtgatatgagatactcctgcatgaagtgtcgggtacatggctcaacagctagtaggtgcttggtaaacatttactaaattgagactctggaaagagagacgtagtgatagaaatgggctgtaaagggaaaagagctttgtactcacatgaaaggccctatatgtg

SEQ ID NO: 8930 - DNA, 6000 bp, Homo sapiens
tccctcatgctccagccatgtgagataagtctccatccactttgccttccacccttactgtaagtttcctgaggcctcccagaagccaggtgtatgcaagcatcatgcttcctatacagcctgtggaaccaggagccaattaaacctcttttctttataaattacccagtctcaggtatttcttttagctgtgtgagaatgaactaatacaaaaaattgatactgacgagtggggcattgctataaagttacctgcaaatgtggaagtggctttggaactggataatgagcagaggttgaatgagtgtagagggcttagaagacaggaagatgagcgaaagctgggaatttcccagagatttcttgaattgtgaccaaaatgctgagagtaatatggaccatgaagtccaggctgaggaggtctcagatggaaatgatgaacttcctggcaactggagcaaagatcggttttgttaagtcttggcaaagagcttggaggcactgtgcccctgccctggggttctgtgaaacattgaacttgggagtgacaatttagagtatctgctggaagaaatttctaagcagcaaagcattcaagaaatttcctgaggcggggcacagtggctcacgtctgtaatcccagcactttgggaggccgaggcgggcagatcacgaggttaggagtttgagaccagtctggccaatatggtgaaaccccatcactactaaaaatacaaaaaaaaaaaaaaaattagccaggtgtggtggtgcatggcacacacctgtagtcccagctatttagcaggctgaggcaggagactcacttgaacccgggagatggaggttgcagtaagccaagattgcaccactgcactccagcctgggtgacagagtaagactttatatcacacacaaaaaagaagaagcagttacctcgctgcttctaacagcctaattcatatgcgtaagcacagagatgacttgaaactggaacttatatttaaaagggaagcagagcataaaagcttggaaaatttgcagcctggacatgtggtagaaaagaaaggcccattttcaggcaacgaattcaagcaggctgtgaactttgcatgagtaaaaagaagccaaatgctaatattgaaaacactgggaaaagccttcaaaggcatttcagagaccatctctttacaggcacagaggtctaagagggaagaatggttttgagagccagaaccagggcctgctgccgtgtgcggccttcggacacggcccactgcaccgcattcactccagctccggtcttggctcgaaggggctcgagtatatctcggctgctgcttcagagggtgccagccataagccctggtggctccatgtggtgtgaattctgcaggtatgcagagtacaagagctgaggattgggagcctctgcctagatgtcagaggatatatggaaaagtctagatgtccaggcagaagccggagccctcatgaagaacctctactagggcagtgcagaagggaaatgtggggttggagcccccacacaattcccactggggcattgcctagtggagctgtgagaagagggccaccttcctccagaccaaagattgatagatccactagcagcttgcaccatgtgcggggaaaagctgcaggcattcaacaccaagtatgagaagaaccgtggaatttgaattttgcaaaggcacagaggtggagctgctcaggttttgggagtgcaccccttccaccagtgtgccctggatgtgagacatggagtcaaaggagataattttggagctttaatggctgccctgctgggtttcagattgcattgcataggcctgtattccctttcttttgggcaatgtatctcttttgaaatgggagtattcccattcagatggctaaagccaatgcctataccccattgtatcttggaagtaactgacttatttttaattttacaggcttataggtggaaggcacttgccttgtctcagataagactttggacttttgacttaatactgaaatgagttaagactttgggggacttctgggaaggtatgattgtatttgcaatgtgataaggacataatatttgaaagtgggcaggagaaaatgataaggtttagatctgtgccaccaccaaaatctcatgttgaattgtaacccccagtgttggaggtaggacctggtggaagttggctgggtctttgggtcagatttccctcttggtgctgttctcatgatgatgagtgagttctcatgagatctggtggttttaaaatgtgtggcacctccctactctctctctccctcctgctctggtcgtgtaaatatgctcacttccccttcaccttttgccatttttgtaagtttcctgtgacctcccagaagctgataccagcattatgcttcctgtaaagcctctgaaaccatcagccaattaaacctcttctctttatcaattacccagtctcagtctcaggtatttcattataacaattatagaaagaacagattaatacatccacctatttgttttttaaacaatttagcactaattatattttttcaaaattcttctttttattacttttctcagatacctgttgttactgcacacctacctattcttgtttcacacgtgactttgttttatggatttactttcttttcattatctctataaggttactaaatatgttaatgttaaaaatattttcacattttatatttttattttctgaggtattattttctaagatgttattttcattgctgtttttgttttttagttattgtttttgaatttattatgatgtcgcttttccccaaatctttagtgattactgctttcactgtaatctttacaggaataatgccctgagtgatcatgggctgtcagcactttatggaacatggcacctatcccaaccttgctgtggaggctgcgcctaattgacgttatggcttcttctctgcttccttcctgagagatatctctcccttcttatgagaggtgtcatagtgaaggccatggagtgtgacaacctgtgttctagttctaaaagctgggtgatgttgaacaaatgtattattgcctgcgtgcctcaagtttcctcacctataaaaaaaggttaatggtagtgctaatttcatgggaccagagtgatgaattaatgaggtaactgacaaaatgcttggcacagtacctggagcacaggacatctgcagtaaacacagcagctactacccttcatgtcatatagagactagtttcttgttttaaagtgtaatttggcatcgattaacatgattttatcatttttatattcatttctgtgagtgtggagcaggaggtgatgatttcaccctctgtgcatctgccacattgaaaaagaaatttgcatggaaatgtgatgacttttacaatttcatttgacaattactcatgataggtgaaggattgcaagcccagcatgggaaagagaggtttccagacaggtctttcttagtcacagatgatggaggagaaaccatttctcctaccaaggaaatttttctaaagcacaagtatgtcagggaagcagtgaactcaccctgtacacaaatgtaattatagccacaattttttggttataattaaatatgaatcaaaccttctgtatggcttatattactcttaccatatcactacaaggtgcatgttataacttccatttacatgtaattaagttaaggcttagagaagtcaagtgtcttgttgaaagtcacacagctggagattgtaagaaaaggaattcatctacagattgacaaaaagcagggtgaagaggatccagagggagaaattgatctcagagtgtcagaggtagaccaagtacaccataaaagctgggttccagaagtccggggaacatgggagaaggccactggtgggaaactcagcatgcagtagaaatccatttaaaagcaatatttgagttccctctcttcacctggcaccatgagtatcaataataacctactgaatctcagggatgtatagtcattatctcttttgatgttcactaaaacatggcagtgagacttattatcccaaggttagaaggcaaaactgaacctaggcaggcccagtaacttccccaactccttagcacatcttcttagggtatttattctccctccctcctcagttcccatctgaagacagtgatgaatggaataggtgttctatgtgcagagcaaagagtattgaaatcgatgtgactgctccaggaatctgccctccatattctcccccataataaacatatcccctttccataacccataatccccacctcacctcacaaagcagatccttattaccctaagcccacttcctctcctggaagaagtcaggaaataattccttctgctgggtgcaggcatatgaaagtgctaacggccacatgagactgaatttgggctaagttttgccatttatatttataaaagttcggaatagggaaccatttcaagagcagacctgttcctctccaacactgagcaggtccagtgatccctcatcctgccccaactgagtagcacttggttgaggctgttgtagaatgagaccacaagccaaccacatcctgaggtcttgagatggaaagtttaggaaacatttcataaccacaggtccttcctggcttaagagcaccaaatggcaaatcaccaagaagacataaagatggggttaggagtcatggaaggagttaagacctcaggtgggaaggaagcattatttctgctaagcctgtctgattctcctgaaatggggcatgcataactgcttgcattgtagctgcttgctgttcctgatttctgtttcacaatccagaagcaggttactgcttcactccatcgcagccacttcctcttgaactaagggaggcagggcttgtcttctctcctcagagcagagtctgcgatcttcccagcacagacgtttggacagagcaggctcctaaggtctccagaatgcccgtgccagcctcctggccccaccttcctagtcctttcctgctgatgacgctactgctggggagactcacaggtgagcactgccttcggttaaaatcttttttcctgcccactgagccatggcctgtccctggactttcagggattccggacaatgacaagtgctgccaagaaaggccaaggattaggctttgactgagagcagaaaatcagggagctgagcactttctctgtggatctgcagctggctaccagaggcattgaaccacaggacgattcaaccaccacaacaacaattacttacattttgataatatttcaattgaaaaagcagagaagaatcattatctaaatcctcaccagtcctgaggccctagggccaagtgacatgcccaagtccacagagtaagctcagagacaccctaacagggttatgtggctctaggcccagccctctctcttcaccaaactgaggatgtgaagtctgtaatagtgctcacttgagtagggcagtggtgtggtgtatcctgggagtgttcagccaccatcctccctaagggtgctcctcactttgtcctctgttcccccatgctcctccctcccctgtgacctgattcttaccacccatttctctgtggcctcttcctctttaagaagttccacatttgctgcttactgggtcctatattcctttcctagggcttccataacaaagaactgcaggctgggtggctgaaactacagatatttacttccttgcagttaaggaggctgaagtccaagatcaaggtgtcagcagggttagtttctactgaagtctctctccttggcttatacagggccattttctctctgtgtcttaaacacatgatcttcctctgtgtgtgtctgtgtcctcatctcctcttcttatgagaatatcagtcttgttgtattaaggcccaccccaatgacctc

SEQ ID NO: 8931 - DNA, 6000 bp, Homo sapiens
tgaagccctggtaaacaactctacattcaatgggaaaaataatggttgttctgtgatcctcataattgttgtcaaagtattagaaactgtcatattgtcagttagaaatgtagcaggaagttcaaatatttagtatactgtaattcaaagcattagaaacattgagagttaaattgttttatttctttctaaaaatgtatcaacagtagttggaacagtgcttgcctttgtcttgcatatttactatatggaacaagcgaaagaacaataggacactctggtatatttttaagtgattgcttttcctttccgtgtcctgggagcacaagtgaatatttctcctatattcactctgacgagctaaccaagctcccagagataaaactcacaaaagtgtgggagacctccgttattgggtcctcctcgagtttgtgtctaagactggcccacactgagcctcaagaaattcttcaattacagtgcaggctttccttccccggcactggttcccacagaggttttggcttcaggaagttgtgattctctatattaccctgcccaactcctcaattctggggacagtggtttgccctgtgacctcgtttttctgacagatctaagaagaaatgtcacttttgatttgctcagctggttccttggtgttgacttaagggactttttgcaggggttgtgcaggggactgggtttcatcccagaaagctgctacagccacaagccctcaaatgtgccacatctggaattatggtctctgaaattgcaagctcagtccttagctacagagccctcttggtctgggctgtcaatgaggaagggtcatgggacccctggcatgagatgagtgcctctgaaacagagagcaggttctggggcagtggacctctctccagtactggctaaatctacccaggcctgggaaccccaagcacagacatccacaacttcccagagatggcaactgtgtccacttcctctttcacaatggaggattgtcccagtctcatggccctttctccctacagctacctcactcctcagacaacatagcagataagcagatgccctcctttcctgcagagtagagtctggattctctccatgagacagtctgacagggcaggcaatgtccatccctgtctcccagcccatctggacagcccctgccacttcctctgctaccaggactcacaggtgagtgagtgcagcctgctctacatgagtgtatttctacatggtgtctcctcaccctctcagcccatgttacctgctcctattgatttacatttgggagcattttcttctctcccatcccagcatgagacaagatttggaacagcttttccatgagcatttgagtagacccttactggggtcatattgattcccccagacgtcatgcctatagcatgcccctggtgctggtaatgactccatgattctagggctgggcacatgacctcagctcatcatcgtcgtactccacctccaccagccactggccaaggttgtcacacagcatcataaattcttgagggcagaggatctgttttttaaaattgttgctattaccaaaacactacctaataacgataatatctaactactatctataatgataatggtaatactgaatatataacttttggaggacatggtcagatagtattaagtaatttgcatatattagttcatttaattctcatcacaaacttatgaagatggtatgattattctctccgttgtacacttggggaaactcaggaaacagggaagttaatagtgaccccaggatcacacagctgggacccattagagctggatttcagaccaggaagttttgattcttaagcccacagtcttacatctttagtcttctggagcatccactggctcccagtttctcatgtgtcccaaagtcgtccctggttatctgcacctgctgtgatgagtcagggtgaaatatggcagataaaggagaattttggctcatggactcccaggttcctggtcctctcaaacattcagattttatctatgcttccccaagtcacctaaatttaaatttcaattctccacgtgatttccacaaaaattgtaagcatctgtgtacttagttgatctttactgaaggattgaagttcacaggaaggcacttgctgctctaagcacagattctgccatcttcctgacactatactatgcatttttgagtcatatacgcccaattcttatttttggagacataatactttatgactcacacctctcaaagtaatgtagtaatgtggataggtaaaaatagagcaataggaaaagatataccacaatattgtggtatatttttacctatccacattactttgtttgggtgtgtctctgtgctgtaccacaggaaatttcccctacataatcacccagcttactaacttactattatacttatttatgtatagtcagctagtcaacctattaagtttttttaaaaaatttcagcactgattatgttttcatttccaaagtctgtgttttggtattttttcaagatggttgttgttacctcatgcccgcctatttctgtttcatattattacatgcctgatgttggtttatgaatttacttctcttttgttttccttataagatcattaagtatactaactttaaagaactttacacattttgttttttcatatttgctcaggtgtgaagttcttttgattgctatttgtttttgagttattgtttttcttgaatttgttagctgcagtgctgttcctcaaatctttggtgattcttgcttgcacttccgtcttcccaggaataattccccatgtgatcatgggttgtcagggcctcgtggagcatggcacctgccccagcctcactatgagggctgctcctaattgaggctatagcttcttctctgctttcttcctgagggatgtctctcccttcctgcaagaggtatcatagtacaaccattaaaagtgaaggctgtggagtgtggcagcctatgttccagttctaaaagccgggtgatcttgagcaaattcattactctccatgtgcctcgggttttctcacctgtgaaaggaggttaatggttgagcttacctcatggggtcagagcaatgatttaatgacattaccaatagaaaaatgcttggcaccatatctggagcacaggaaactctcaataaatgatagctgttataattccttcatgtcatatagaagccaattgcttgtattcaagtgtaattagacattgattcatatattcttttcattttgtgttttcactactgtgggtgtggagaaggaggggaagatttcaccctgtgtacatctgccacattaaaacaggactttcaattaaaacatgataacatttacaatttgatttgacaattattcatgacagattaagaacctaaaacccacatgtgagatgaaggattctggacaggtctttcttagtcatagatgctggaagagaaatcatttcttttaacaaggtggcttttctaaggcacaacggtggcagagaaccagtggactcttcctgtacacagaaaataattatagccatgtttttttgcttataattaattatgagtcaagcattcagtatggcttatattattcctaccatagctctacaaggtgcatattctaacatttatttacatacaatcaaaccaaggctcagagaagtagtgtctttttgaaaatcacacagctggaaattgtaagaggaggaattaatctatggttgaacaaggagcgggatttagagaatccagagggagaaactgatttcagggtggcagcgagagtccaaatacactatataagctgggtctcaggaggcctgggttgctgggagaaagccactggtgggcaactcagcatgcaggagggatccattcaaaagcaacatttgagttcccgcacttcacctggcaccgtgagtatcaataatgacctactgggtttcaggcatgatatgctcattacctctttaatcgtcactaaaacactgcacaaaaagacttactattcccagtttaggagattgaaactgagcataggagggcccagcgacttccccaactccttggcacacactcttggcaggagcatggatttttcctctttcctcatttcccatccgaactcagtgatgaatgaaataggtgctctgtgtgtagaagaaagggtattgaaattgatgcgacggccccaggaacctgcccaccataatcttccctcatgataaccctatcccctttccataacccacaatccccacctcactccacaaagcagttgcttattacctcaaacccagtttctctcctggaaggagtcaagaaataattccttctgctgggtgcaggcacatgaaagtgctaaggtccacaagagactgaatttgggctaagtgttgccaattatagcaatttggaatagaaaatcatttcaggagaagatctggttcctctccagtgttgagcaggtcctgtgaactcttctcctacgtccagcggagtggcatttggttgaggctggtgcagaacaagaccacaagccaaccacatcctagggtcttgaaataaagactttagaaaacaatacctaacaacagatctttcttgacttaaaagcctcaaatggcaaatcaccaagaagacctgaaaatgggtttggggacacgaggagggagcacaggtcccaggcaggcaggaagcattatttctgctaaccctgtctgattatcctgaaaatggagcacgattaactccttgctttgtagctgcctactgtgcctgatttgtaagtcacaatctagaagcaggttactgttgcattccatcatagccacttcctcttgaattgagggaggcagggcttgtcttctgtcttcagagcagggcctgacatctccccagaacagacgtttgaacagagcaggcttctgaggtctccaaaatgcctgtcccagcctcctggccccatcctcctggtcctttcctgcttctgactctactgctgggacttacaggtgagcattgcattgggctagaaccctttctccctgcttcctggacctagccttgcccctggacttgcagcaatttcagataagcacaagcactgccaaggaaggtcaaggactggacattgtccaagagcagaagatcagggagctgagcactttctctgtggatctgcagctggctaccagaggcatcaaaccttgtgaggcttctgccaccatcacaattagttacatttttataatattttatttgacaaacacagaagaatcattattaaatccttacctgtcttgagtcctcctacccatttttgtgtgccctcctcctctttaagaagttccacatttcatgcttacagcgtcctatattcctttcttagggcttccacaacaaagcaccacagactcagtaactaaaacaatagacatttactttctttctttcagttctggaggctgaattgcaaaatcaagatgccagcagggttagtttctactgaggtctttctccttggcttgtagaaggccatctcctccatgtgtcttgacacatggtcttcctctgtgtgtgtctgtattctcattttctcttatgagaacatcagccatattggattaaggctccccgccagtgacctcatttaactaaattgcttcacccatttatgcctagtgctccgttattggatcactaagcttgcgggagttatttatatcctactgctcaagggcatcgccaaggtctgatttttcaaattaaaaaaaaattgcaacctcgggcataaatgggttaaagaccttgtctccaaatatggtcaaattctaaggcgctggggattggggcttcaacccattcgttttgggggcacattcagcccataacaggcaccaccatctcccttggtcatcttgacttt

SEQ ID NO: 8932 - DNA, 6000 bp, Homo sapiens
cacagggtgtgcagaagagacctgttttaggaagtgacgtttaagcccaaagccagatgcagtgatggaaggaatgtggggaaaagtgtgttcctcagagaaggcacagcaagcacaaagtccccgaggcaggaatgtgcttggtgtgtttgaggagcagcagggaggccagggcagctgcaggaagcggggaggacaggaggtcagcagagagtagaccttccaagtgaggaatatgtggaccttcttccaagtcagatgaaaaccactggagtgttttaagcaggggtgaagtacaatctgagttgcttttcttttttttttcttttttttttgagacaaggtttcactcttgtcacccaggctggagtgcaatggcgtgatctccgctcactgcaacctctgcctcccaggttcaagcgattctcctgcctcagcctcccaagcagctgggattacaggtgcccaccaccatgcctggctaatttttgtatttttagtggagacaggatttcaccatgctggccaggctggtcttgaactcccgacctcaggtgatccacctgccttggcctcccaaagtgctgtgattacaggtataaaccatagcacctggcctgagttgcatttaaaagaatctctctggctgctgaggaacaaatagtaggctgggtaagggcagaggaagaggccagccatctaggagagaagtgacagcgaccgggggcccaggcgatagagtcagaagcagtgaagaggaggtgtcagggcaagagaaagaggggagtcaagagcaactcccccaccatcccactcaactcttcttgcttgtaggcctttgcctaagctgttccctctgcctgacatgccctttcttgccctctgcctggaaaactcccacctgtgcctcagtcttcagcttcacgctcactttctccaggaagccttctcccaactcttcagcaggctggttgggagccccttttctgttcccacagtattccaggtctcctagcccctacttgccgtactgctgtgagtggctgttcctatacctgcccctcaacctggattgtgaggacaaagagggcaaagttgtgtgtggcatgttaagccctaagggctcagcactgagaatggcacattgggatgtttcaatacagatatgtggaagaaaaggaagaggaagaggaagaagaagagaaagagagagagagagatgatgagcacagctcctcactccctcttgcagcagcgaggcacaaacacgacggctggggcagtgggagtctctcacgcgcttgcccacccagccccggtgtggacatccacgctggacacacggcagcatgaaaagtgatttgggagacttgatgctgaccacaggaccggaacttcatcccactgaggtcctcctgagtgatccatgttgcctgctgccacttttccaggctgacaggtgagtagagaacgcacacagagctcggagcatgaagcagaacagggaggagaagcccaggcgcagcgcagctcatggctggggcacatgcctggagtcggattgcctgggatcaggctgtgctctgccactttctacctgtgtgcctttgtgcgagtgacttaacttctcccagcctctgtttccttctctgtaaggtgggggcaggaattgcatctaatggcagaatggtggggagaatcaggtgttgatttgtgtcaagggtttacaatggggcctggtagtagacagcccttcagaaatgctggctttgtttcttaacttttctgtcttccagcctgtgcttcctgaatcctacctaatggagtgatttgaggactggttgttttaaatctttccttttctttactctttgccttttgcccacctcgagatctgcagtagaaactggtcatgcacggagggtgtgcagggaagggagcattctagagctttggaatgagccctgacatctgtataaaagctagcagcatcctcctgtcttcagaatgactcaggtgctcagagaggcgaagtatccatcagttgtcacacagtgaggaagcagtggcgtcgggatctaagctgaagtgagcctggctgagccatggtacccacccccgggactgctgcccacagggccagcaccatgattggtgcatcactgagcccaggagagggtgagctttatggcaaggttctccaggactaagggggaaggctgctcctggccttctatgtgtgtgtgtgtgtgtgtgtgtgtgtgtgtgtgtgtaaaggaggctgcggaaggagaggaaaggcaaatgcaggaactatttgctcttgaggcaacagtagactcagggggtgaaggatatcagacatcaatggcttaatgaggattatccatgagtgtctctactctcactgccccaacttccctctggtgaataacagtcaggagaggcccctgtcctctgctcttccagtgcttgctgacttccagccacgggagccattgtactccctctctaagagtctctgtgtattcgaaggttattaccaagagcttatagaggcagaggttaggaggagaaggaggaaatgaaaaatgaggaaagagagcagttggagtgaggctttggccttggggatgaagtagacgctcactcctgggctcccagattcccagggtggcaatgaatagactccactcatgtcctctggccaccatgcaagaagccagcctgagatgtggccaagtgcttggtgaccctgcgcactggctatcaccaactgggcaggggcttccacatagggcaccaggagtcgcttgcacccgccagtcagaccccttgtgctgcctcgggaagaggagacagggaggagaaggaaagtgaggctgtgggtccagaggggagtgtggtggggctgcagcttcaggatctgagggatgggtctcggttcttcctccctccctgggtggctggggcctctctgaacttctgctgccttctccatctgaggacgcattgtgagatccacaccacaggttttcttgttgtgaggatgtgatggaatgtggaaatgtctgaggcataataggtgttcagcaaacagccccttctaccctcctccttatgtgagagtttaacgagccaggtgcagggagaggaggatgcccaggagaacctgctgcatcaaagctggagggatgtggtttatcaggaatgatgggagcagaacatccgctccgtactggctgctttaagtgctattgacacatcctcctttcaccctcacaagagcccaagagccccatgatactgttgtccccactgtacagatgagcaatcagaggttgaagttggcagcttatccaaggtctctccgatggtgagtggcagacctgagagtcaaactcacatcttaaatgtcattaagcacagcctgtgtatggagaggctgagtcccagagaagaaaactgaccccacccctcagtgtgggcagattcaagcctggggagaggcaagggagggggcagaaacttggagggtagatggacctgactttaggttctagctggatgacttacttgctgtgtgtctctaggaacttggagggtagatggacctgactttaggttctagctggatgacttacttgctgtgtgtctctaggaacttggaggatagatggacctgactttaggttctagctggatgacttacttgctgtgtgtctctaggaaagtttctcagctctcaaacctctgttttctcatctgcaagatggggataatattaaccaactggctaggtcatgaggattaaatctgacaactctacctaaccgcctggtgcagccaggtgcccacaaaatgggcggccctgccagacttctgaaatagttgtgcctcccaccacaaactgtctgctattgactgagaagagaagcatgttctcttccaaactcaaagacccttatgttctggaagatctctgtagcaatgaagagtgccaccttcaagctgctgctggtccaggccaagggtatattgaggtgggtccatccctcacccagagtgtgtgctgaggcatattgcagcccatattttgaggggtttttcctgctattcattttgtgttgccgccagagaaaactaaactgcagctcctggctgtcggggaagagctgtgcttctgccagggctagtgtgcctggcaccagctcaggcatgtaccagagccgaatgccgtttgcaggcaaatgtacacacaaaaagattccagcacacgcgtgcaccagccaacacagagttgccacggcacgcaacagcgggccatgcacgtgcctgctgactcggctgtcatcttccgactctcttccgtgatcagaagactgtctcagcctctgtctgtctccacgtctgtctgtctgtggatcagtgtgttttgagtctgacagtctacctggctggtttccttttttcttgctctgtccctctctccttgtgtttctacccatctccctatctctgccactctctgtctctgtttttctttctctttctcccctcctttgtatcactccctaggtccgacattgcctctttctcgatttccgattctctctgagtctctctctctctctctctttctctaactcttctgtctctgtccttccctgtcttctttttcctgtgacactctcctggaaacgcatcaaaaactgaagtggccggatttcaagtgacaaacagcactacacccagaatccgccccctccccaacacggctgccttcctcctccacatccctgtcacgaagagaagcctattgtgtcaggcccagggagttcgagttgaagggcctgggggtctgtgctctgactgctctcagccacttccccattggctcccagcagcctgtgctcagcaagggctgagcgacaggggaggctctcgtccataaaaggggggaagaggcaccagaactgccatttgaaggggctttggtggtgttcacagctgcctctttggcacctcctcccaagccggagtcaaggaggcccctgagccttggaccagccactgccacctccgacctgctcggccagaagctgcccagggacaaagcagagtgcaggtaacatccagagggggcactggaattctatcgcttggttttatttgcttattcctggtcctctggacctagagatggtgggagctcgggctggggattttaggtttgggtctgattatctagcaaaggtggttacagttaggaggctagttcacaaaagccagaccagtgagagactgctctttggactctccctttctgcacagtcctggcttaaacaggtggtaagctctctcccaagaggaccaccctttggctttagctccagggtctccttcttgcagtctcccacacagcagttcccatgccattcccagggtctggggaaaatgggacaccctggatgggagaagtgagaggtttcactaatcagggtgattttaaaggtcaatgagtctcactggacttagagaacaatggcttgaggacattaatgagatccaaggctctggcatttatcacataacatgtacatcaatgtacggccaggttcggccttttcattcttttcggattgtgtttaattgctgacagggtgctggtttgagcggcttcttttgatggaatttgatacaggttgaagtttggggatgttttgttggaagggaatgggaaaagggagtgacaacaagccaggaggcccaggcttagcaggcattttcttgtccattttacttggaaaggacttgttgctctcctattaactacagccagaggagtctaaggccaggaggaggctcaaagggaaagccatttgctcactggtccagagacccatattcagaaaagtaccaagtctcaaagtttgattctagcaaaaagctgatgagtttcaggaaaaaaaaaaaaaaaaaaaaagcctgctgactact

SEQ ID NO: 8933 - DNA, 6000 bp, Homo sapiens
ctgaagtgggaggatgagttgagcccaggaggtcaaggctgcagtgagctatgattgcgccactgtaatccagcctgggtgacagagaaagaccctgtctaaaaaaattaaaaatatttggaggggaacaggagactggcatgattgttggggtccagttagaccaccagggagtatcaggcagttgattcagtgggcagctgagcccagtcacttggcctggttcagagctggacatagggctcccataaataactaaccattacagatgacaagtcctcaatcatagagagagagcgtgggaacagcacctctcctccccaggaacagcgaggaggcggagcagctgcagctggagaagggctaccagaggctgagaacaccggtcaaggcagcgggagccccaagaggctggtaaaatcccagtgacttcagagagagcggctggctgcgaggtatgggaagccatgcctgccaagggtccaaggaaggctatggcagccaggatgctgcagacccgaggtagaaataaaaggactcagctgagtgccgtggctcacacctgtaatcgcaatttgggaggccgaagtgcgcagattgcgggaacctgggaggttgaggctgcagtgagcagtggtctcaccactgcactccagcctgggcgacacagcaagcccctgtcttaatgaataaataaatataaaaaaataaaaataaggctgggcacggtggctcacacctgtaatcccagcactttgggaggctgaggtgggaagatcgcttgagcccaggagcttgagaccagcctgggcaacatggtgagatccccatctctacaaaaattaaaaaaaaaaaaatgccaggcacagtggctcatgcctgtaatcccagcactttgggaggccgaggcagtggatcacctcaggccaggagttcaagaccagcctagccaacatggcaaaaccccctctaccaaaaatacaaaaattagccaggcatggcaggcggatcatgaggtcaggaaattgagaccatcctggctaacagggtgaaatcccatctctactaaaagtacaaaaaattagccgggcatggtggctggtgcctgtagtcccagctactcgggaggctgaggcaggagaatggcgtgaacccaggaggtggagcttgcagtgagccgagatggcgccgctgcactccagcctgggcaacagtgcaaaactgtttcaaaaaaaaaaaaaaaaaaaaaattagccaggcatggtggtgcatgactgtaatcccagctcctggggaggctgaggcgggagaatcacttgaacctgggagacggaggttgcagtaagccaagattgcatcgctgcactccagcctgtgagacagagtgagaccccatttctctcaaaaaaaaaaaaaaaaaaaattagccaggcacagtggtgcacacctgtagtcccagctgatgtgggaggatcgcctgaggccaggagatcgaggctacagtgagccgtgtttgtgccactgcactccagcctgggtggcagagtgagactctgcctcaacaaaataaaaatcaaagaaataaaatgactcagtgaaatgtggccatccagggtgagaggaaggaggcagaggggagtcgggagtatctggctgggatgcccattaggctagaccagaaagcctgagtggaatggaggatggaggatggagaagagagcttcgggagggcgtcataggcctgaaatgcctccatggagatatctgcctttaacattcctttgggttttttgtttgttttgagatgggtgggtctccctatgttgcccaagctggtctcaacactcctgggctcaagggatcctcccatctcatcctccctagtagctgggattataggtatgtgccaccgcacctggtttactttttgttttttgttttgttttgtttgtttgtttttgagatggagtctcagcagtttcagtggtgtggtggggacaaaagacaggtatgagtcggttgaagagacatagcgggaggggcatggagctctggagaaacttcctcttaaatgtagctgagggataaggcagcacccggagggcaaggggctttaagggaaatttttttttttttttttttgagatggagtctcgctccgtcgcctgggctggagtgcagtggcacgatctcggatcactgcaacttccacctgccgggttcaagcaactctcctgcctcagcttcccgagtagctgggactacaggcatgcgcctctatgcccagctaatttttttgtatttttagtagagagggggttttagcatgttggtttgccaggatgatctccatctctggactttgtgatctgcccacttcggcctcccaaagtgctgggattacaggcgtgagccaccgcgcccggccggggaatgttttgtttttaaaatgagcccttttttttttgagatagggtttctctctgtcaccacggctggagtgcagtgatgcagtcttggctcactgcagccttgacctccctggctcaaacaattctcccacaccagcctgctgagtggctgggaccacaggcgtatgccaccatgcctggctaagtttttgtaattttagtagagacggggtttcaccgtgttgcccaggctggtctcgaattcctgagcttgagcaatcctctcacttctgcctcccgaagtgctgggattacaggtgtgagccaccaagcccggcctaaaaatgagatgttatacatttacttcagaccccagattctacaatccacaggcaagataagtggcatcaggggaggacagcagaaaactgttaagtgcgccttgtggaacccagcggttacagtttcaagtccacagcccagtaaagtctgagaccccaagggagggaatgagagggaaagtgggtgcctgcgtctgggtccctcaacctgcctgcctatgtaaggacccagtggggcacaggacaggagatctggggcaccagtatttgccttcagcgtcagacgatctacacaggacaggaggcaggtgggaggactgaaggaaacagcctctgaaacggtcagtctggaggcagcaggcgtgtgggcctcaggggttccctccaggaaggccgagggaacagaaccgcaggggcagagcacaggtgtagcagagaagggctcagtgccagttcctttgagagacggtcagggagcggacagagggggcccatagccgactaggggcggcttggtcatgggctcctctttcctcagtgggctgaggggttaggtcctttgaggagcgctgaggagactgtggtaaggggaagcgccctccatcccagaggctttcctggaacaagtgggttggaaggaccaggtgtttgggagctgctgggagcaggtgcagaagccaaggcattcccagatgggggagactgggggtggcaaggtggcttttcagggatccagcctgcatgccacctatgcagccatgctccgggggcgacatccgcctgtgtccttcagctcttcctcagcctccacccgccacccgggagtcagtgcctggactggagctctagctggagggcgtctaggaaaggtcccaaggggtgcgcaggatgacctggtgtctctccagagtcacccctgctaaaatactatgtggccagccccaagtcagttgcaggtcatggtgttgggatcttccacaaggcctcctggagtcgcgctgggggagggtggggtactcagtctgtcgcagagccccaggccatccgtcgccaagaggagcactccagcgcttccctcctaatgcgttcttatcttgccgggaggagaactgggccagccttactcacccaatctatgcatgaggcttccccaacgcgccagaagcccttccttcgcagaggtgggcttgccccggcctgtccccgttcctctaccatggttagggcacagtggccgaggactccgtcccagcgcggctgagccggaaagcgatggcggccggaggggtcgggaggttggttagcgctttacggagctgcgtgttccgtttccaagggctgtagagccttctactgggagccaccgtggatcaggccaggggttcgtcagctgcatttgccggatcgcatcgcagcacgcgcacccacacgcgcacacgccctactcgcaggagactaagcgccccgaaaaggcgcgtccccgggcgggtcgcagccggtccaggaaaggggacagggcgcaagggccatttggggaaggaaaaagggggcgaaccatgaccttgacctcatagaaggccgaggacgtgaagaggctggcagataagttggcgaggctcgcagcgaaaacccaaagcagccgagctcggagagcgccgtctcagcgggcgagggcgtagcccggggaatgcacggaggtccgtctagtcagtcggggcgcgcttcctggaggaggaggagaaggacttgcggccggagctaccgggataaatgcaggaggcggggcagccagcgggcgtggccctgcggaggtccccggtcgaaaggaggagacaggggccggccgcgtacttaaagcggacgcgggggaagccctcccggggtctgcctcagtcgcacagctcggtgggctcgtggcgcagtcgaacgttttcccagaagctccccggccccgtccagcccctaaactcgcgacgctgggtctgctgggtccggcgcgcacaggctcgaaggagccgggtctactcggtttggcccagcagctgcgggcggcggggagcagcccagcccggctggagcagcctcccgcgggtgagggcgcggggcgggcggccgggtcccagccctcggcagctctgcctaccgcgcccgggcgcggcgtctgagcggcattaggacccaggcgcggcgtgggggtgtgtcgccggctcccgccgccggcccgcccgagtcgccgagtttggggtccagaagcgccggagcgccgcgtgaggagcccggccgtgagtgcgcgagtgtgccatggccgcggccaccaggcgcgtgttccatctgcagccgtgcggtgggtgcctgaacccgggggcgcggcgggaaggccgcccgggtctccgccaccgtctcccgtcggggaccccggggagaacgcggatgccgtctgcctgcgcgggccggggccggtgggcgagagggctgcgggattcccagccgcggggaggagggcgcgggtgcgggaggcccgggcgcggcttcgcggccaccgcgcgcttggtttcattagggctctgctgtcgccgtcttgaatttcttaccaggtttgaacagctgatgcagcgggtcgagggcggggagctcgaaagtgggcagggcggagctgtggggctcccagcgccccgagcgccgagcttttgggagcctggcgggccgccgcctcggaaggtctcattttaccttccgcccgggcatcttcccgtccggcgccgcggtgggagccccggaacccctggagttttgggagtcccgggacccctgaccgtgccctgcgcggccgcagcggtttctcccttgctctgacacgggagggccagccctgggtccccgccaggacccaggtttgtacgaccctttacctgcacgtgggccgccgggacggaagcggagtgtgcaccggcccaaccctcccagaccctcgtcgcccacggcctgggacgcgccccagcgcccccgccccccacttcaggatgcagccccggctcccgccccgcgcctgcattcacatcctgcgccccgacccccggggtctccgagtctggaggcgctttcctctcgtgcacgcggcccctcctgtcgcttccttcctccgacagcgaggcacaaacagccgggaccatccggggaccggcccagggagggcgcagcctcccccgacccatgtgtccctcagatactcctcccacccccaattgttc

SEQ ID NO: 8934 - DNA, 6000 bp, Homo sapiens
acacctgaggttctggagctcagaatctgacagcctctcccccattctgtgtgtgtcggggggacagagggaaccatttaagaaaagataccaaagtagaagtcaaaagaaagacatgttggctataggcgtggtggctcatgcctataatcccagcactttgggaagccggggtaggaggatcaccagaggccagcaggtccacaccagcctgggcaacacagcaagacaccgcatctacagaaaaattttaaaattagctgggcgtggtggtgtgtacctgtaggcctagctgctcaggaggctgaagcaggaggatcacttgagcctgagttcaacactgcagtgagctatggtggcaccactgcactccagcctgggtgacagagcaagaccctgtctctaaaataaattttaaaaagacatattacacttggaccttggttagtcttttctgtatgtaaattcaacccatggggtgccctgaggaccacacggggtggtggttggcggggtggtggttggtggggtggtggctgatggggtggtggctgacggggtggtggctggcaggccgagcctaggtggcagccagagccccaggcatgtgtctgggcacaggacggtgttgcctagtttgaacaccctctttgctctgtcactcctgcttcccttgggcgttcacattctcccattgcttcatgcaagagctgctgagtggcctatatcagccagctgttgccgcataacaaaaccatcccaaaactgagtgcagggaggcaacttcacctcgggctccactccacaagcccaaggggccaggtgagagtgctctctaaagccccctcctgcctcagttgtagttgcaaaattttaatttatgaaggtgactgatgacacagaggccaatgctgttgaaataagttattactcacagtttcccaccatgcagggccacagtggggaggcactaggtttggtccagggacagaatcaggagcgagtggaaggcacaggccacagcccacagtgccgtttccactggggaggcaaggcaggccaggggaagagggtaggattggcattttgaatcattctggtggggtttggggcgtggggttgggctctaattgtctgggtaggtgcctggccctgagctggtttagggcaggggaaatactggtttcgtatgtgagagttccttgaagggggtggttggtgtatggactcaagactggtcggtttgcatatgaaaggcatgagttgtttctgatctccaggaatcaagcagtttctctccagccaacaagcccccaccccgagatgttaaaccatcataaaatagagaatctaaggccaggcatggtggctcacgcctgtaatcccagcactttgggaggccaaggcgggaggatcatttgaggtcagaagttcgagaccagcctggccaatgtggtgaaaccccatctctactaaaaatacaaaaattagcccggtgtggtggcacgtgcctataatcccagctactcgggaggctgcggcaggagaattgtttgaacatgggaggtggaggttgcagtgagctgagatcgtgccactgcactccagcctgggcaacaagagcaagactccgtctcaaaaaaaaaaaaaaaaaaaaagagagactctaaaaatacacgttaatatacctcccccgctcttacccttcaggagggggtgtctagaccccgcgggactccagctacaagggaccctggggaggccaactctgccctcttggctattccccaagactgcccagcaccccctccaccccttctccattcagtggcgaaccctggggaggccacgtgggaaggaaagagggctctaagaggggaggccccagactgggggagaggcctgtctggagcccaggatcacctggctgtgctgcagaactggagaagagaagctcagcagaaaggagctggcatggggccaacagcagaaaagcaggaggcacgcagaagtgactgggaagcaggagggtaggcatggaccctgaggctgagcaggaggtactgaggggcagagtggacgctgagctgggggtagcgagcgagcccagctcagctgtgacgccctctgtttggccacccaactaccagctacttgggctgccccgggaggaactgggcttcctctgacattctgtggcctgcggccatctgtcacaccttcttctctctctgcccctcccttgacttgtggcacccacagacaggtgggagagtgtacctgccctgtgtggtcagagcttggttttgagtttccttccctcacccctctttcctcccacacgccaaaacacaagaggatgtgtcagaggcctgtgaaccagagcaactccatcctgaataggggctgagcaaaataaggctgagacctactgggctgcgtttccagacagttacagcattctgcgtcacaggatgagataggagatacaggtcataaagaccttgctgataaaatagtttgcagtaggccaggcgcggtagctcacgcctgtaatcccagcactttgggaggctgaggtgggcggatcacctgaggtcagaagttcgagaccagcctggccaacaaggtgaaacctcatctctactaaaaatacaaaaactagccaggcatggtggtgtgtgcctgtaatcccagctacttgggaggctgaggcaggagaatcgcttgaacccaggaggtggaggttgcagtgagctgagatcgtgtcactgcactccagcctggagcgagactccgtctcaaaaaacaaaacaaacaaaaaaatcagcttgcaatatagaagctggctaaaacccacccaaaccaagatggtgatgagagtgacctctggtcgtccccactgctacactcccaccagcgccatgacaggttacagatgccatggcagtatcaggaagttaccatatatggtctaaaaaggggagacatgaacaatccacccctgtttagcagatcatccagaaacaaccataaaaatgggcaaccagcagccctcagggctgcgctctctatggagtagccattcttttattcttttactttcctaataaatgtgctttcactttatggactcgtctcaaattctttcttgcacgagatccaagaaccctctcctggggtctgaatctggacccctttccggtaacagatgtcgtagagtgaagcacaaccactgcaggggcatcttggtttacattttgcttcagcggccatggttagcacagcggaaagcacatcacagtcttctgattcattaaaaaaattaggaaatggaccaccacaaaccacagacagatgtactgagacaggataggtagtcaagaaagtgaccatgttctaggcgcgcagcagcaactgtggtgaccgtacagtcaacaagcctcagcactggcattgcaattgagctcattcaagcaaagctatcttcagcagggacttctccctctaggcagcaagcgcatttttattttacctgtcctcaaactgatcctttgctccttataatagtaaggaacacacccctgtgtggagatttaagatgctaatgaggccaagcgcagttgctcacgtctgtaattccagcactttgggaggcagaggtgggcgggtcacttgaggttagaagttcgagaccagcctggccaacatggtgaaaccttgtctctactaaaaatacaaaaattagccgggcatggtggcgggcgtctgtaatcccagctacctgggaggctgaggcagaagaatcgcttgaacctgggaggcggaggttgcagtgagccaagatcgtgccactgcactccagcctgagggagagagagagcaagacatcgtttttgtttgtttgtttgtttgtttgtttgttttttaaaaaaaagtcaagacaaatcatagtgggggcttttctggtcactttttaaatcttagtgttgagactttatttgagacagggccttactctgttgcccaggttggatgagatttttaacctcaatatttacttatagaataactttttggttagtcaaaacaatgctgtgtctcattctgatcagaataaaacatcagacaactcaagagaaacattctgcaaaataactggccaggattcttcaaaagtgtcaagggtaaagataaggaaagatgaaggaactcccagattgaggagaataaggagacaactgtgatgtgggatcctagaatggatcttggaacagaaaaaggacattagtggaaaaatgagaaatgcaaaacagtctacagtttcgttaacaggattgtaccaaggttagtttcctagctgtaatgattggactatgattaagtaagatggaccatcaggggaagctgggtgaagggtgtaaggaaaatgcttacattttccaacttttctgcaagtctaaaattagtcaacaataagaagtttaaaataggccaggcatggtggctcacacctgtcatcctagcactttgagaggccgaggtgggaggatggtttgagcccaggagttcaagaccagcctgcgcaatagagcgagaccccaactctattcaaaaaaatttttttaagtttaaaatagaattatataaaaaaggaaaagaaaaatgctgtttcatagcgttcctagtttagcatgggagagaccaggtctccctgggtggttgtctgtgtgttgctgggtgtgcgtggcagggctagtgtgttggggtccgtctaggcacattcaggcgccgaatcccgtggctcccaggtttacctgacggtgcagcctggggtggagacttaatgagggcggggagttgctgcagcaaaggctcctcccaggggtatcagcgcagacagctgggttttcactgtgctcctgctccagaggcactaggaagggggcgcctatcagactagggctctgccagccatccttctctgttgaaggtccagcatggtccgctgcctggggcctgcgctgctgctgctgctgttactgggtgagcgcccctctcttcccctggaccccgaaccctggcctctctgtccctgctcctcagtgacaaggtgggagggcaagatattccaggaaaagctgaaccacaggaagggttgccagtgagaggcctgtgcgcacggcttggggacccctggcaattgaccccactatgtgctgagcacctcacctcccagccccgtcaagccaccaccgccatccccctcccgagtccagccttggcacccgtgccccaggaacttttgcctattgtctgccatctcccaactctctcaccctcccctcagccccagccctcctacccatcacacagattccttggtgaatcttcggtgttgttcatctgttgttccaccttcttggactgctccgtccctgcatggatgtcgcggagggaggggtcactttaccgagtgtagtgtggaaagtggaatctggtaaaggtttaaggtggaggagatcttgcagctgagatgagctgctgtgagggtggagactgggtaagggtgttctgggcaagggtgacaggtaagcaacaggcagaggtgggttcaaacccttaggcaacatcaggtgctggtgtgtgcagctgagacctgaggatgtgcctggcaaggctgtgagaggaaagcaaagtgtgccctttggggaggggaggaagggaggactcaccccgctgccatctatcccctccactcagggaccattctaagccctcgagctatgttcatccttcctgcagaggcaggtgctgaagtcacagcaggaatcactctcaccacgcggtccaatccacagcctgaaagacacagccattgccagagaggcaccctgctcccagccctgggggggggataccaccccgtagcccctgtgcacaaacacacagggagatggatgaggggccaggctgtgcacgtccactcaggctgggcac

SEQ ID NO: 8935 - DNA, 6000 bp, Homo sapiens
aggagtcacatgttagtggggtttattcttagacaccatctgtaggagggggccaggggctgcaagttacatgacatttatcacaaattaccttacgctgaagtgatttgtgtccctttctgctccttgaggcttcgtgtgttgctcacatttgccacccacaatgaccagccccgtgcatggcacgcagtaggtgggcacgtgaactaagcgtttgtcttgtctacattgctgacagtggggagggtggagaacatggactaaatccagaggtgggacagggagagagcaagtcaaatgcagccagatgtttgggggctgtctggggaagagagggtgtagggaggaccataagcagctgctgaagctgcagctactggggggatttgggaatatccggcttaggagtcttcacctgcttctgcatacttccaaggggacatatgtccatcttggattggaggctctcagaggggttagttgtgtccgcttccagtggtctgaggcctcctgagactttttgtacattcaattaaagtgtaacatacagaaaagttcacacattataaatgcaactcaaggacttttccaaaagcgaacacacccagatcaagaaatagaccatcctacagtccccccttacactctgtaccagttgcagcccccacaagggtaactactgtcttgacttcgaacaccatagatttgatttgcctgtttttaaactttacttaagtagaatcacagagtgtgtacaatgactttggaaaactgtttgacaatatctattaaagctaaaatacccttgccctatgaacctgaaattccacccaccttgccaagggacaaaaagttcccctctaaatgcaccaggctgtcagggatgaagcgttggctttggggcccccattcacacacatgactttttccggggcacccaagcatcagcctgtcgtcaccaggtgccaccctggcgatctctgaaggctggagtcggagtgcctccctcagacatcctgttctgcgtcactccttgggagaagtcgtgtttacagatggtgggtgtcacccatgccaagcactcctaagggttaatgctcactggtttgcctggttcccaggacatttcctgatgcccctctggagggtgacgccaacaagccagtggagaagccatctttcccaggtgctgtcaggcgcccccggagctgctcggtgcatcctaggatccctcttcctcagctttggtttgatggcctcatctcctcccctgcaacctcaaaatgtaaataaaccctttctcagagacttcggcagaaaattcctctgacctgcacttggacacagctcatctgggtttgggaggtgtcaactgtgtaaggatgactctgatccccatgtggcttttcgactgtgtcccctctacagtcagttattagcactgactgtgctaggaagtgagcaacacacatattcccagaccacatggagctcaggagcttggggagagagacagggaagtggacgactacagggccttctgaaacgtgttgcagggagaagtgtcagtcaggggatgctaacctggctttgggtaagggacagcctctgaatgacaggacattaaagccatggcctgcagtttaagtaggagttggccagttcgaggtaagaataccagtaagcaagaacgccagagtagctcctcgagctgccttctgtacctgacatccacactgaagccagcccctctgtgttcagccttgctttactgaagaggtgtcgctgaggggctgctctggggcgctgctctgctttcctgtccccaacttgttctgagctcgagccacctccatactggtgctcctggttctcaggcctttgaactcaaactgaatcacaccactggctttcctcgttctccagcttgcagatggcagattcgggaactttttggcctccataatcacgtgagccaattgctataataaatatctctctccctctttcttcctctctctctctctgtgcaaatatagttccaattataagagcccctaactggaaaataaccctatggtgcactggtgagtagagaaactgtggttccctcaaaccaccgaacactattcagcaatacgaaggaacaaactattgatatgcaaaatagtgtaaatgaatctcaaaaacatcggaaagagggaaggaagccagacacagaagagtgcatgccgcatgattccatttatatgaaattctagaacaggcaaaacttatctatagacagagaacaacagatcagtggctgtctggggttgggagtgggcaagtttggctggaagggcacagggctctttctgtgagtgagggaatgtgtctgcattatagtgatgcttatgtagttatatacacttatcgaaactcatcttactggccacttaaaataagtgcattttattgtgtgtaaattataccttaatgaagttgatttgaaaatccaaagtagtaataataagtaataatctcgtagctggacagctgtggtgactcactcctgtaattccagcgatttgagaagctgaggcaggaggatcacttaagatcaggagttctttttatttttatttttattttttgagacggagtttcgctcttgttgcccaggctggagtgcaatggcatgatctcggctcgctgcaacctccaccttctgagttcaagcgattttcctgcctcagcctcccaagtagctggaactacaggcactcaccaccatgcccggctaatttttgtatttttagtagagatggggtttcaccatgttggccagactggtcttgaactcctgacctccagtgatctgcccgcctcggcctcccaaagtgctgggattacaggcatgagacactgcgcctggccaagaccaggagtttgagaccagcctgggaaacaaagtgagacccccctgtctacagaaaaattaaaaattttagctgggcctggtgccgtgtgcctgtagttccagctactcaggaggctgaggtgggaggataccttgagcccaggatttcaaggctgcaatgaggcatgatcaggccactgtcctctagcgtgggtgacagagtgagaccctgtctctaaataataatcataagaacaacaaggaccctctaaacgcactgatatctaaggtgtattaagcgaccaaaaaaaaaaaaaagaaaatcaaagtgcagaaaaacgttaataagagaaaaaaatatgtctgtattgtcttgagtgtgaaaaaataatctaaaagcctatgaaagaaactaatcatattggtttcctgttggtgaggagggctaagagcacggagacttttccctatgctttctgtactttttgattttgagatatgtgaatgtaggtttctctcactgctcgaactttcactaaccaaattactacattccaaattctcaaaaacaaatagatttacttaaaagtaggctgggtgcggtgtctcacgcctgtaattccagcgctttgggaggccgaggcgggcagatcacctgaggtcgggagttcgagaccagcctgaccaacatggagaaaccccatctctactaaaaatacaaaattagccaggcgtggtggcgaatgcctgtaatcccagctactcgggaggctgaggcagaagaatcacttgaatctgggaggcagaggttgcagtgagcccagatcatgccattgcactccagtctgggtaacaagagagaaactctgtctcaaaaaaaaaaaaaaaaaaaaaagatttgcttaaaagttaacatctccggccgggcgcggtggctcatgcctgtaatcccagcgctttgagaggccgaggcgggtggatcacgagatcaggagattgagaccatcctggccaaaatggtgaaacctcgtctctgctaaaaatacaaaagttagctgggggtggtagcgcgcgcctgtagtcccagctactcgggaggctgaggcaggagaatcgcttgaaccagggagtcggaggttgcagtgagccaagatcgcgccgctgcactccagcctggcgacagagggagactccatctcaaaaaaaaaaaaaaaaaaaaagttaacatctcatccaaatttgcaccgagtaggaaaacaaaagtttaaaacatgaaacagatgttactgaggccgaaagggtctcccaggcctgggagtctgcagcttttatgcaattctgccctctggccaccgccagggaagaaaggttgtctccgtctgctgcatcgcctttgcccagcaatgaagcccccaagacagcggcagccggttgcctgaaccttcctatccttgggggcacccagtgcaggtggatgacccgactcaacctccgccagggcaccctcggggcaggacgggtagcaaggaggggacagagatcggccccaggagaccacggaagatcgcgctcctggggccaacttcagcagcgagaggcggcctttgcccaccgcctcatcccaccacgccgcggtcctccaagaaccttcccagcggttctctcctcctctcaggagtagaggccctctgagaccgacggggagggacggctcgggccggtcatccgaggggccgcacggattccctcctccgcccagctccaccccctcgaggggcggcggtccgggagtggcgacccggctcccccatggcgcgcgccgtcggggcccctggccaggctccgagcggggttggcggggaggggaggcgggagcgagggcgggcggtgggaggtgggggcgggaaggtccgaaggcggcggcctgaggctgcaccgggcacgggtcggccgcaatccagcctgggcggagccggagttgcgagccgctgcctagaggccgaggagctcacagctatgggctggaggccccggagagctcgggggaccccgttgctgctgctgctactactgctgctgctctggccagtgccaggcgccggggtgcttcaaggtgaggacgcgggcggggtgcgccctgaggggcaggctaggcgcggtggtggtggcggggatgggttctgctcagagctcgggtcagcgcgcggagggtctcacggccccggcaccatacggccagtaggtcagggcgtggggactctttgggggggtctccgtgggacctgcccagggacgctcaagtgtgcttgggctggccccgggcccggacttgcccacactgcccggctgccactccgctggcaaagcagagggcatggctccctccccctcgggggcagcccagcccccagcccatagccgtagccccctcttcctggattctcgctctcacaaccagcttccatccgcaggccaccgtgtgacccgctcctgctcctccaccccttaggactcagcggggctccgtcctctaggaagcccccatgcccaagagtcccccagagtccctgctttgctctcaggctgcagaactagctgtggcctccaccctgctcacccctcgtccctcctcccagggcagcagggcagtgtgtatgttgtttatattgttgccttgtttggtgagatagagaagggcctctccagatagaaggtgtctgtttagcagtgctctgggaagactgcagctgtctcctcggggtaacccctccaaacaaagatgttaagatggggctggaacaacctctgcaagcgggtgggaggattagccagtcctgcacagcaagtgcctggccgggaacagggagggcaaccagggagggggcatgcggggctgggctgtgctatgcagactgggcggtggcttccacagcactgtgtggggaccaaacaggtacaggggcctggtctgttctggccccaggggagggccccaggcggtccactgctccctcccctctgagccctatcctggggtcaggggaggtgatgggacccctgggagaggggcgtctatgtgcccaataccagcctggctc

SEQ ID NO: 8936 - DNA, 6000 bp, Homo sapiens
taatcccaaccatccatcatcccaaccctaaccacaactccgactctatcatcctcatctcaacccagcctccaccgtatcttaaccatcacctgcacccaactccaaccttcacccttacccccacccatcactcaacctcaatgtccaccccaatcccagccttaatttgcttccagaattccaacctgatcatcaccctgacctcagccccagcccagcccaacgataatctctccttactctaaccccagcacaattccacttcatccatcaccacttcgtccgtccacaggagggcttctggtgctgtccagcacagtttggagagtgagcactccagccagaagcatttagagccagattaaggaatgaagtgtgaaatttctactgcccatgtcaaagccaataagcattagttatggattctatggctctgagaattaaacatttggcctgtgattggggatttccactattttgaccataatctgctccaggaattgcccatccgtaccctgactccctatctgtgggccagtaacctccagctggccatgtcaccctgtgttcttccttctctagcccaatggggaagttggggagaagccttggtgtcaggaaacagaaactgaatcctacacccgggcctagctgtccatagggaaactgcctctgccctttcttccccagctaaacttggcctctggaatcagaggtcagggacttggggccccagccaaccctccaagacctcctgaggcacttggtctcaaacaggcagcaaacgtgagtgcccactgtgtaccaggccagctcaagccaccctgatgcaacacataccaatagtaggagtggggatttaaaatcctgtcttcagagcacccaagacttggagacccaagtatgaacctcaggaacctcctgtctggggaacaatgatttccaaaagagtcacccaagggagggatggttcagggctgcagagctgcctgctccctgttgctggcacaccgccccctttcccgggacccgcaattccccctcgaccaccagggggcgctgcgtgctcactaggccacagctgcaacccaagttgcggggggcggggggcggggcactgtcccctcaactccaggctttcaaacagggacagagatctcctttctgagcggtccctgctctttctgtttccagaacagttatctgggctgaagctggcctttgtggtgacaggctgagccaataggctggattccggtggggctgacccctttggggttagggccgggctaagcataggtggcctctacattatgtgatgggagtggtcctggaaagggtcctcccccgcgccctgttccagggtcgctgtgtccagaaccccaccattcttccatcaggttcacgattgcccttttcaggaccccaaatgggaggaacaggggagctgggacaagatagctgccctggccatagcagagctgaccctgacatcccctgtggccagggacacatctgacccccagtgtgcccagcaggctgcttttcttcacggtgaggtgtccaggtcccagggccccagctatatcattctccagtggccaagaacctggtgtggaggctgggggtgcatcttcccagaagaggaggaggcctagggcttcctagagaactggagatgagcccttgggcctccataaatggccagatcagtccactccagcagcctgcgagagggctgggtcccctggggagcggtgtccttcctgtcccaatcccgccctgtactgtgccccctgctggggcaccttctgccttctgcagcaggctaagtcccacctggtcagcctgactggccctgggcctcggctcacccccttcccaggtgtgacccctggtagtcattggaatctgctgagcccagcccctgaggcggatgggctgggagctgggaggtcatgagtttcctgtccccacttccagcctcctcgttcacttggccaagtcagcatttaggaccagggaggattgcaaagttggcaacatgggtgtgtatgtggtgaaatatacataatgtaaaatttactgttttaactgtctttaagtgtacaccccatgacattaggtacatttgcaatattgtgtaaccatcaccactatttccagaactttttcattatctgagagactcagcaatcattaaacattagctccccctccctgcagcccctggttacctctatcctattctactttcagtctctgaatatacgtagtctagatatttcatgtaattggaaccctacaatatttgcccttttgtgtctggctggtttcactgagcataatgttttcaaggttcacatatgttagaattcattcctccttatggccgattgatattccattgtatgtacataccacagtttgtttatccacatccattcactgatggacacttgacctgtttccaccttttagtggaatagtgctgccgtgaacattggtgtactctgttagagtccctgttttcagtacttttgggtatatacctaggagtggaattgctggatcatatggtaatcctatgttgactttttgaggaatgacccaattgttttccacagtgacggaaccattttatattcccaccagcaatacacaagaatttcaacttcgcatcctcaccaatatttattgttttctgtgttgctttgtttgtttgtgaatagccattctaacggatgtgaagtggtatctcactgtggtttggttttgatttgcatttcctaatgcctagtgatgttgagcatcttttcatgtccttatcagccagttatatatcttctttgaagaaatgtttattcaagtgttttgcccatttttggagttggatttcatggtttttttggtggttgttgttgttcattgtaggaattctttatatattctggatattagtcctttatcagataaatgatttacaaatattttctcccattctgtgggttgtcctccttttattcactctctggatagtgtcctttgattcatatcctttttttttttttttttttttgagacagaagagtctcactctgtcaccaggctggagtacagtggcgtgatcctggctcaccgtgacctccgcctcctgggttcaggtgattctcctgcctcagcctcccgagtagctaggactagaggtgcacaccaccacacccagctaattttgtatttttagtagagacggggtttcaccatgttggccaggatggtctcaatctcttgaccttgtgatctgcatgcctcagcctcccaaagtgctgggattacaggcgtgagccaccgcacccagctgttgtttgttcttttcagacagggtcttgctctgtcacccaggctggagtgcagtggtgcaatcatggctcactgcagcctcgacccctcccctgggctcaagcgatcttcccacctcagcctccagagtagctgggaccacaggcctgttttttaatttttcgtagagacagagtcttgcagtattgcccaggctcgtcttgaactcctgggctaaagtgatcctcctgcctcagcctcccaaagtgttgggttcacaggcatgagccactgtgtctggccaagttttaaattttgatgaagtccaacttacctatttttttttttcgtgcttttaatttcatacttaagaaagcattgcctaatccaaggtcatgaagattttcacctgttttcttctaagagttttatagtttcacttatatgtgtttctggcatctcttccttttgggctcaggtctatggtaccccttagacactccctgaccaggggcactccatggttgagggcctgcctttttggatatggtacactccgcacacattgagctcatatttgtggggtatgtgttccacagcgctctcatgctacctttcaaacctagacttgccttgccacctccccactccaactctgaacctcagctctgaacccctaaagacctcacccctctcttagtcactaaggggtttgctgaatgcctggtaggctccgcactgctatggggcacatatcttcagttctaggtcctgagaaatgggctctcacaagctgtaaaaaacaaggcaaggaaaatagagatagctctggggtagctacaggaacctcaaaggagaagttccagctggaagccaaattcatgctgctccttgaaggttgaataaggtttcagcaggcaaagattatctgtggtggagatagagctgggcagctagggagcccttgagcagacagaactgcccccagagtgggtctgcggagagcagggaatggggacagagctgggggcaggaaatgaggacttttcacatctcacgggcaatggggagccacagaaggtttttgagcaggggagtgactgttaaaggcagcacttcggcaagttcagtaaagccccattatggtctatagttagtaaggcaggtggtaggagacaagcctcaggaagaaaccatcattctagctgggtgtcttggagtgagtaactgggcatctctgggctccagttcctgttggtttgggtggtggggagggggcagggaagtggggaagagggagaaacagctgttcatctgccttagggtggtatccttgaggggctgggaaagcagaacttgggatagggccaagggacacacaggcttttctgaggcaggccaccaagtgagggcattcctgggcacagcctgagctgggaacgtggcctcctggctctctgctggtgtctgactcagaggtctttaagagccctgccctcttattgggttggccagcagaggaggtggggacacaggctcggacttctagcaggtgctggggctaaagtgcccagaggtgtccctggaggcccctgtgagcccagccagcgcagtgcgcaccaccctcttaggcaacaggagcagcacaagaacctgctatgggcttcttgcccaagcttctcctcctggcctcattcttcccagcaggtaagctttgcgggcctagtgcctgtcttccagggtccagccttcataagtccagcccttggcagattagactatgcctgggtcacatgtttggttgctgaggtcaagggagggcccaatcgggcagtggccaggagctgggcaggaagctgccatctgtcttcgagccaccctaccaaacctctgagcagcctcgggcagtggactgacccctggggcactgagaagggctgctctaagtgtgcatttctcggggcagggcagaatttgggagcccagctggggcaccttctctggggcaggtcgcagggctctgtggcaccctgaggcctgtatcaccctcccctctgtccccctgccgttcttcccccaggccaggcctcatggggcgtctccagtccccaggacgtgcagggtgtgaaggggtcttgcctgcttatcccctgcatcttcagcttccctgccgacgtggaggtgcccgacggcatcacggccatctggtactacgactactcgggccagcggcaggtggtgagccactcggcggaccccaagctggtggaggcccgcttccgcggccgcaccgagttcatggggaaccccgagcacagggtgtgcaacctgctgctgaaggacctgcagcccgaggactctggttcctacaacttccgcttcgagatcagtgaggtcaaccgctggtcagatgtgaaaggcaccttggtcacagtaacaggtgataagtggggtggcctggctgccccccgggagggattcccaagctgcttctggaccccttggctctcagccccagcccttgtcctgaatctaaccccagccagtctcagcctctgttccagccccggcgtaggcccaggcctggttctcccttgtattcacccaagtggggctggagtagaaagcgtctttccttcccctaaaagccccctcccc

SEQ ID NO: 8937 - DNA, 6000 bp, Homo sapiens
ttattttccccaccccccaaattctattattttcattagtagacctgtattataaaaatattatgctcaatatgactgggcacggtggctcacgcctgtaattcctagcactttgggaggcggaggcagatggatcaagaggtcaggagttcaataccagcctggccaagatggtgaaaccctgtctctactaaaaatacaaaaaattagctgggtgcggtggcaggcgcctgtaatcccagctactcgggaggctgaggcaggagaaccgcttgaactcagagggaggagattgcagtgagccaacatcccaccactgcactccagcctgggcgacagagtgagactccatctcaaaaaacaaaacaaaacaaacaaaaaaatatattatgctcaatcattattatattttgaatttcatcaataagaaatctgtggaaatttgttttctatcattatataagtactgtcaccttttttttttgagacggagtttcgctcttgttgcccaggctggagtacaatggtgcgatctcagctcactgcaacctccacctcccaggttcaagtgattctcctgcctcagcctcccaagtagctgggactacaggcatgcgccaccatgcccggctaattttgtatttttagtagagacggggttcaccatgttggtcaggctggtctcgaactcctgacctcaagtgatccacccatctcggcctcccaaagtgctgggattacaagcgtgagccacggcgcctggcccctatcattatataagtactgtacctatataatgtcatcaattttacctcttggcccacaaaacctaaaacatttattatctagctctttccagaaaacgtttgccccaggtctagactccagagagatgttgaaaataacattgaaaagtactgtatgaagatggaatagccccaagctacaattacctctcaaaaataacacagcctggaaatgactgaaatttcaatcaaattaaccaggtcatgaaacgttcttgatatattctgctgatttagtttagagaagttaagggaggaggaaaaaaaaaccttgtttgtatgagctgtaatagaaaggaagatgaatggaaaataaaaggaaaagcaactgaagaggaaaaatttgatgtatttttttaattgatgataatggtaaaaataattatgtaaaaataatgatatcgaacacctacatattcatgcactgaataagcactttatatacatttaatccttgtaagacgttgaaagacagaagtcagagctatctgctgataccaaagccagtttgtcagcagtaaaatctccaaaaaaaaaagaagaaaaagaagccgagactagagattaagggccttgaatgctacactgggaaaggtttattctttctttatttagctattaaatttttatttatttatttatttatttatttatttatttatttttgagacggagttcattcttgttgcccaggctggagtgcaatggcacaatctcggctcaccgcaacctccacctcctgggttcaagcgcttctcctgcctcagcctcctgagtagctgggattacaggcatgcgccaccatgctcggctaattttgtatttttagtagagacagggtttctccatgttggtcaggctggtctcgaactcccgacctcaggtgatccacctgcctcggcctcccaaagtgctgggattacaggcgtgagccaccgcacccggcctaaacttttaattaattaatttatttatttatttattcagagatggggtctccccatgttgcctagtgtggtctcaaactcctggcaaaggcgatcctcctgccttggtctcccaaaatgctgggattacaggtgtgaactactgtgcctggtctccaattatccttttgactgggaggccctgaaggattttcagaaaaggtgtgagattatcagttctgtgctctgggatgataacaaggatagtttcaggagattagtcttgagtccaacaggccagagagaaactttttcgatggttaacagtccaagaaagagccagtgagggtcagtatctgtgttggatgagaagagaatttcagaaatacttcccagcttgaccacaggtgacagagtggacatgtaggctatggggcaaggactcaaagaccagtttgaagtttctggtagcaaaatgagagaactcagataagaaaccagtttatgggagaaaataatgcatcaatagtggagattatttgcaattcctggagaatattcagggcaggttgttcaagggacaattggaaatgtgtctacaagttcagaaagatgtctgtcttgtctagggagagaggtttgggaaccacgaggagatggctgaccttcagagggggttagagaaggagagggcaggggagaaaggagatatgaggggaaactaacatttctagactggagtctgagaaactcacatcactgagagggaaggggggtgtatggatagttagcaagaaacagtggtattatcacaagaatagaatttcgagtgagaagtcagtggactgttacagagccatcaaagaagaaaaggactgtaaacctgtaattggttttggcaattagaaggtcacagatgacatctgataaaacagggagggacagtgcctgaggggtgatggcaggggaggttgggcagaggaaggcaggcaggacggctgggcagactgggactatggaaggtttttcaggatagagaaaaatggtaaatgcctagagagggagagggagacactgaagattccacagttcatggaataacgatggggaggggatagacttaaaagctcagggggtcttgaccctggaacttcccttcccttctaatcagaagactccacattccttgctaagcaaacacatcgtattaaaaaaaaaaaaaaggttggctggaatacgctctatgctctcactggtgtagaatgatggttacggggcaatgcgtgagtttttctctgggtgctggtcacagcatttttgttgttgttgtttttgttttgttttgttttgtttttgagacggagtcttgctctgtcgcccaggctggagtgcggtggcgcgatctcggctcactgcaagctccgcctcccgggttcacgccattctcctgcctcagcctcccgagtagctgggactacaggcgcccgccaccacgcccggctaatttttttgtatttttagtagagacggggtttcaccgtgtttgccaggatggtctcgatctcctgacctcgtgatccgcctgcctcggcctcccaaagtgctcggattacaggcttgagccaccgcgcccggccgcatctttgttttttattttctccatcttcaacggggatcaaaacattcgacattattgaattttgcaatccaacactttcttttccctacttactgaatcccagtagggattgtgaacttcaaatatctgagacaggtctcagtcaaattagaaggttcattttgtcaaggttaaggatgggcgcccgtgacgcataaaaccaagcttagctggacctggtggtgtggtcctgtcatcccagctacttaggaggccaaggttgggggatcccttgagcctggaaggttgatgctgcagccttaattgtgccgttgcactccagcctgggtgacagagtgagaccttgtctctaaaaaattaaatataagcaaataaaaatgcagttattagataaataaatgggaagacacattattgtcaagacacagaccacacttgcctatttcataaaattcctttagttgctgctcccccaactgcattaatatgtgtgatgtcactttccaaaactgtgtaaaacacataaataattctgattataaaatcaatttctctccatgtgaggtcagacagacaccgtctacaattctgtttctcaagagttgcccgggaactagtacattatcattcagttagtaaagcaaccatgacaacggtttcaagatggaaggtgttaagaaagtactaattattagaacatttaaaaaattgtattcagatttcagcagtggctcaatacgtgtggtccccagaccagtagcatcagcatcacctgggaacttggcagaaatgcagattctggagcctcacgccagacctccagccttagcaactctgggggtggggcccagccatctgcatcttaatgaagtcctcaaagtgaggctgcccagctctaagaccgagggccagggatttacacttggcctttctgcttagcggtccaagaacctcacccgggggcatcacctggggacaatttagaagtgcagacttttgggctgcaccccagagccactgaatgtgaacccgcccctagcctaacacgacccccagagaattcacgtctgaaaagccttggtctgtattacgatctctgcatgaggtaagaaggacttcttctccagttaggttaaaaaaactggctacctaagtggagaagcggtgaaattgttttaaaacatccaacccactgagcccaatgcaccacaaactgcttgcttatcacgctcgagcaatgacagggctcggtggcaggcggggtaaaaaggggggacctggaccaggacactcagggaccagcgctctgcttgccaggtgggtccccaggaacaggtgtgactggtgggaagggtcgcgaaggggggcgatctttctgcgcaggggagggaaatgaaaggaacgggaaggggacggctgggtgcgaggcccgggatgttccggggagcgctgccgggtgccagggagcagcccctccccggggggaggcccgagggcaggggtcgggggcggggagggaggtgggccccagaccggcgcgggggcgggcggctccgctgcaccccgcccccggcccgcccctccgcggcgccattttgcaggcggctgtcgcggggaccggaggcggaggctgcagcgggcactgcggcgccgaggcgcggcggcaggacgggaaccacgcgagctgcagccaggtgagagcccggccgccgcgccccctgcccggcctgcgggccgcacctgccggcggggccgcgaggtgctcgccgcgcccacgaggccggcctggcacggcccccgcgcgctgtcacccaccggccccgcggcgcggcctgcgcgcccccaccccgacccatctcccgggaccccgcgcccgccggccaccctggccccggggcccaagatgcccggcggccctcagctcctgccgttctgccggccgggccgggcccccggggtacccaccccttcccgccacgggagccacagcgcgctcgggccctcaggccgcgcagcggggaggcaaatggggcgcccccagaaccccactggctgccgccgcctcctcccgggctctgcgcccgcgcgtcctggggtcgcttccctcgcccctcccccggtggtgcgcacgggcatcgtctcgccccctggaattcaggggcatcaggaggggcggcaagagggtgccttttacattcttgctttcttcccttctacaaagactgcgcgaagtaattttagaagcagctcctccgaccccggggcctttctggcctgttccctggggggtcgcgagtccccctccttgccacctttcggggggaaaaaatgacatttcgagtgtgactactttaaggcgcaggattttctccttcgtttggtcctagatgcccccccttggatgggtggctgataggatgtcggcctgcaggctgggggtttaagcgtgactgatgggaaattatcgattgtcagggcaaagggtaaatgagggcaactgcaggtggaagaaagtcacccataagggctttctgggtctgcagcgtttgtagtaggtgctacttctattcttgcagtgctgggagacgggcgggggaagatgcagtccctgctgacaattgggtcatct

SEQ ID NO: 8938 - DNA, 6000 bp, Homo sapiens
caggactcacttagaagataccaattctgggtctctggggcagtctgtattgggagtaattattcctggagttctgggggtaaatgggaacagctggagtcagagcccctgaaaccgctctgtggcttgatgcttgccaggtgtgtttacttagccataccttcagggaaagactcacattgctaatatcagggcaggtgagacctggttagctgtgcaaataaacccagagccagagtgaaacagtgagaattagatcgcctttgcttttcactgggtaattaggaactcaacactgtgtgacctcagacaagccaatttctctctctggggctcagttttctcctaaaatcgacaaggagggatgggaccagacaacttctaaagttctttctaaggccaaagatccatgactctgatttttatctaaatccataaaagtgtggccaagtatataattactggctcttttttccccctgctgctatagttttactgtctaaccttgtaatcttccaacagattttttctctcaaagatcctaagaatgtggggaatctgaattggaaggttttctgggactcaattttctacctccacttttgctcactcctccgtctcaactctcatcttagcccttctcaatgctgggatgctggaggacttgagctgtgaatttcaggaacttgaatttgatttttactgttttgagtcctgccccatccactcctgggaattgtgaagaacaccatgatcctccatgtacactgtcataccttttcccattcatttgtcagaacatttctcctgtgtgccagacaccaccccaggcactagggctaggaaataaaccatgcggctctgttatcaggaagtttagtcctaaactacagaatgagccacatcaatctgcttgatgaaaggtagccaatgttacctaggaaagaataccaaggaaggcacttaattcgcctgggggcatccgcttgggtgaaatcttgaaggatgctatagcaggtgctgtcagtgcctaccctatccccttagccctccatggagttgcttgatctatgtgccaggaagttaaagccacagaagaaccctcaaaccaacaaaaagcagaagctggtggatagatatcccctcttccttgccacttaatggaacaatcctgaggtatgctctacacagtcttacagaggcccccagcaagatgaggcccccagcaagatggagccccagttgtccatggcagtctctgctcatcaacacatcatcagtgcctttccttccctgtctcacttccttattccatctccgcactccttgagatcgcctcccaaataaattatgggtatggcacccaggtgtatatttcagggtctcctttcaagagggcccacgctagttataaaaaaaattagctgaaatagagactaaggcaataaaatggggggcatccaggcagaggaacagctacagtaaaaccatggagggcaagcatggcacagcacttggcgtggcatttgaaggacgcatatttgttggttccaggattgtgttgcaagaccttagcattcttctctggagaggacaaacactttagtcctcttgtcctgacctccaagaagtgctagaagaggagaaaaggctggaaaagagggctgagcctccctgagaggtgcctggtaggccctacccagtcatcctcttcagtcttgggcccacagtgacccaagaagtcagccctgtgtattttgagaatgagctgctcaactatggcaggaaatttcccagtgtcttggcttctcacacaatttgggtctaagtatttggagaagattctcttgtgcttaagggcatattatagtatcagatgctgaggtctatggaaggcaatgtaagacagtggtttggccaggcgcagtggctcatgcctgtaatcccagcactttgggaggccaaggcgggtggatcacttgaggccaggagttcaagatcagcctggtcgacatggcaaaaccccgtctctagtaaaaatagcccctaaaaattagccaggcgtgatggcgcatgcctgtaatcccagctacttgggaggctgaggcatgagaatcgcttgaacctgggaggtggaggttgcagtgagccacagctgcaccactgcactccagcctgggtaacagagggagactgtgtctcgaaaaaaaaaaaaaaaagacgtggttaaatcacatagctcactccatatgtgctccagaatctagagcacaaaaacctttgcgagcctcagtttcttcgtctgtaatataatagtaagtacctggggaggattagacgagactatgcatatggcattaggctctgactatagtaactgctcagtttttaaaaaggagatgatgaagctaagcagagtggactacccactggggcaaggccaactgactgccccagaaagaccgataagcaaaccctgccatgtacggtctgccatcagcctccccagctcagaagccgcacggggcagcctgccaaggatgtgtgtgctagggctgggtatgaccagggaaacaggacagtccagagggccaacctcaggtcagcctggccaggccaggcccttgccaccactggcaaactggccagcaagcagcagtggcaagaagttggctcagagggcctggggcttcaggcaaccacaggatgatgcctccaggggaattcctcagccagggccactccagaaccctcgcctactggtgcacagaggagtagcaccccgacatggctccccaaggtcctgttttataggcctccgcagtgaaccagcttccttccccctcagggtctctgttcagtccaggcgtgtttccatggatttggctccctctcatctgggaaagccctgcctggactccccaaacccctgctggcctcagcatggtcagtcgccttacatgggtggacctggctggtttaactctgagggaaacatgatgttctaattctttttgtttgtttgtttgatagagacgaggtcttgctatgtcgcccaggcctgtcttgaactcctgccttcctgcctcagcctcccaacatgctgggattacaggcataagccaccatgcctggcttaatgttttaattattgggcgtggagctgtccgtgcaaaggcaaagaggaagcaggctgcccactggtctgcgtgctgaccccacctctaagctgaacccacctctctctgacttcttcccacctggcctcctatgtctccatggcatgtgtttatacctctggggcctgggcccaggctccctgggaggtgactgcatgagccccaggctggggagcacagagcggcctctccctgccccgctcgggcagaggagcaacgcttgtgagcagcagggtcctagctggcactgagactggaaagatcttcaggctgtgggtggagaaggcctcaatggagatcctcgggaatttccaattaaccaatcaaccctaataggccagtttctgaggtatcctggagttcctcagggctgtccagataaggactgacaggaggaaagttctggtctcagtgtctgtcacgcaaagctgtggctcattaaccctgatgaactctcagatggggctaggcgggattgggggaggatgcagatcaaaggccctcagaggaaatgaccgagctctgccttgggactctgggagagagaggtgctgtctgctctaaacaaaaaaaaaaaaagaaaaagaaaataaagccacctaaatcccgtcatcccaccatctagagataatcacttctaaacattttgttatttagtatttcctttcattatgactacaacatagagtataataagtgaacatttattatatataggtgtgttagtctcttttcatgctgaaactgggaaagaaactgggaagaaactgggaagaaaaagaggtttaattggacttacagttctatgtagttggggagccctcagaatcatgacgggaggcaaaagactcttcttacatggtggcagcgaaagacaatgaggaagaagcaaaagcggaaacccctgataaactcatcagatcttgtgagacttattcactatcaggagaacagcatgggaaagactggcccccatgattcaattgccttcctctgggtccctcccacaacacacaggaattctgggagatacaattcaagttgagattttggcggagacacagccaaaccatatcaataggtgtaagataaaaatgaatatttttatttaaaaactaaaaaaaaaaaaaaaaaaggtctctaaacaaagctcactcaagcatcacatcttcgggagacctggggctggtagtcaggacccatcctcccaggcatgcagcgggaatgttctttctgcatttctgtcctctgtttattctcactccttacgagagacaaacgtccacactgtcactgagcgggggcccagagccaccaaacaaactgtcctcggggcctcttgggtctggtttgagcctgctctgccccagacccttctgaggatcctctctcctgccactttttcctggaaatccctgcaagcttcctctagactcggatgccttccctcctttgggagaattggcttccagccatcccagaaaatgggagccacctggcaggaaggatcaaattcctaagaggtgacagcgctgctctgcctcactgcactccactagccctcaccgctactcctttcatttctccagcctgggaaaggtagtgttccgagaggtaaagatggggagggctaggaggaggtgccaggcctggaaagggccaggggcaggccctagcgggagaggagggagctgagcaatgagggtgttggctaaagacaacagcgtcttgatgggaaaggaggagcaatgggaaagactggagtatctcagtccctctcagtggatgggggttgtgggagagaggcagctgggagacaggcctccctctggagttcatagctgagttgctgtccaaatcagtggtccctagaatctataaaacaaagctgagaacttcagaggtgcatccagagaagccacactccaaaaggaccacttccaggtaagcatgacacactgctgggtgcacacgctcctggcttcaggttccaggatctttctcactgccttcatccccagctagtaatagggagacccttcccctggagcctgggtggtgactcggagatctactggtcagcacagagagctggggcaggaatacacatctgcagtgatgagggatatggagcagtgacctcatggccagggcatggttaacggtatctttgccactcccaagctagcccatggctgccggatcttcctctgcttgatctcctagctgacctgtgcaaccctaggtagtccagaaattccacaactagcagctctcagccatccctcctgggcagggctaatactgggggctctggcttttgttggaacccacatgggaccagcaaatgtttgactccagggttcacagggctttgttcttctgctgaaggcaaccctgagcatgctgccaagaaactgactccaagacttattttaggcaaactaggattcccctgcggctgggcagttctaatggggaaaagcggggtaactgagagttgctgaacggacaaaatcttcctcatgtttctagcctcctgagggcattcacgtttatggagcagtgactgtttacctggggagagtttgcagcaataaaggggacatccctttcctgtagaagctcacaggatgggggtacataaacggagggagttattgagagattcaggcccagattggacagatgaagaaggcctccctctcacgagaagaggaaaaggcatccttgaggggaggaagagcagggggtatcaccgtgctcctaggggagacgacagggcaaaagcagacaggggagaggtcactgcacactaggc

SEQ ID NO: 8939 - DNA, 6000 bp, Homo sapiens
aattctccattctacctcttgttcctgtaaggcatttagcaaatctgtttgtgtaattaaatttttgtactattattactttatggactaattttacagcattgcttaacttatttaatatttccatactggttttaccatcttcgttaggaaaaccattgtataactataccctattattacagagtttgtaatctgaataccatctccttatctttcattgattatcctcttaatatcaagtcctgacctacttttatcaaaggcattgtctatagctatgtattaaaattttctaccattagaatataagttttatccctcttggtaaatcgttttcctactccattattcaagggtaaaataggtgtgtttacataattctcaacatacacttttgaatctttttttcaataagcttaacaaaaattctgtaacatttaatgaacacttaaataccaaggcatcaatccatctacccgcccacaggcttgaaaatcattttctccaatacctttgcataagatgcatcttacaggacctactcacagaaggtaaaaacggagaggcagttcttactctgctctctgaaaatatcacctcccctccaaaataaagaactctcagctgttcataaataagtattcaaaggaaggcagtgagttagtcaaaataggctagactatgcttcagtgacaattccaaattttcagagtggctttttgatagtatggctgcaatttattttgctgcttcttattaaaggatagtctaattcctctccccttcagtctggtgtgtcttcagtgccttgactaatagaatgaggtagaaacgacactcttagacttctagagcaatgcagtttccaccttctgggaactcttgctctagagaaattaagtatgacagccctcaaactgccatgctgaaggaagccgaagccagccacatggagagactgcgtggataagagcaatgcctgtgcagtccccagctgttccagccagcctacactaagtgccagatgtgggtgcaagggacttcaactaattctggcctcggcctccaggggtctgccaccatataaaagagtacaagcaaatatagcccagctgagctcttgaacccccaaaaccatgagaggtgagttttgggatggttgattaggcagaaatagttaacctgaataatctctcatagtgaaaacgtatttcttacctttgtaaagtccttttaagaatcctgggaaccacccaatgctgctattctccaccaggcagctcagcaattcaggctgctctggtcttgtagactcttagatcatgatcttttctctaaaatttccacagcaggagaacagaacactgggacattttgtgccggtgattaaatacttcagcctggaaatgatacatacccaccccttccatttgtagcccattggccaattcatataaatatgactaacttctgaggggtgtaggagcatcctcctctgtggggcagggaaagagagggggactagataggatctaccacactcttcttcccctctctcctgctaatgatgttacctcatcagaggcctaggaattcctttgcctactaggaaccacatatttttgtgtaatcatagctgccctgcagtgccaccatcactctgggggaaaaagccttttctcctagtaccaggtaccaatcttcttaaacctgtaaatccacgttttaaacataaacatggatcacacactgacctagcatagcattacagcataacaaattgccccaaatcttagtggcttgatattatgtaacaacattgattacctcacagtttccgtgggtggaggtcccagctaagctaagctttgccccctggttctgggtcatttataaggctcacccgtctcaagagcactggtgacagatttgcttctaggtcactcatgtggttgtttgaagatccagttctttgagggctgttgggctgaggtctcagttgcttaggctgcagacctcccttgtcacatggagctctccacacagagtcgcagagtgagtgtgcaagaggaaaagaagtttccagcaaaatggaagtctcaggtttttgtaaccttaacaaagaagtgataatccatcagttttcccatcttctgttagaagtgggtcaccaggcccaacccacactcaagaggaaaggatcacacaagggcctgaataccaggagggagagatcttgggaggagtgccagaagctgtctatcccaagtacatctatgggatgggtattctgcaatacaggggacacaaagatatataaggtaaagcccttgaccttgaagagtttttagtagtggttggaggagtgagggtagagggtgatagctacatataaatgcattatactatgaaaggtatgtggtgaagttattgtattagtccattttcacgctgctgataaagacatacccgagacggggtaatttatacaggaaaaagtgtttattcaactcacagttcctcatggctggggaagcctcacaatcatggtggaaggcacggaggagtaagtcatgtcttacgcggatggcagcaggccaaaagagagacagcttgtgcagggaaattaccatttttaaaaccatcagatctcatgagacttattcactatcacgagaacaacatgggaaagacccgcccccatgattcaattatctcccatggggtccctcccacaacacgtgggaattaggggagctacaaaatgtgatttggatggggacacagagccaaaccatatcagttatacagaagagcaattggatctgagaagagacagcagctcattctgcatgagctatcagaggtacagtgtggactacatgacagagactgaatgattcactggacaactggagaagagtgttctaatcagaatgaaggagcaaggagacactgaagtacacaatgtgctttgggaatggggagtagctttgtgttactaggacacagggaactctgggaatagtggaatgtaaagtgggcaaaactgaagctgggctgtgagaggcattgtgtatcatgctaagtgaagttaactttagtataagaaaaatagacattacagcgtattgttgcctccaaataataatattagtgttggcaatattgtggcaaaaaccacaattatgtttgcaccaacctaatatgtaagctttttgagttagaatatgtgctaggcattattcttatctcatataatcttcacagccaccttttggagcaggttctattactacccgcattttaagagaactttggtgtggactagttttagccccaaatcacatggctaggaagtgtcagggctaagatgccaatcatggtctgacagcaacaggtcccttaccctggtctgtgactccttacggcaaggtcagtcccatacttccttgctactttcttcctaccatccttagtctgaaggctaagacttcagtttttgttaaagataggaaatgctttggtaatggctgtctttcatgctgaagatgctctctctccttttagcttttcattttgtaaattttccaacatatgcatgagtaggtaaagtagcaaaatgaacttagcttcaacactgactgatgttgcaccacttttctttcacctatcttctttccattccctacattttatttctggagcattgtaaaacaaattctacacatcattctatcatgaaagtgataaaatgacagaattcctgtttatgagtcacttctttttacaagcacagtaaaatgttttccattgagtttatggaattgatatgtatgtacttaataacagtgagtcttagtagcattcattgcaaagacattttcttaaatttcaatagtttgtaaacccttgagtgttttattttaatgataagggctaggtccacatagtttttagctaatactaattaatgcataatgcaggccagatcttctcttcaggcaaaattaacttccctctcctataagtattgattgaaatttgctctcatgtgccctgaagtacttttagtcttattgctgtctttgttttaagccgagggcagaaaccacatccttttcatggtctattaaccacattaccgaggttcatggtttgcacaactagtaaacacatacaaagcaccctttgagaaagcttcctcatcctttaattgtaatccagtcttatatattaacggtgtggtggtcccaaggtacagattcatctaatgtgacctggaaagaaatttggaaatcacttaaggctaccctcattttagatctgacaaaactgtagtcaagagaaatgtgaggtccattttactgcaggtggcaatagtcttaattgactcattttatcggctagtacccatgtttttaagagtttctatgaaattaacattttttgtaaaaaaaatgcaattgcataggctagtttcatcaatatcctaaattagtgatgcttcaatatacacatgcagagtacttaaattttcctctctcttcagcaggagatactcaccacgtccctccatttttcattaaacatacgtgtaccttgcagcccgttgcttttatatttgctatcattgaagaggggatggattttaaaattactggccatgtttccctttagagaagcccacacgcgccaaccctgcccttattggagcctgggcagcagcggtgcatgttctaacttaggcaacgttgggtcatctgtttattgtcagcttggcggtcaggaagaaagggcggtggttgctgaggtaaccgacaccccgggcaacggcaagtggaggcgggagggggcgtggcctcgacgggcaagcggcgataagaggtggcgtcctccgcggcattgcgagcaccgccagtctgcgccgctaggcgtaggcggggtggcccttgcgtctcccgcttccttgaaaaacccggcgggcgagcgaggctgcgggccggccgctgcccttccccacactccccgccgagaagcctcgctcggcgcccaacatggcgggtgggcgctgcggcccgcagctaacggcgctcctggccgcctggatcgcggctgtggcggcgacggcaggccccgaggaggccgcgctgccgccggagcagagccgggtccagcccatgaccgcctccaactggacgctggtgatggagggcgagtggatgctgaaattgtgagtgtgcccgcccgccccggacgccgcagtgtcctcgcgggcgtcaccctcccaagcccgcgcggcccggtggcgatcccgcattgccgcttgggctcaacctaaaaccccggaccaggcttgccaacaacctgcggcgccggtgccgggccgcttgcgatcctgcactgccgctgggctcgacctggggtccgcggacccgccttaccaacgacctgcggctgtggggcccggccgctcgcgccgcgcatgcgcgccgagccctcgcggtgacagccgagggtgcagcgcgtccccttgctttgggggacagtgttttcggggtggagtgggcagcttcccatagggaggagaagggaaggaagaaaatctgcaagcaaaccgtgtgcttttagatacagatatgtattggaagagaaaggacattcagtgacatccacgtgcagtatgaatacgtagcacaggctaagcaagttacctgttgaagaaattgcagcacggtgaaggcaggccatttgtgtcgtagtcttccgtttgaagacctggagatgtcattgtgagaataaaacataaatatggatgccttttaaattttacagtatgatttcaaataaatgttgatacttattataacttgtaaaggtaggactttctgagtaatattaataattgtgccataaagaaaagaagatacgcattgccccttttaacaatagaaagcaaatggtggatagtgccttttctttaaggagatgggaaac

SEQ ID NO: 8940 - DNA, 6000 bp, Homo sapiens
actcagtagttgattgcatcactggtgccattgctttacccttccctgtatttccccgccccttgaatctgggctcacctatccaatacaccttgtatatgtatttctgcttattttcttttccttcaaccatcaccgtgagaagggaatgccccttatagcttgctgatcacaggaagagggggtgagccaggtgcagcagagcttgtaaggtgccccagccaagcccaggctggaggtgagctctcaggccacccagagacctatgagtgagccaaccaagatcagccaagcctcagctgacccacagatgtgtgagctctgataagaaaccatacttgttttaagccactgagtttgggagtggtttgttacatagcaaaagctgattgatacatactcttttgtgggttttttcctttctctgttcaggactcaagcattttctcctgttcccatccacatgcaactcccaccctatccactggttatagtcattgctgtccttgggtctgaacctccaagggtatgcttaggtttcctaattgcatcactgaccctgacaacaacccctgagcctcagacctacggaaacattgtctccacctggacttgccttaggctcctgaaatccaacatgtcaaaatacaatacaacatttcccccagcttctgtccccaatctgttcattcttttgtgtgccttgccccagcagtgacaccaccatgctccctatcactcaggccagaaacagggctcatgggtaacccctctctccttcactcctgctggtctctaagcctcacttgctactacttcatgtcctaatacccctcctgaaggaccttgcacctcctacccctgccactgccccattccagcccttgtcacctctcacctgagctattgtgggtcttataaccctgtgggccccaaacctagcatccacccaaaatatagaacgtcaaaggagtcatcacagctgtcatcaatcacaaacccttccttgagttgctactctcaaaggattaggctcaaatcttgccccttctataggcacagcacaccttccacgacctggcgctgaatgcaagagttattgccatgagccttggggaccaatgtaactcctccgacgagccctgtgacatgggcaggttccttgctctctctgtgcctcggtttcctcatctctaaaatggaaataataactctacctcccttatagggttgtactgagggttaaataactttacgtatttgtagcgtgtctcaaatggtacctggcacaagaaacctaaacatgttctctattatcacagtggcttttattttcacatgatattttattgtacttgtcatttatcatcctttcatagttgtttgacaaagcaaaatctctttttaaactgtgagatataatatattcccatcttcctgtctagtctttcggataatatttgcaatttattgtcatgagttaatggaccatattaggtaattattcttgtatgtttaatttttttctaataataatgctttgtttttaatacacaactaaaaccaaatacatcctttttttgagtcaggttgattgaagcataatttgcttccaagccaaatgtactctttttaagagtgtacaatcctatgagttttaccacagccatcactataatcaagatatgaaacatctgcaccaccccagggaagttccctgtttcccttatgatcacctgtgtagaaccagctcttcccagcctctccctcgcccttcaggctttgccaacaactgagttgttcaacagataaactgagatgatgtgatctcagatcatcctctccctccacctccccctctcctccttctctttctctgtcttcttcttcttccccttccccttccccttccccttctccttctccttctccttcttcttcttcttcttctttcttccaacctggaactcttgggctcaagcagtcctggggctagctggagctgcatgggcacaccaccacacctggctaacatcatgccttactttgcccatgctattcctcgccagtgtgccctttttggcctggctacctcccacttcttcacacctctgctgtcagcctctgctcccctcagggtggggtaactcccccggctgggggctcccagactgctgactttgtgttgaaatgacctgttcccatctgagagccccagcctggaggctggactgtgggatgggctttctcgtgctgctggagggctgcatgatttagcagaagacttgagcctggggggatgcctctcactcccaccacaggcaacccttgtccatctagtcctagggatggatctggtttttcccagatacgccttgggagagctgacgaggctgcagggggttaaagatgggtgtccacaggcacagcagtggctgtcaaagtcgggccaccctgagggtgtgcagatctgccctgacagagcctggtgcagcgggactgatttctttgcccaaagggcatgaggatgatgaggctggaagtcttcacagcacattggggctggctgttggcagatgaggggcaaggacagaggaaatgcaaaggctcagacagggctgctcttccatcccgaaacaaatgttgtgttgaggccaaatcaaatgttaagttatgtaagggaacaaacagggagccccttttctgtaaacactcctcactcctaaggactttgtaatgttatcgctcatgggacaatatttacagaacacgtatattcacaagcctctattctgtgcaggtgctgtgtcggactatggttcacagtgtgggagacactgctgtggcccccgacatgcctccaggcactcaccattctgccaagggcttcttgctgcaaggctttctccagcttgatgggggcgggggttaaagtccccccagaagaagctgttaaccaatgaggactgggagtggctggataaataaccaggtcctcacccctcagctgggacgtctctggggtgtgttctacagtttcacagcatccccagagacgccgagccctgtgtgcccacaccagtcacaggcttgatgttggtccccttattggctcctgctcatcccacttctccaccaatgtttcttatgattatcccccaaatgaatgattgaacaaaccctactgccaggatctgcttccggaaaaagataaacagtgaacaggataaaggaggtccctgtccctggacaggcccttgagggcagctgggtcttcactggacctatgtgtcattctaggctgcttgcccagcttagcactgtataccgggcactccacaaacaccggtgaatgaatgaatgaatgaatgaacgaatgaatttcctccctgaaacccagaggaaggagtgattgtcctaaaggagtatacccatgttcagaaaggttagatggcccagccctggtcaagtaggactcattggtagcaattgccagccagaagctgggattcttgactttcatttgaagccgggtctcactgctggaaaatgactgagtgttccagagttaatccaggttaattcctgctgattaatcattaatgggctaaggaaccgccaagattaaaaataggaatgaacagtttaatttcaacccaatcgctctttattccccatgaaggcttgtatttttcacatctttctaacaacagctagtacagtactagtgacaaatggggacagggaagattgaaaattgtccaagaaatagatgttaggcacgggattctgcagcaacaggagctagggaagtgatggggggcagtctaggcagcctttggtcgctcagaatccaaaattccaaagaagctggctttggctcaagttcaaagggttggctttaagagacgctgacataatggttaaaaatcaagcctaaaattattttaatttaaagacttgactaattatgaagactgagtgttggctgatattggggagaaagtcagggaatgaggaagtaccagttgctccgttttgtgggacacggatgagttttcttaggttagaacctctcaccttccccaacgcatggaataaaacgccacagagtggattgtaattattgctctgccggctgtgatttggttgagtatcttaaatagaccgtgcctcagttgtaccctccctaacaacgagggcgatgacatccgcttcaattcctcgtgcaccttctggctcttccaccccaattcctccatttactgaaggaaattccttctggtgctgattgcaatctctttgatgataagaacttgctctccctgggctgacccccagcagagcttgtcctcatacccggcggcccgagggggcgctgcttcgggggaagttagttgggtttaaataaagcagcttccttggctgttcgcggttgcgcaaccctgttcagccaccgccatgtcagcccagcggtatccagaggcgcaggcccggggtcgccgggacccgaaccttctgcttcccgcctaggcagagccggatcctagtcagagactgctgggagcgccgcgggcccagagtgggcggagctggccggagacccccccctcggtgggcggggcgttcctgctccgccccgccccgcgcacggccgagcgccgcgccgctcggccccgcctctccccagccctgcccccttcacctccccgcagctcctcccctctcccattggccgaggtggagaccctcctctctgcccaatggccgccgccgcggctcggccacccgcgtcctgactggccagcgaccggcagagtggcggggtgcggaccaatgggaagaggcggctcgatgaatggctggcccgggtggggaaggcaggaggcggcgatcccggcggagggggccgttcgccagctctgaggcagaaagtgccacgactccacacgcgcgcacgcagccagcgagcggccggagcggacggcagacggggcgggcggcgtcagggtcgcagcgtctacagctgctcgggggcggtttcttggcggaggcttggccggctcctctctcccggctccgcggcggctgcgaaggcggcggctcctgccctctcgctttccctctcgcgtctctggctgcaggtaagaaacttggccgggccctgcagcggccgcgcgcgggccgggccgtcggggggccggggccggccgcgctgcgccgcgagtgacacgtctcctcggcggcccctcccccggcccgcccgccgcccgccgcctgccgccgcggccgtgcaccatcggggtcggggtcggactcggggcgggggtgccgggcaagcgccgtaccggggcgtaggcagggcgcgccccgtggtgtggaccccgcggccctcgccgtccggggagctgcggcggcagacgggcgcgacgtggcgaccgctccctgcctccctccctcccggcagggccgtcgggccggccagcgcgctccgaagttgggcgaagaaagttggcggcggggcggggcggggcggcgcacagctggcggaggaaggggttaagtttcgggaagccgccggatgacgttgccgggctggagtccgggccggaggggtggggtgcgggcggaaggcggcggaggccggccgaggggaggagggcgggattgaatgggggcccacgggccgagcgcgccggtcccgggccgcggcccgctggcgcttcgcggggctgggacggcccccgacggggcgggccggggccgcagggctcgcggcgcagggaccgggtctgtccatggcacggacgccgggcggccgcggtggcaacttcccggagtgcgggaggcggctccctgctccccctggcggcggggccggggccaccgtttccccggctgggctgcgcggagcctggctcgagggctcccggcggggggacgagggcgcccggggcccggcccgccccgcccgcggccacgatgaatgggccggcggtg

SEQ ID NO: 8941 - DNA, 6000 bp, Homo sapiens
agcaaacgattaataaaggacaaatttcaattttacaaaaatgttattcaaattctgttaagcgcctcatgtatgaactaaaatctgtactgacaaacaaaaatatcaggtctcacagttttcactctgtttctgttttaaactttgaacacaaaatccctaagtggtcccatagaatgacaggtcacagtgactccagttctgtttcatttcctccaccatttctgtgccactgttgctcattgtgagtctaccatataccatgttatgccaggaaatacgcagtgtgctttgtttccctttttaatttaatttttagttacaaaaaaaaaaaaaaaggaaaaagacaggccggatgcctgaatgatccacaaaccaattagtctgctcccaaataactgagattaaactcgccccatatttgagatcagaacattccattccagcatcgtgcaaagtaaatttttaaggcaatttaaaaagaaagctcagagtactcataaagactgcagaatacacacaaatggtgaggagccttttgctcagggtacatgccatgctgttaggctcgccatggttctagaacacctaacgtggcttccgtccaaagatctgccgagaaaaactttttccatctccttctgctgattcctgctgtttaagtatcggtccttggagaggtctggtataatctgctctctaaataaaatgggatgaaacaccatccatggggaatttagtatgtgaggtgcagaattccctcaaagtttgcattcagactatcttaaattctttgtaaaactccaccaaatccctcccaggaaaagcaagctcttcatcctcccctgaggtcgaagcaccatgccctcagcctctacgaatcccctgaacagcctctaaggagcgtcccctataggtgggagcggacacagaagggcggggctggagctagagaacctagctgtaagtgtcccaggtgaattaacccacctgagcccagcagggatcagccaaagggtgaagggacacagtggaagtcagatgtgggggacaaggaataggaaactaccctgtgtcttggcagtcagcgggtcaatttgggatgaaattgggtgtgtgcagtttagacagaggtttgcttacatgtgcagtatgtcgagggctcagcaatggtctcagtgtccactctcttcccaacttgctttctccctaattccagaggggagagttaagcatgatttcacttttattaatgttagagcaagaaagtttccagaggccctgttcccacctctgcatttatagatgagaagtggggctgagttaaccaagttactgaaaataataaagtaaaatccaaggacccccagggcaaggcagtttctgcattttacatagtctttctcactgttggtgctttacaaatacttccaaggttaatggataaaaaacagagtatatgtcttgctagttcattttcttctttaagatgtcatcacttggctaagtgaacagtaattggtttgaaagttcccacatggaagatgaataacttacagctaaagaagatatcttgacaaagatctgggggtcagagtggctaacatgctgaaagtcactcatttagcccatatccttaagcaccaactaagtagaatgctgagcgaatgctgcagatcacaatctacctctgaggaatctacctccgagctgcacaaacaggggcctagaccacgagaacggctccctgctatgagtggatgctagggctgcagaattgattttacagaatgttaagaagttacctgcttgtaaataaacccttagaaatgaagcttctcccaagcagagaacaagactgacccttgccaaactcaaatgcatggccagctatattgactgggagccagggacaccagccttccctggacccctcacagctggctgcttacccagctctggtggcacacttagcgtcccgaggaggcaggtcacaaggacagggggtctgggagaccctgagccccaagaggcaatcccctgtgttctcagaaccaggtacctccagcggacacagccttccaggaccccagctcccggcaggagccatgcagtccttctgcgtgcccggtgcccttccccccacctccacccagccccgagaacatctgacctggactccacagcctggaaacctgcggccacctgctgagggcccccccacccactgcttgggtccactgaccagtccccttccacatgtaggcctcatgccagccctcagtgtttccccgtggatttcaagacgaagcctcaagccttcattactggggttcacagggctccatcttcccctgcatcctccctcccactgcctgggctttggtctccctgcccttcactcactctctgtccccagggcttctgtacatgctgttcccccatcccgacaccattccacatctgagctgcttctcctttagattccggcttgactgcctgtcttctccagaggagtctctcctaattgcccatcccccagtcaggatgccacccctgtatcaaccacgacctccccgctcccctgtgctgcctgcaataaagccatcagtgccgtgacttgttcaaagttgtccactctaacaggactccaggatcacagaggcagggatcccctcctggaatccagtgcctcactcagtgcatagcagggtcttaatcaacaattgttagatgggtggatggacaaacagatggatgaatgaaggggcacagggagggtctggtggcttctatggagagttcccaaaatgtctcaaatatctttgctaaaatgcaaggacttaaggcacattcttaggaggtatccagctggagtcagagatgcctccttgtcccttggggagccagcgagctcctagcccccgggacaactcaacatctccatggaggccactgtggtggtcgctggtgccgggtccacaggcgttcactgtgttctccaccgtggcgcttcttcccctggggccctcacggtcagtgcagagcaccaaagagttgccgctgtgtagagaattcttataattgtgcattgcatccattttgaatctaatttggaccctctcctaccagaagcagggtttattgctcttgacacggtgtctagggctccaccccctcccagttcctcaatgcggccaacccagatatctgccttgtacacccacctcctggtgaccatttccctgtgggacaggcagatacagcccatttgatggtctcagtgactccacaccccacagggacttcccagacatgccgccatgcccacctctcagccacagggaccccacggagcccgtgtctgtttgctctaaacccaccagtgagaagtccccttgggaaacctgcttgggaaacgtcctggaccccaataaaggcttaggacccaggtctctctctctcccttcacccccctccaggtgagtgtttgtgacccagacagctccccactttttgctggccccgtggggtgcactgccctctccctgggatctgtaagtgacacggtgcttgtgttgcttcctgtgtcttcttgtgctgcctcctgcatctcccctgacccacaccccaacccaactctcctcccatcagggatctcttaggaagtggctgtcttgataggaataaactggacatgggtcagacgagagccacaagggtgtctgtccatagaaacaagttttatgtgagagagacccctggtcactgggcagggctagaatttatagtcagtctctcaaagtgagagatacagcctgctaccaatgacaggggacttggagagcagtggagcctctccctcagctgagatggtgctgaggtgtggtcccctcaggcccccagagtttcctggcactggctccagcagcccagggtcaccttctcagcaagtcatcatgggttggcttcctccttgtctgtttcacttcccctcccacataaactagtctccccaaatcctgtctcagggtcccctcctgggggatcccaaccaatgagcaaaggtctgtggctgcaggaaaagcacactgtgagtccctggcttttgccgagtcgcggtgtcgcgggagggcctgcccgggcttcgattcccgctccctgcccagatttccggcccttgctaggaatcctgagccgggggaagtgagcctgcaagccctgcgccacgaggccggacacattttcattttctttctgatgctttttgtgaccctgacacctcacaatgcaatatttccactatgaaacccccagaactgccaaatttcacccaatttggattaacattatcgaggagcttggcattatgttgaaaacccagacattcccacgacccgtatcctatttaaaaaatgcctgtctatttaaggttcacgatgggaggataaaagaaaaaaggctcccaaagtcaacagagaacatgagctaggcaaaaggaaagtccagtttgcttctaaaaaaggctgaaaattataaccatccatggccttgtgtcttaagtctcagaattttttttttctcttttggtggtttgcaaaccaaagtggaattttattatgggttactaagggagcttcctcgagttcctagcccccaaagcccctgctcactccatggcatgcctccgaggctcctcatgccatgagaaagagaatggagccaaaatcaagccggcagtatctcggggctgtaacgtcttccccccgtcgctgtttccacagtgctgagccagggacccggcagagctgcctgactccttttatgaacaacagcaccgtgatgaaggcagcaggagtcagagaactattcattgcaggaagccccaacatccggtgagaaataagaagtacaacagtacaggatgcgccttgggtcagggggacgtggaaagccctcagcctttgtgtccttctctgcgccggagtggctgcagctcacccctcagctccccttggggcccagctgggagccgagatagaagctcctgtcgccgctgggcttctcgcctcccgcagagggccacacagagaccgggatggccacctccatgggcctgctgctgctgctgctgctgctcctgacccagcccggggcggggacgggagctgacacggaggcggtggtctgcgtggggaccgcctgctacacggcccactcgggcaagctgagcgctgccgaggcccagaaccactgcaaccagaacgggggcaacctggccactgtgaagagcaaggaggaggcccagcacgtccagcgagtactggcccagctcctgaggcgggaggcagccctgacggcgaggatgagcaagttctggattgggctccagcgagagaagggcaagtgcctggaccctagtctgccgctgaagggcttcagctgggtgggcgggggggaggacacgccttactctaactggcacaaggagctccggaactcgtgcatctccaagcgctgtgtgtctctgctgctggacctgtcccagccgctccttcccagccgcctccccaagtggtctgagggcccctgtgggagcccaggctcccccggaagtaacattgagggcttcgtgtgcaagttcagcttcaaaggcatgtgccggcctctggccctggggggcccaggtcaggtgacctacaccacccccttccagaccaccagttcctccttggaggctgtgccctttgcctctgcggccaatgtagcctgtggggaaggtgacaaggacgagactcagagtcattatttcctgtgcaaggagaaggcccccgatgtgttcgactggggcagctcgggccccctctgtgtcagccccaagtatggctgcaacttcaacaatgggggctgccaccaggactgctttgaagggggggatggctccttcctctgcggctgccgaccaggattccggctgctggatgacctggtgacctgtgc

SEQ ID NO: 8942 - DNA, 6000 bp, Homo sapiens
gtatgtacattttctgttttattttacactaatcctacatattagatattatatctccagtttttgggaaagagttttattttacactaatcctacatattagatattatatctccagtttttgggaaagaacaccagagattgaaataacttagccaagtaggccagtatgtggcaaaatgggggctcagacatactccacattgtaattctttcatccttaccacaggccggtgaatctttgtttcaccacttactagctgtgtgacattggagagtcactgattctctctggccttcagcttccacacctgggcaatggggacagtcactatggatgtctctagggcagatgggaagcctaagacaggacatgcttcaatttcttccctatgcctccatccctgattttttttcacaattgcttattgttattagtggtagaaatgcttggctggaacaaattaaatccaacagacatttggtgagtccctaccatggaaaagaaaccatgctggatattgaatacaatcagatgccgaatccaaattctagggacttgagtgttttcttttttgctaaaatttattgagagctgactacggctcctctgttctaaatgctttacatgtataacccatttaatcttcatcctaacactttgaaggagggactattcccattacacagtcaaggaaactgagctacacggggaggggttattagtcaaatcttaacaataaacaaaaacttgtgaatgccggagctgggtctccagtgcagccaagtcggctccaaagtccacactcttaattcaccctgaggctctgaggtcccccatccttgtctttgcaggtgaatgtgagaaaatcaccctggagaggacaaagaaacatctaccacaggtgctccaataagctctgggcactgtctagttacaaagcgtgctgttaggtgtaaggggatacaaaaatgtgtgggaatctggagtataagtgcagcaaaaagtgtggtatatgcatgattaggtacagggcagggagggagtggtgagtactaaagagctgagagaacgacctgtctatgggaatcacagacagatcagttctggttgggttattcagaaaacttgctgatggggaagcttgaactgggacttgaaagaatggaaagatttcagtgggtgaagagcctggcagacgagaatgttgctagcagagggagagacatgaactacagggtggagatgagcggacaaggtgcttctctgacagtgagcaggagcctcccttgccaggatgtttcctcattcatggagaccagcagaacactggtccttgaagccttgtgaggtgcaaggggtgcaggctctgggtccaaattccagcatagccccttgagtgcaaattttctcatctgtggccacagagtagaggcactatcgcgagcatcttcagtgcggaggggaaagagtatgggctctcccagcgggtgggagcagcactgagggagtatgaggatcagagtagcctcagccacggtggagagctggagagataagcagcaaggaaaagagctggggacccaactgtctcagcataaattgagaaggcaggagcagtgatcaggggaaacaagacacaaaaactaggcagtggatgaaggagagcagaaagtcaaaggcaagtgcatggtttaaaacctcagtggaccaactattgatactgggaaagatggggtaagggtcccttctagaatactccctccccaatctccttggacactgctatcactgccaggggaatgggtaagttcaccaaaaggtgggttgtaaagagatgatgaagaccaccagcaaaaccttgagaatggccactctagtgggtggtacaagaggatcccaggggcctccccaaggctcacaggagaggaagggaggaaaacatgtgtctcaaaagtaattggaggaggagccttgagaatggtgaagggtcacaagtgcaaatggcaccaaggcttctagaaggatggctgaaaacaagattttggcaacagtatttaggaccagatgggtgttcttcaagggagctgtttcaggagtaaagcaagtctgctggtgggccagagtgagggtgctgggccaggaactgggccaagcattgggaagtggatgtgttatctgcaaagggataggaaggagtggcccaccctggtgtgcagggggcacagataggaagatagggatggggcaagaacacagacaggggaccttcagtcaccagaaggtagtctaaaatatgcaaagcctccaaggtattggctggagaggaaaaacaaagcggctgagggcaggccccacaaggcaaaggtatcctgagggtcaggggtaaagcccttacaggtgggaaagccaagtgggtcatgtccacccatccttgtgtagggcaacccagacactgtggtaccccccatgggacaatgctctgcttctatctgttgttgctctagtttctttctaatacagaaacatccaacatctgcacctcctcatatagggttgatccaagtttcacagacatcactgagttcttagtggactcagctattggggctgttctcacactttttttttctttgcaagaatcagcaatgggtgcaagtggacctgtgtaggacgtccagtgaaacattgtgttggtgaatcagctagaatccatccaagaactcagccagcctggtgtggggtgagatctgatccttgaatgtccctcagtggcttttagggctggcaggttcagaagggccctctcatcacccccccagggcctcattccttgtttaacactttgctatcacagtcttgaatccttgtaattgaacaatggaccccacattttcactttgcactggtttctgattctgtaaccgatcctgtccccctctcttgtctcattcactctgggaattgtccccacattctgagacctttcagcagtgccccaacgaggttcctgcccttatctgaagctccaccctcacccccatggcggcaccgcaggcagccctgcttttgcgtcccgcgtaggcaggctgtgcaccggagtcacgaccccctgattcagcctaggcagccacagcttgactgctcccgccggacaagccctactgtgctatctgccgctcttcccttcctcttcccagggggtccgcgtcaggggaggcgcagctgtgtgcattccgggagcttcagacccccgtgtccagcagctccttcgtttcctgggtgctggggcggccttcccagcgaagagctcaactcagcgggacgtttggaggctctctgccccaaggcgctggggagtgtgcggcgggacagtcgtgcttgcctttttcactttcagagtgtccacgccccacccgtttggtcactgcaggtcagtccagtccagcccggcccaccccaccggtgcgtgtctgtcgcacgtggcagacgccatactctctgttcttgtttaaagcccaggatctactgggccctggaggcaagaggtgaacgcagcggaatccacgctgagctgcccgggaacggagcttccaaccccagaaggaggactctgtgctcctacaccttaaccctttttagcccgaaacttctccaacttccttggctttgtttagagctcgacagcgccgccccctggcgctcgttgtgaggacagtagaggagagaggcaagggtgtttttaaacagtttgcctctcaccattatgggggcgacccgagggggagacccactcttccgcattcccggtaagtgaaccaccggaagaggtcgaaagtgacggattcccatgtcctcctccagccccccccccaccctgcccatccacaggacggtggctcttcagtgccctttgccgagcaagtggcgtttctatgcacgtgggtatcaattcggactctggacgaaatggaaacctccttagccgacccgggtgggatcagctgggatcctgcgcgctcccctggggggttgccagccactctgttggggtgcaagaagcaccatccttcggaagctgggccgaaactggccaggctgactcgctcccacgcgcccgcccctacccggcgccgcagcaattcacctgccaccgcctctgagccgggtccggacttcggcgccctgacagtgtccccgcgacttccccacccgatgagatggggtctggcgttggccagtgcgtgtccagggactcgcgggtccctggccagccatggggcagagggcgctggtgttaggccagtcttccccaccctgccccgtcaccccagccacacccactgtcctgtgaggccaagcgcgctccgctggtttcctgagccaggcaccttggccgcggacaggatccagctgtctctccttgcgatcctgtcttcggggaagtccacgtcctaggcaggtcctcccaaagtgcccttggtgccgatcacccctcccagcgtcttgcaggtcctgtgcaccacctcccccactccccattcaaagccctcttctctgaagtctccggttcccagagctcttgcaatccaggctttccttggaagtggctgtaacatgtatgaaaagaaagaaaggaggaccaagagatgaaagagggctgcacgcgtgggggcccgagtggtgggcggggacagtcgtcttgttacaggggtgctggccttccctggcgcctgcccctgtcggccccgcccgagaacctccctgcgccagggcagggtttactcatcccggcgaggtgatcccatgcgcgagggcgggcgcaagggcggccagagaacccagcaatccgagtatgcggcatcagcccttcccaccaggcacttccttccttttcccgaacgtccagggagggagggccgggcacttataaactcgagccctggccgatccgcatgtcagaggctgcctcgcaggggctgcgcgcagcggcaagaagtgtctgggctgggacggacaggagaggctgtcgccatcggcgtcctgtgcccctctgctccggcacggccctgtcgcagtgcccgcgctttccccggcgcctgcacgcggcgcgcctgggtaacatgcttggggtcctggtccttggcgcgctggccctggccggcctggggttccccgcacccgcagagccgcagccgggtggcagccagtgcgtcgagcacgactgcttcgcgctctacccgggccccgcgaccttcctcaatgccagtcagatctgcgacggactgcggggccacctaatgacagtgcgctcctcggtggctgccgatgtcatttccttgctactgaacggcgacggcggcgttggccgccggcgcctctggatcggcctgcagctgccacccggctgcggcgaccccaagcgcctcgggcccctgcgcggcttccagtgggttacgggagacaacaacaccagctatagcaggtgggcacggctcgacctcaatggggctcccctctgcggcccgttgtgcgtcgctgtctccgctgctgaggccactgtgcccagcgagccgatctgggaggagcagcagtgcgaagtgaaggccgatggcttcctctgcgagttccacttcccagccacctgcaggccactggctgtggagcccggcgccgcggctgccgccgtctcgatcacctacggcaccccgttcgcggcccgcggagcggacttccaggcgctgccggtgggcagctccgccgcggtggctcccctcggcttacagctaatgtgcaccgcgccgcccggagcggtccaggggcactgggccagggaggcgccgggcgcttgggactgcagcgtggagaacggcggctgcgagcacgcgtgcaatgcgatccctggggctccccgctgccagtgcccagccggcgccgccctgcaggcagacgggcgctcctgcaccgcatccgcgacgcagtcctgcaacgacctctgc

SEQ ID NO: 8943 - DNA, 6000 bp, Homo sapiens
gttggccggaagccttactgatagctgtaaacattgaattaacacatattttgtatgtcctaagtattatatactgtattcttacagtaaactaagctagagaaaagaaaatgccattaaaaatcataaggaagagaaaatatttttactattcatgaaggtgaagtggatcatcatgacggtcttcatcttcattgtcttcacattgagtaggctgggaggaggagggaggggaggggttgttgctgtctcaggggtggcagaggcagaagaggtggagcaggtggaaggggaggctggtgtaacttttattgaaaaaacattctcccatgagtgcacctgtgtagttcaaacccatgttgttcaagggtcaagtgtagttactctcaagagatggtttctggatgtaataaaacatgattaatgagtgatctgtgctaatcatgaaatgtcagtgttaagattccaaagggaacaaaggggctggccattcacttttcaacaacagacaatcaggaatgtacatgcctgtggtggaggtgactgctgaacgtctttcctcctgagcacttttcctgccaagtctaggtcgaccttaagaatcctccacgtgggcaattagggcaattttcctggccagactctcttcagtgctcacctctgctcctccctgcttctcatggggtgaccacgcattcagtgagcctgtcctgcccttctgcctacaacagggaggctgctgtgttgttcccgttgaatggtcaatgggccacggggtcttatcctctaacatggatcatcaacctcaccaaagttgggaacatcagattctcagtccaggaatcaagacttggagacggagaccatagttagttggtgtgggatacttgaaatgggagagccagggagagttgggcttaggcgatgctttttcaccatggatatgtccaggtagacaatgctagcctgttggccctgaggagcagtgcaaattgctcccctgagagctgcctcaatgcataaaaggactgtttctctcatgtgataggcagccctgaggtaggtggttgctggctgtggtgaacagctcaggggcaccattaaggacctaggctcttctgttctgggtgtgttttttagacatcaaggtgtattcctgtggtgttaagatgctgctgctccatgcttaactctcgggttccaggcaggagaagaaggggcagtgctagtcccatttgtcccttttatcagaaatgcaaaaactttcctaaagttcaaaatagtcactatatttctgtttttatcttgtgccaaaatactgcctatggctgcattagctttgacagctggatgagtaacactgatcttttccagctctccaggggagggcaacaaaagagaaagggccagcccagcagggcgtgccatgtgagcacggaggggtgcagagacaggacagtgtgaggcaccaggaggcagagggtgactctgcccctgtgttcccaggtctttgttccagtccctgtgaggcctggctgtactttctgagcctgagttccataaggtatccccagatccttccaatgcatccctccctcattctccgccagctttggtggatgtctgtttctggtagctgcatggtctctaaggtgcttttcctgcggtgaacaaactagtgtacattgcctaagtttactgtctccactgtcccacctgaattaaaactggagcttcccaccacgacatcccaccacgacagaacaacttcccttgcagcccttttccgagttggcagcgccttctgtgctttcctggacttgtggggaagaaggggttcagctacttcctgctctgctttgcccttttcagactattctttctttgctaaaaatatttatttttattttttgtttttgtgggtacataacaggcgtatatatttgtggctattctttctgatcactcagtaaccctgatgtccatccctgatcatcacccccttgtttaacaatccctgggcaccccactcatccctcttagcctgtttcttgtccttctctatcccccaacctccccctccccccgccattataatcttatttatctaagtcctggtgcaaagccccttcctccaagaagacatctctggtcagtcccatctaatagcacttgttcctccttgcagccccaaggtaccctgcagctcttctgcagcagtgctttatagtgtcgttcgttacgcttcctctctcccctccaagatgataacgcctgtgcaggctggatcactgtatttcacccttgttttgtcaccgcacttggcatctggcaggctttcaggagatctctgtggaaggagttgaaacagcatgggactgggaaaaagcactggactagaagtagggtttgcttctggtttgagctgcgaggcatactgtgggctccctgccagcatcatgcgcttcttcttccatgctggcagagcctgcttttgttgagataaatgccctccacgtgggccagtgttccgatggaagtgagcctcatccccagtgccagggttgggtgtgggttttggttggtctcactcagcgcttctcaaccaagggctgttttgtcctccaggggctatctgtcaatgtctggcaacattttttatcatcacgactaggtgggatgctactgccatctagtgggggaagcccagggatgctgctgaaacaccagcgcacaggagaggcccccctccgcctcctaacagaattatctggcccaaaatatcagtggtgctgagaaacctgatcaaattaatcatagtggtcccattcctctgccaacaactggcatcagcacgatgagaaacaaagtcggtctggttggaaggtggggtgggagaactgataactgaaacaaatacaacaagcaaagcgtgcttcaccgtgacttgaaaacagaaaaactgtactgaacccgtgctatgcagcacaaatgatctagctcagaccactgtaacaccaactacctacgtgcttcatgataagcccacgagctgacctcctgataactccgaatggacttacatgtcccagagctaaggccacggttcctccagtgactcccgttgttaacggattctgaccaaccctgggcaagactatcgatggactaactccagcccccaaaccccacaaggagtctcccatgactcccccattttgaggaacctcaccggtcctctggtgcatttctttgctgcagcaagttcagtaaacccaacttactgccattatttttcttctgaatgtgtccctgggtgtttgcagtgcgtgggctttaacactgggcatggaacacaaatagctccaatgcagtgagttcaatgttatggctgggacatgtttaaagtgccttgaagacaaagaggaagatgttctgcttgggaaactgggagaagaattttcagcaaggatacttgaagtgggtcctgaatgataaaaataattggccaagtggaggtgaaggagagtgtatcacaggaagaaggaacctcaaggacaaaggcagccaggcatgagattagacatgttaagccatcctgaatgtctgaaatggggggtggggagcaagagggatagtccagacaggcaggaaggcgtgagatcatacagtactttgttaacactatccctgatttaatagctgtattggctattctcaatgacacagaatgaagtaaaatgttgtcgaggcctgaattattacctgggatctctggagaactggatttgcacagctctccacttccctcaagctggttcttccgctctttgaatgaataaataaaaagcattcacatggaattctagtgccatctagcatttaaaaaggtaaaagcctccaagaggaaattatttcttaacactgcattttgaacatggcttttccagagataattcctcgtgccactggtaacgggctttgatttcttctgcctgtcacttcctccagattcgattcctctttgaatctcaaatgctctcacaagattcagctcttcccttttgaagcaattattacgtttgataattttacgtctattttatgatgatgatctgattaaagtcatctttcccactagtttaatttctataaggaggggccttgtctgtgatttgcccaccatcgtctcccagcacctgggaacatttctggtttcctgcaatactgttgaaagaacaatgcctctctatgctttcttaaactttgttagtgataatttctacttctacctggactttacttaagggtaatccttaataaactttatcaaaacttaataaactttatcaaaacttaataaactttatcaaatgtctgttgtaatcgtcacaaaaagatttaatactcaacatctggccttaaccagagggaaacattttctagcccaagttttccccttaaccggctgagtcggggaaggatgtaattttcaggcagaggtgacttcgttccaagggtgtgaatgcattatttttgacgctgcctgtaagagcagggtcgctgacactgaataaacagcgctatcctctccaacgataaaagtggccaacatctcgtgctagcaattcccaagtgcgtcatgagcatccccgtcctcagaaacgtgagacgaaggcggcatgcgcaggcactgggctagacgagcccgaggttgaaccactcgcgttctgggccccggagtccgagacaggcggggaccccggcagctcccggtgctatctctgagcgggttccgagccccacttccgggcggtcagaattagcctcagagcgccgagcaacgacgcgccggggacctcccgcccatgaggccggaaggggcggggagaacgctgcggaatggtccctgggcgcaacgtcatttccgcgtacgggggagggcgggcctggagtctgagccggcgccgctcagtgtgaggtggtttctgcgggtgaggctggcgcccgtaccatgagcgaggcggacgggctgcgacagcgccggcccctgcggccgcaggtcgtcacagacgatgatggccaggccccggaggctaaggacggcaggtagggcggactcccagactgggcgctggagccgggccgctaggagtggagggcgaccctcttggacagcggcgacggcagtaacagtaacctggggatgcggtgccgagcgcgttgtcagagtcctctcgtttcatccccaagaaaaactcatttttccgaggaagcaggctccgacaaggcggatgtacctgccaggtctttcaggttcgggtgcaccctgcgcccagtcgccgcgttgtcctcggctctccggacccgagaccgcctcgcgccgctcctttgccttccctccctcactcctgccccaccctgcatagcggttgcttcctcgcctttccctcgctcccctcgcgctgtccttcctttggcttaaatgatccccctgagcacagctacttggccggggccctgcgtgttcctggttccccgctcgcaatttcccgaagggaggaggtcccacgagatgctggggtcctgcctcgttatccggcgaagagatggcttctacacttgctcttctgcacctgcccccctcacgctgcgtgaccagtcctcaccgcggttcttggaaagagtggagaacagtagtgacattgtaggcaatttttgtgagaattcagcctggcagtttttcctgatagggatggagaaacataggaaactgtagttgttgacacctaagaaatatcaggttttgccctttgcctcctctcccatctttcagaatataagaatgctgtgttttgttagctaaaaactgaatcatgattcgtaagcatagatttcaatataagatacttaaaattcacttttcaattctgtgtcctgaatttcataacttttaagtttcagggagaatcaagaggccccatagaccaagcttgaagt

SEQ ID NO: 8944 - DNA, 6000 bp, Homo sapiens; identical to SEQ ID NO: 947

SEQ ID NO: 8945 - DNA, 6000 bp, Homo sapiens; identical to SEQ ID NO: 950

SEQ ID NO: 8946 - DNA, 6000 bp, Homo sapiens
gggaggctgaggcaggagaatcacttgaacctgagaggcagaggttgcggtgagccgagattgcgccactgcactccagcctgggcgcaacagagcaagactcttgtctcaaaaaaaaaaaaaggttagggccaggcgcggtgactttaggaggtccaggcgggaggatcacttgaggtcaggagttcaagaccggcctgatcaacatggtgaaacctcatttctactaaaaatacaaaaattagctgggcgtggtggtgggtgcctgtaatcgcagctactcaggaggctgaggcagcagaatggcttgaacctgggaggcggaggttgcagtgagccaagatcacgccacactgcactccagcctgcgtgacagagcaagactgtgtctcaaagaaaaaaaaaaaaagaaagaaagaaagaaaagaaagcactcaggaaacaatccctggcccacaggcagtactcagtactgtactctctgtaagtgcttactgggcaaaggtgaacaaacaggccctgcactgaggaactcagagttacgtaaaattaaaaaggtcaccagataataagcgtccccattattgcaactctatccttagcaccctgcagggccccttgagggcagaaacttattcaactatgtgagaaagtacttagcaaaagagagcacccaggaagaacttgccaaaccaaatagtttcgaaacaccttctgatgccgggccgtatgtcaggactttgtgactgactcctcatgggagcagtagaagtagatttctagaaattctgtttggttccttttcaaatctgccatgaaataaatagttttttgctcccaatattgatttttttaagttttaaatttcgtgagcacaattttttttttttttgagatggagtcttgctctgtcgcccacgctggagtgcagtggtgccatcttggctcactgcacccttcgtcttctgagttcaagtgattctcatgcctcagcctcccgagtagctgggactacaggtgcctgccaccatgctgggctaatttttgcttttttttttcttcttttttttctttttgagacgaagtcttgctctgttggcaggctggagtgcagtggcatgatctcggctcactgcaacctctgcctcccgggttcaagcgattctcctgcctcagcctcctgtgtgactgggactacaggcgcgcaccaccatgcccagctaatttttgtatttttagtagagatgaggtttcaccatgttggccaagctggtctcgaactcccgacctcaggtgatccacctgcctcagcctcccaaagtgctgggattacaggcgcgagccactgtgcccggcctgtatttcctttttgccaagggtttggagagcacatctactcggttatcatctcaaaccaggttcccagttcatagcttgagctttcttgatctattatatcaggctctactccctggggtacaaaaaaactcatcaatgatcacaacttcctaaggaagagctttaaaaaaaaaattcctctttccttctccttcagctgttctgcttagcaccaaggcagccttttctgtagttcctaggggctggtggtgtgggttgtgcagtggattcatttcacattagacttgagggcaacaccctttggggctcagcttaatgtgaggagatctgctatatggctccccacctggggaggccctagattttcacttgtgtccctcttgccctgtgtggttgacaagctgaaacttgcaggtttaatattggtaaacgccctcatgtcataagtagccttggtgctccaatatcccaatcttcccgttaagcatctggttaccagctttcactccataattggcctgagcattcctcatacttttttttttttttttaagatggactttcgggccgggcgcggtggctcacgcctataatcccagcactttgggaggcggaggcgggcggatcacgaggtcaggagatcgagaccatcctggctaacatgatgaaaccccatctctactaaaaatacaaaaaattagcccagcgtggtggtgggcacctgtagtcccagctgctcgggaggctgaggcaggagaatggcgtgaacccgggaggtggagcttgcagtgagccaagatcgcaccactgcattccagcttgggcgacagagcgagactccgtctcaaaaaaaaaaaaaaaaaagatggactttcgctctggttgcccaggctggagtgcagcggcgcgatctcagcttactgcaacctctgcctcccgggttcaagcgattctcctgcttcagcctcctgagtagctgggattacaggcacgtgccaccacgcccggctaattttgtatttttagtagagacaggatttctctgtgttggtcaggctcgtctcgaactccgaccccaggtgacccacccacctcaccctcccaaagtgctgggattaaaggcgtgagccaccgtgcccggccacattcctcatacttttaagcacttcagtttgacacagggtctcagtcacccaggctggagtccagtggcgtgatcaccgctcaccgcagtgttgacctctccaggctcaggtgatcctcccgcacctgtagttgggactacaggtgtgtgccaccaggcctggctaatttttgtatttttagtagagatgggttttcgccatgttgcccaggctggtcttgaactcctgggctcaagagatccacccaccttggcttcccaaagtgccgggattacaggcgtgagctacctaccgcacctggcagagcttcagtgtttttttgtttttgtttttgttttttaattttttagagacggggtttcaccatgttggtcaggggtggtctcgaactcctggcttcaagtgatccgcccgcctcggcttcccaaagtgctgggattacaggcatgagccactgtgcccagccaaggaacttcagtgtttttaagaggatattttaatatattatctaacatagtcattatcttcagaggaaggatgaactgaataaagtagcctaccatcacaaaagaaaaatcccggacaacccagtttcagtgacaaaataggcccagcacaactccctccttcattgacctctgaaattgtcccctgacactgagcaaataacatcactggtaaataccatatggcccaagtaccaggggacaccctcacaagtcacagccaccactcagtgtgtagctgttattcagtgacaactccacatagtgacatcatatgttaatgtcacccatcaatgctctcagagatgacaacccaaaactatgtgttgcttaaacaagcaagtgttgagtacccaccatgtgcctagtgttggggttacagcagaaaacaagacaaataagatttcttccttcatagaatttacagtttgataagggcaatggacaatgaacacatagtaaacaagtctaaagtgtcaaaagttctataaaaaaaaaaaacacataagaaccagggtggccgggcacgatggctcacatttgtaattccagcactttgggaggccgaggcgggcggatcacaaggtcgggagtttggactagcctggccaatatggtgaaaccccgtctttactaaaaatacaaaaattagccgggcgtggtggcatgcacctgtagtcctagctcctcaggaggctgaggcagaagaatcccttgaacctgggaggcagaagttgaagtgagctgagatcacactactgcgctccagcctgggtgatagatccgagactcagtctaaaaaaaaaaaaaaaaaaaaaagagccagggtaatgagtcagagtggacagtgctacttcaaattggatgtctcagaaagtctctctgatgaagtggcatttgagctgaaacctgaaggatgagaagaagcccatcatgggaagagcccaggatggcgaatatcaagcagggaaccagcaagtgcaaaggccctgaggtagaagggttcttggcccaaggaacagaaaggaggctgtttggctgggaagcagtgaggtggcaagtgctggaacgtggggtcagagggagaggcacggaccagatcacaggaggtcttctctcttgggccttggggaggagtttggattctaagaataagtggacgccggctgggttcacgcctgtaatcccagcactttggaaggccgaggcaggtggatcacctgaggtcaggagagcagcctggccaacatggtgaaaccccgtctctactaaaaatacaaaaaaatttgccaggcatggtggtgggtgcctgtagtcccagctactcaggaggctgaggcaggagaactgcttgaaccctggggggtggaggttgcagtgagccgagatcgcgccactgcactccagcctgggtgacagagcgaggctgcatctcaaaacatacatacgtacatggaagccattgaggggccatgtgactgacactctgggaagatcgctatggtaaaggatatcccagtcagaactatctcgcataaagatggggccctgctcctccctgtatcatcacctgtcgcccatcccatctctaagcagggccactcctcattcaggagccctccttccaagtacacgcctccttccaaacccactcgtgaacccaacatggcccaagggaaagtgccttctgattggacaaatcgtgtgtgaccttgggcggagcccactgtgattggctacaagctttcctttctcttccagtcagacaactatttcgatgagtgctattgtcccatgagacaagtacgctctctgattggtcttccatgcatgagtgacgcagaaacagcctatagacgccacgagtcggcggcgctaccgaggggctgtgggcgcgcagctggaacctccggctgtcagtgcgcttacagttcctaaccccgaccctgcgcgcagcccgcactatggcagccccgccgcagctaagggctctgctcgtagtcgtcaacgcactgctgcgcaagcgccgctaccacgctgcgttggccgtgcttaagggcttccggaacggggctgtgtgagtggggccgtcgggccgggctggggctgagggatgtcctgcctggggtcagaggcgcgagttcgaagtccgatgccgcggtgctgtttgccctggagcagtcctcgtgtgtctctaagtctcggaggtcaccatctgtgcaatgggagctggattttggcttgcgcgccttcccagctctgaactggggctcccactgcacattttctgggtcttccaacctttgcagcctggccctcttgctttgactcctcccatgccagcttctgtatcccctcatttgggttcagttcacctcacctctctgtgtgcctttgggcctcaacggccccatctgcacaatggggaactggactctggcctctagctggcaggcggatgcctcctgtctattctgtccccatgaagcttgcccatgggcttgcatcctgcttctcacttctcacctgtaggactccagcgctaagtcccgttcggctcagggggctcctgggacgtgacaatgaatgtaaaagaagctgcaactatcctggcatcttacctgcaagagaggtcttggggtcattgccctggctggtgcctagaggggagctcagtctcctttaaacctagtgcataacagccaccatttattgagggcctacagtgccagaaccggggacaaagcagagaacaaaccagagaaagtggtttgtgtcccccagaattggcatcctagtggcaacgtgggatggtgggaaggatgtggatgccttggcttgaaccctggccccacctacccgtgtgatctggaggaagtcatttagcctctctaagcctcaatatctgtaaaatgggcatggtactagtacttatactatcaggattgagtcaatatgtgtgaaatgcttagcacaggctggccacggtg

SEQ ID NO: 8947 - DNA, 6000 bp, Homo sapiens
ttgggattacaggtgtgaaccactgtgcctggcttttttttttttaattttttgtagagatgggggtcttatcatgttgctcaggctggacttgaactcctgggctcaagtaatcctcccacctcagcctcccaaagtgctgggactacaggcctgagccagttttcatttctcttttttaaatttttttttctttgagatggagtctcactctgttgcccaggctagagtacagtggcatgatctcagctcaccgcaacctccaccccccaggttgaagcgattctcccacctcagcctcccaagtagctgggattacgggtgcctgccactgcgactggctaacttttgtatttttaatagagatgggggtttcaccatcttggccaggctggtcttgaactcctgaccttgtgatccaccggcctcggccttccaaagtgctgggattacaggcgtgagccaccgcgcccagtctttaaattttttttttttttttgagacagagtcctgctctggtgcccagactggagtgcagtggcaccatctcggctcaatgcaacattagctcctgggttcaagcaattctcccgtctcagcctcccgatagctgggattgcaggtgcccgccaccattcctggctaacttttatatttttagtagaggcggggtttcaccgtgttggccaggatggtctcaaactcctgacctcaagtgatctgcccacctcggcctcccaaagtgctgggattacagacatgagccaccgtgcccagcagttttcatttcttgatggtgtcctttggaacacagaagtttttaattttgacaaagctcaatttacttatttctccttttgttgcctgtgcttttggtgttgttatctaagaaaccattgcctaattaaaggtcataaaagtttactcctatgttttcttttatgagttttataattctagcttctgtatttgggtcttgtgtttttttattgagaaccactagttgtattcatacttcatgcacactcattttgagaaccactggtttgggtcacatctgtctacaatggctaatcactgtttttcccaaagacaatcctcaccctaagataaatttttaagtcatctgttagaatgatgtaaataatataacagctaagtaacctttactgagcactgggtatgtgctaagcattttacattgtataaccttgctcaatattcactatgaggttagtgttacaattacttccactttttatgatgtaatacacttcactgtaagatgatgcaacacatatatctccttttatgtaaaaggggatacaaaaacccacatctttaagaaggaaggctgtgcagactaaataagctcatgtgtgttaagcatatggtacactacttggcacacagcaggggctcaaaggatgagtgcccctctaatttcttcatgatcccctcccccaaaggagaccctacccctttcactggtccagaaagctatcagccccagggtttatttttgcattcttttagaatcccactcccatttttttctttttcttttttctttttttttgagacagtcttgctctgtcgcccaggctggagtgcagtggtgcaatctcggctcactgcaaccgccgatcctcgggtcgaagtgactctcctgtctcagcctcccaagtagctgggattacaggtgcccgccaccttgcccagctaaattttttgtatttttagtagagacggggtttcaccatgttggccaggctggtctcgaactcctgacctcaagtgatctgcctgcctcggcctcccaaagtgctgagattacaggtgtgagccactgcgcccggccattttttttcttttttctttttttttttttttgaggcaaggtcttgctttgtcgtacaggcctgagagcagcggcgtgatcttggctcgctgcagcttcaacctcccaggctcaagtgattctcccacctcagccttcccagtagctgagactacaggcatgcgccaccatgcctgggtaattcttatgttttctgtagagacaggtttcaccatgttgcccaggctggtctcaaactcctgggctcaagcaatcctcccgccatggcctctcaaagtgctgagattacaggcgtgagccactgcgcctggcccactcccccttttctttctctcattaaggtttgtgattttttttttttttttttgagacggagtcttgctctgtcgcccaggctggagttatggtttgtgattttacttatgttattctttaactattttatctcttcaactgctttccaagttacataagggcaaaggcagatggtgccattttgtcactgcaatattccccaacacccaatagagggcttgtgggaatatagagatgtttgaaaaatgtacacctgttcacatcatttctggtttaaaattctccaatggcatatggattgcactttgaataaagcccaaattctcaagcatggccaataggtccctacctgattgccccccgtctctccatccacagcttcttctattctctccacttgagccatacttgttttctttctgatcctcaaacataccttgctctttccccactcagtccgttccttctgcttggaggctctgattaatttctcatcctttaggtctcagctcaaatatcacctctttctagagtcttccctgatcaccttgtctagtgttaccacccttattattacaccagcagttattctcagtcatacactgtttcgttttctttcttctctctctttctttttttgagacagagtctggctctgtcgcccaggctggagtgcaatggcgctatcttggctcgctgtagcctccgcctcccaggttcaagtgattctcttgcctcagcctcctgagtagctgggactgcaggcacaggccaccatgcctggctaatttttgtaattttaatagagacgaggtttcaccatgttgggcaggctggtttcaaactcctgacctcaagtgatccggctgcttcggccttccaaagtgctgggattacaggcgtgagccactgcgtccagcctgtttccttttcttcacaaatatgaaatttccttgcacatttaatattattattgctaatatttaagcacttactatacattaattaatgaagtgtgctgcttaatgcttatcaatgggctctccaaaccccaaacccctgatttgtagtgtttgctgattcctgtggtgtaaacactcgcattgggagggattttcaatctatcaacctgaggaaactgaacaccaccatttgggaagagaaagagatagtatttgctgtactgatacagcggtggtaaataatctcaaaagcacatataaaaaaaagtgtagtaaaataattagaaagtgacgtgttgaatatgtattccgttgttttcaatataagttatttaactgtaggtttatatgtcttaattttcaaaaatgcctgtgtttaaaagcgactggcaaaatttctaagccttccggccaggcacgatgacacaagcctgtaatcccagcactttgggaggccgaggcaggcaggtggatcgcctgaagtctggagttcgagaccagcctgaccaacatagagaaaccctgtctctactaaaattacaaaaaattagccgggcgtgatggcgcatgcatgtaatcccagctactcgggaggctgaggcaggagaatcgcttgaacctgggagtcggaggttgcagtgagctgagatcgcgccattgcactccaacccgggcaataagagcgaaactccgtttccaaaacaaaaaaaaaatttctaagccttcctcaactgtccctagttagcctataatcagcacatttttcagcacacaagggttaagcgacttgttgaactagctaataaatcagtctactactccaaaacgcatctgtagaacctaacatagtgcctggaaaatagttggcgtttaacaaacaactgccagaataaattttttaaaaaatacacatttaacactctttaaaaacataaaaggtaccagcctgggcaacatggcgaaaccccgtctctactaaaagtacaaaaacttagccgggtgtggtggcgcgcacctgtggtcccagctactctggagcccgggaggtccaggctgcagtgagctgagattgcgccactgcactccagcctgggcgacggcactgagaccctgtctcaaaaacaaaaaacataaacattttgggcagggtgcggtggctcacgcctgtaatcccagcattttgggaagccgaggcgggcggatcacctgaggtcaggagttcgagaccaacctggccaacatggtgaaaccccatctctactaaaaatacaaaaaaaaaaaaaaaaaaaaaatagccgcgcgtggtggtgggcgcctgtcatcccagctacccaggaggcggaagttgcagtgagccaagatcgcgccactgcactccagccggacgacagagcgagactccgtctcaaaaaaaataaaaataaaaataaaaataaacattttggcattgaaaacatacacgcaagagtgaatttaacatctgtttaaaagtctctcacaatcccaggaaggcgactacttccgcttctactttcagcagcgtttcagccccgctatagcggcgcggcttcacaaaacacctgcgatcgtagaaggtttcgccccaccttctgcatacgcagcttgaggcgcccgctttccgtcgctccggcccgcctcgccgcaaggctttctgggagccgtagtccccacgtctggcctctccggcgccagcggcagcgcgcgcccacccgcggaactacagagcgtggcgcacagcgcgcgaggctcctccgcctcgccttccctccccgcccgcgcgcccgccccagttatcatggcggctcccttggtcctggtgctggtggtggctgtgacagtgcgggcggccttgttccgctccagtctggccgagttcatttccgagcgggtggaggtggtgtccccactgagctcttggaagagaggtgaggccactggctcgagcagactgtcaggccccacctgccctcccgcggcctctgtgaatgggaggcgggggcagtgaccgccagcgcgcggttcctagagaactaactgactgtctcgtggggttcttggagagggcggggcctgagggcggggctggtgaggggagggggcgtggggaccggggcgtggggacagtgtcgtgaggtttgggccctgggggccggaccacctagtggtggggatctgagggggcgtgtcccattcagtgtcctgagccgaggagtgtggtctgtgggaagggttggaataagaggaggaggtgcttgtggagcgcggcttgcagaggagtttgggatttggggcgggatcgccaggggtgctccctgggataaaaggttatgtgtgagggggtccgggatgaggggaccaattttgcttaagcgaggagagtgtgcgtgtgctttagacgtctcttctcagtctgggacttgcagggcaatttttgttactgttccttactaagttcttcaccgaacattgttttatactaacgcctacagcgagaaagcgaagttggcctgaagtagctgcacaggctagtgagggagacaaatcgttataataattcatgaaaagtatactttatgtgtccacccagttccttccttagtattctgaccctgaataaactatcccctacctttccagttttccagaatgtgggatttgagctgactcttgaaggatgtagggttttgaaagggagattagagaaaaggagagttccaggtagcagaaagtaaataggatgaagaaacgttcaaggatgtgaaatgtccaaagcaggggagtaatggggtggaagctaggtttaggccagagtttgatgattaaaaaaaaacaaacaacttt

SEQ ID NO: 8948 - DNA, 6000 bp, Homo sapiens
tttttttgagacaaagtcttgctctgtcgcccaggctggagtgcagtggtgctatcgtggctcactgcaacctctgcctcctgggttcaagcaattctcctgtctcagcctctcgagtagctgggattacaggtgcccgccaccacacccggctaatttttgtatttttagtggagacgggggtttcaccatgttggccaggctggtctcgaactcctgacctcaagtgatccgcccgcctcggcctcccaaagtgctgggattacaggcgtgagccactgctcctggccgattttcctcatacattttaacagacatggaaccatctatcagaacttctgaactattactaatacaatcccagcccaagttaaaaaaataaataaaacaacttgacatcgtagtaactcgttcagtcttataccgcgtaatttccattaggatgtccgatatactaaaaatagatcggggactccattactaatctgaggaccccaagatgggaaccagacccgttattgccctcaacagttcacaggttaagggtctcaggaggcagtggctgagctggtgtgaaagggaagcaaagaaagttctattcgtggccctcctcccttcaaggctcccgtcgccccttagagaccctcttttcgcctcaggaactccccttctcttcccatgaaactttcactctcttggccgacctccccgtcccaatctcaaggaacctcacttcttccctcacggaatcccgcgtctcctcgcaaaaacccgcatctccaccacggaccctccaagtctgcagggaactccccagctcccatggaaccctcgtctcctcccggaatcccttttccattttcaaagaaccgcaattcttccttcacagaacctccatctcctcacccacccctcagcttcccaagggagcccccgactcccccagggagcccccactcttctcctcactgacaccccaggcccgcccgggccgggcctcaccccgcggctcctccacggagcgccggtgcagctcgcggtagcgctgcagcgaggggacgtgcgcggagcggctgacctcgggcggcggagaccaactccgcgcccggcctccggctccagcttcctcctggccccggctcccgctgccgctccggacccgctcctcaggaagccccatcacgtcaagttcctagaaccgcggccgcctttgcggtcgcggcgggtgccgggactgagaaaacaggccgaactagaggcggggcctccgtagaggggcggggcctggtgagtgggggagtggcttagtctggcgggtgggcggtgccagagggggcggggccgtgtctggttggggagggatcgaggttggcaaggacagaaatactataaggaaaagtcgagggataggggtggagctgacttgccggaaggagtgacgccgtcgagtgaaagcagaaggggcggggccgggtgtgacaagggagagggtggaaccgtggagtgccaagggaggggcggggccaggcgggacaggagaggaggtgggcccatggagtgatggggagtaacccggctggttgtgacaggagaggaggcagagccatggagtgaccagagtggggtggggtcttggagtgacagataaggggttgggttaaggcaaggatcgaaagggaaagggatggactaaggagaggagttgagtaaggtccatcgcggagccgccccgtgatctgattgcacagtcctgactatcaccagttccttccaggtgacacccttccctccaggtcccccctctctgagccacacccacattctcgtcctccggaaaaacttctcccatgaccttgagggcatgctctggcgacagcacctcctctctgctcaccctggaaccagctcagattttctccctcttatgaggacatgtcttcaatctccttgccttcacaaatctccatccagatctaaagtacaagactcaataagtgaagactaggagacaccttcaggttttttgtaataagcccacctcctaattgcacaaatggcaaacccaggaaagggaaggaactggtgcacagtcagagagcaaataacgaccaagttagggccaaagctaggttctttgactccagatttggttttacttcctcgtcaggcttgaagctaaggcttgtaaaatatcaaagtctgtgcaaataggaaaaatcattcacattctctttttttgttgttgtttttgttttgagatggagtctctcgctctgtcgcccaggctggagtgcaatggcacaatctcggctgactgcaacctctgcctcctggattcaagcaattctcctgcctcagcctcccgagtagctggaattacaggtgcacaccaccacacccagctaatttttgtatttttagtagagatgggatttcaccatgttgtccaggctggtcttgaactcctgacctcaggtgatctgcccgccttgggctcccaaagtgctaggattacaggcgtgagccaccacacctggcccacattctcttctttccttcacaatctctttactccaccaagggaaacccccaccaccaccaccacaacctgggcttaattacctctagcttctctctagcccctccaccccagaaagaagtcaggcaggaccctcctccatctctcacctgcactcaccacaaagaagtgcccacctcaccatcatttcacagactggctgtcaaggcaggaaggattcttaaatatctaactccaagagtgattctgaggcctgaagcgggcagctcccacctcctgaagcctacacaggccttgtgaccccatctagcccagcctcccttcccagctacttccctgcactttgcccagctgactgtaaaccttgcacaccctaagctgaaaaaaaatctctctatgggagaccgagagtctgcccaatcccaaggagggcgggaatctgagggcccactgaaggagtacagacctcttggggtggacatagaccccaccaaggggtcagatactttcataaaggagatattcactgcaccgaagggacacacacttcactgacagtacatggactccactaagggagcacagatgttgctgggggttctcagatctgactgaagggccctgggccctgctaataggacatgaatggctttgaagggcacttaccctagtgaggagacatggatttcccctaagagatacagaggatatagactttactaaggagacgtggaccctaccagaggactcaaactccagtgaggagctgccaactacactgtgggagtggacatcactgagaaggtgcagacctcatcaagtggggaagggtcccaccagagggattagacctcagggtagtgtaatagaccctacaaacatcactgaggagataagaactctctggggtggggaaaggcacagacaatgggtacactttttggtgatagactgttaccctccctgggcactcttaccacacagctctgagtagccctctccttcctatcctctctcccaagtcctacacccaaaccccagagctgttcccgacacactgcttccccctcctgtctatagttgctactgcagctgctgtgtatatagtagatttttcaagcacttcaggccatccctgagactggtctggggttgggaagagaaaggatgtgtgtatagaggcttcaccagcccccctctcttcctgtggacttcacaatgaaagtttggaacagagacctcgtaaaagaaggaacctccctcatccttggatatggagaagtagtacaagctgtagtgtggttggaattttggagtggagagaggatggatgagtttggagggaatgaatctaccagattaaggcaatgatgatgatgatgatgatgccatttattgagtaggtgccaagccctatactaatcgctttccattctgttacttaatcctcatgacaaccctctaaaatgggtactattattctttccatttcacagatggggaaactgatagagagactaattgtcttgcccaagattacacagtgtttgagcggtggcagaatagaacccagacatccagaatatggagacctattccccaccttgccccactcctgccctaccatcactaccaccactccttctttctcaaagtgtcctttccagaaccacatcaaaaactcttaaaatgatggtaaatattcaggttccaaggacctcatcccagcctactgaatcatgatctctggagtggaatctggggatccgctttcaaagatcctaacacacactaaagtttgagaatgcggttgaaagaggagtcagaagtgtcggggtgcgggaagggatctgaggtcagaggagggatctgttgtccaaagaggcgtctgcagtcaaagaggcctggagatgaagcatgggctggggttttcaaaagggtttgggggtgaagacagagtctgaagtcgaaaaagaggtctaaggtcggaggaggagtctaaaatcggaggaggaggatctcggaattcaaggaggggtctggggtccgaggagtttggggtcagagacaggatctggggtcgagagggatttgcggtcagtgaaagggtctggggcccgaaaaggaagcctgggatttgaggaggacactagctgtattcaggctggaaggaggaaggggtttggtccctgagctgcgtaaagtgcagagccactgaagtctcgcttgccccgcgctctcccctcgaccctgcgctgccttcctggctgtccatctacacgcacctgtgtgccagctgcaggctgatagcgctgagcagacgggggcgagtcagaccgggacacggccgagggctgggagaggcgccccctcccggctgtcgcgaagatcaggccccgccctccgccctcccactcccccgccgcagccacttccggcaggcgctgcgctgctggggggcgcgggcgaggatggcggcggagaacgaggccagccaggagagcgccctgggcgcctactcgccagtggactacatgagcatcaccagcttcccgcggctgcccgaggacgagccggcgcccgcggccccgctgaggggccgcaaggacgaggacgcctttctgggagaccccgacaccggtgaggcccgctgaccccgtccctgccctgccttgggaagtccccggtcttccttcttctgtgtcaagcatccacctccagctccatctccttaattcatccccatcttcttggatctctcccttcttctcccttgtctctgttaattatttggtgaggaagggggtgcatttctgccttggaggcgtaggatgcgacaacggagaggatgctagggactgcagtagaagggattgggcttaccttctgggaagaaccaactaacgatgaaggaatgttgaaggggagatcctaaggaaccgctgtgatcacccagaagagggctttctctagccacagaggacaggataggagaaaccaagtcagagactgcagcaagagggatccaatctgtgccttaagagaagttccccacagccagggattgtgagaagcagagggtctgggagaagcggagaatctcttcatgtctagggaggggtaaagagaatatgattcccctctgttgggtgttgggagacggaggcatggactgcatgacctctcaaaagtccttggggactagaacgccttcactctcctgtggattaccccacccctccctgagccatggatctggccggggtattagtaaggtactctgctccctaggaagcagtctccagaattttactgtgttcccctcagccctctgctggaattgtgagaagtgggggtaagagaaggaggagacagggattggaagagacctgggggcaaagagctctctgtgcattccttccctgctgctcttcctcctagccatgtggcccagcttcatc

SEQ ID NO: 8949 - DNA, 6000 bp, Homo sapiens; identical to SEQ ID NO: 1421

SEQ ID NO: 8950 - DNA, 6000 bp, Homo sapiens
tctaagttgcatttgggttatttatatttgcacatcttgacagacagcattaatgcatgttaatattcctgccatcaaaacattactcaaaccagaactactggctctgaaagcatctgcggtgtgtgcacagtcactctgctaatagaaaggttaacttgtatttttgaattattgatggtggcttgttactaatatctttttcctcagaaaggaggaaattattaatgaagagatcattgccaatgtgtctgacatctattaatggtttcatcttgcaaccagattaaaagagacagctggtccatgaatttatgtgtggaggcagctccaaatgtgctgacaactccgtgggagggcggggccgatggcagtggggcctgagcatggcgccgggggctggtacagggtcctcccctggttggcacagcctccgtggaacggctgtcaaaggttttgctgctgagggaccaggcagcagatgggctatcactctcttggcatctttccaaactcttctgttacccacaggagcccattcgcaccctcaccgtaccagtcacttgttggcatttgctctgtgttttggaacagtggtttccaacttgaacatgcatgagaatcacctggaaggctggtgaaatgagagcccaggccccacctccagcgtttctgattcagcaggcctggggtgggacccaagaacttgtatttctaacacgttcccaggtgaggctgatgctattggttcagaaaccacactttgagaatgagttttagatcaataattgtcaaattgtgctgtaagacttcctctaaagaaagggttggcaaactttctatgaagggcaagacagtaaatattttaagctttgtgggccagactatctttgtcacaatcactcacctctgctgctatatttcagagagcggccgtaggcaatatgtaaatgaatacaggggtttgtgtttcgataaaactttataaaaataggcagtggtccagatttggcccatgggtggagtttgctaacctctgctctagagcagtgctgtccagtagaactttctgcaaaaagcagacataggcagtatgtaaatgaataagcatggatgtggcacaataaaactttatttataaaaacaggcagtgggccagatgtggtagaggtttggtgacctctgttttagagcagcactaatagaattctccatgatgttggaaatgttctgtatctgcactgtctgatacagcagccactggccacctgtggctactgagtacttgaaatgcggtgtggccaagcactgaaatgctaaatttgaactttaaatgactagtggctatctgtgccacagcaagaagacaggctccaatggagcagccacccccaacacaggaagtgaaccttcccgcccttcctacatggagagtctttgcccttcttgagcttcagtgtcctcatgtgtaagatggggatcaaacaatagctacatcactagactttcctcactggactttatttgatactttaaacatagaatacactctactagatacatggtttggaaatctaattagtaaggcacgtggccccagcagatgtcttccccctggtgctctgctccccactggagggctgaccgctgggggcgaggcagggctggggagatggggaccagctctggggttgttacccctttctctttgtccagtctcctccaccagattgtaagctacatgatggcagttaccatgtctgttgtttaggctgcaaacccacagccctaagatccctgacacacatcaaaaggccagcacacttgttgaaaggatgccccaagtttcaggtttcccctaaaactgctcgacagagagatctgtagctgaaatgtctggacactcctgtcttggtccctgacacaactgaaagggaagccactgggcagatatggaaactgacacacggagaggtctcgccaaaggtttcatggggttaaggacacagtccaaagataagaggcctgctgtctgagcataactaaaagagtttgtagggcagaatgccatctcttacaaagctcaccctgcctccttccttcagcactgatgcaatgctgggcccagcccctagccaagcaaatcttggtcatgtcccagctccctgggctgatggggtcagaggggaaagagggctccctgtgcaggagggtgggagatgatgctgtaactttccattagttccctcccctgagaagccagctagctggaagctttgtgtaaggcatcttcagccctgtgccagccctctctctccacccccacacccccatctcctagcagccctgtggtaagtgtccaggttccctttggcaactcaagtcttgtagaacacatgaagaggagacaacatttccacaatgtaaaaagcaccaccacagtgacctgcgctggggaacatgccttgagcaggaagggcccgctggccaaagttccaaagggaagccctaagggctagtgtgagtttcccagggagatgatacagtgcagggcttccaggcagagggactggccggtgcaaaagcgtggcagtgctgtgggtgccagagcctggccgggcagcaggtggcagcacgtgctactgaaggagagggggcagtttctcggagtagagggaggtttagaaagcacagagggtcacggttcatgaccacggtgcacctgggcaggtaagtcctggtgcaggatcaggtcccactccaccagctcagtgactactgaattttttttttcccctcggggccacatgaaccccattcagacctgggggatttgtctgcagtgatatcacatccctaaagcaggagtgcaggggggtgccaaagggcgttgctctgaggatgctgtgagaactgctattttatagttttccagaaagcttgagagaggggatgaattggcaggagcccaagaaagtggcaacaagttacaagtgtgacaccaagctctttagtggcttagaaatctccccacccgggtcatcccctgggatctgccatgactggggtcgcttgtggtggtcttgggtcaggcctctcctcgcacacttcctaactgctcatctgcccaaggcagggttagaatgagtgagtgatggagcaaacagctggaagctcagctctgagcagaagggatctttccattccaattgtccctaagggctatagcattgtggtatccccagagaacagcacagagtaaggcacacaattaaatgcaccataaatattggtagaattattaatctccaaagcagcttgtaaaaggttcaactcccaggccacccccgacaggcctgccaaattccactctccccagcaggggtctgggaagcaggacttggagaaatcttcctggtagttctttgaccaggcaagtgtgggaggcactggctggtccaacaggctagtccaagcacgtcagcttttgaaagtggtcacggtcatggtggtggtggtgggagtcggggtccggagaggggtggaagaatttgcctgggattgtaaattgggcttccatgccagggaactgggccactttacctagtggggactgggaactggggactgacagagtgacgccctgtgttctctgccatgccaacttgggtccagagcctggggctccccacttttggaaaccctgccatgcttgattttcacaattcacttacagtctccccagtccagtccctggtaccccaacaaggatgggggtggggggctgtgctgacacagaagaaggagggctttggccaggtagcaaagtgttcacaaagtgtgaatcccttaagcatttctgggtatccctgcccctggcttttacatctcagacccccagccaagactcaggtaccagctgcctcccaggacagcagagagccaggctgtgggccgtgggctgccagggacagctccaaccctgatctatggttttaggctttcagccccaaccaggtctttgttaagaccgagaagaaaagggaaaaagctacaaggttctgtctccctagaaaaggaaagggaaggctgccagggaaaaattgtagggggtggggggatgcctcatgccccttctgcgcccccttccgcgtggtggtggggacaagagagagatgtgggtgaagaagaaggtggggtgggcggctaattgagggggacgacgattgtggcgcggtcagcgatgcgcccagaagagtgtgagtgggttgtgtgtgtgtgcgcgcgcgcgctcttagatgaaattctcatctcagggtgtgcccgagaccctggccagcagccgcctgccccagctttgggcagacgcccccacccgctttcgcaattcacctggccccttatcttgagttgcgagggctgctccctccctccctcttctcgccaccgaacccccattcacctgttccccaccccgagttcaaacggctgctgcagcttcctcctccccgcaccgcccccgtacctgcgcccccacagggcagacgatgcttggctgcgcggcgcggcgcggggcgaagaggcgaggaccctgcccggcgtgtgggtgcgggggtgatgtgtggacgcgcgtgactgtgccagcggcccgagctggtcggccccggagagggtgcgcgggggagcccgcgtgtgccagccgcgggcgtgtgccaggcgcgggcgtgcgcgtgagggtgtgtgcacggccgaggcggagcgcccgggcgggcggcggcggcggcggcggcggcaacggcggcggcgttaggactcgggggacaccgccccccgccccccgcgtcccgcccccgcccagcctcccgcctcagttcgcgccgcgcctcggcttggaacgcaggagcgccggctccgggagcccgagcggagccagccgcgcgcacagccagcggccgcgccggcgatgcggggccaccccgcgcccgccccagtcccggccccggcccccgcgggaaggggctgagctgcccgccgccgcccggatggcgagcctcgccgcgctcgccctcagcctgctcctgaggctgcagctgccgccactgcccggcgcccgggctcagagcgccgcaggtgagtgcgcccgcccggctcccctgggctccccgctccctcctggatgcgcgcgggcccccagccgcggggccctcggaggagaaagttgtgtgggctcgcgggggcgcgggtccccatggccggaacccgggtctcagcttgcaggcgcgggaagcagtgtccccgcgcgccccggccagcgagcccggcccctcgcgtccctcggcagcccgcgtttggcgaagttccccgcttcagtttcctgccggccccccgggctggagtaactttccgcggttgttgcgaatatttccacttgctgcctcccacttgtcggaatctgccacttgagtgtttggggcggcgagacgaggagcggcaccgacgcccggggtggagcgttctctcccgggcagctcctcgggcagcgcgcgcttttagtggggaggacaggtccccagcaggccgaggctgccggggcggcggcttttcttttttcctcggagatacaggaagctctccatttgctctgaacacgctgctcccctaagcaggccgctgtaggcacccgaggggatgtttgcgttgatgaccgagagcaatacctccgccctacccgctggcttttctccgaggtagctgggcgcccgtgttaaggcccttggaggggagtggatttgacccgtgagcgcgtccgctcctgaaaagttcggggaactcatatttgggtttggccacgggaaggcggtgagcagaggtagttccccagagtagggggagcgggggcgggggggtggtgcctgccgtgctcctaaaggcacgttggcgggtgctggagggcaccacagtccagggtcttacacatcaccaagccccaccgcaggcagc

SEQ ID NO: 8951 - DNA, 6000 bp, Homo sapiens
cacgtgccgtggtggtttgctgcacctgtcagcccatcacctaggtattaagcctgttaagccccatatgcattagcgatttatcctggtgctctctctcttcctgttcccccaccctacccacaggccccattgttcccctgtctgtgtccatgtgtttccattgttccgctcccacttataagtgagaacgtgtttggttttctgttcctgtgttagtttgctgagaataatggcttccagctccatccgtgcccctgcaaaggacatgatctcattcctttttatggctgcgtagtattccatggtatatatgtaccacattttctttacccagtctatcattgatggacatttgggttgattcactgatcattagagaaatgcaaatcaaaaccagaatgagaaaccacctcataccggtcaaaatggcaattattaaaaagtcaagaaacaaaagatgctggtaaggctgtggagaaatagggatgcttttatacttttggtgggaatgtaagttacttcaacccttgtggaagatattatggcgattcctcaaagacctagaaccagaaataccatttgacccagcagtcgcattactgatttatattcctttgggaatgggtttggtggcttgggcacttggcagtgcccaaggaatatatatttatattcctttgggaatataaatcattctattataaagatacatgcacacctatgttcactgcagcactatccactgttttttggaaagaagaaaatccttgctttaaacaactcatagtttgggggaggagacagcatgtgggaagggcactagctcagccaggacacctgcctggaaaggcttcctggacggtgaggctcgctctgctgagccttccatggctaagaagaactccagtggatttctgggtgcagtccttctccttgttccggatttccagttctctccctttgaggttcccagagaagcagtcaagcttgagaagttgagcaggaaatagagggagaaagtgaccagggaacagaactagggagtgggaagagatctgagatgaagagagggaataggctagctaccgttaaaaccagtttataattatttcaagtttattttattttttatttttatttatttatttttgagatggagtctcactctcgcccaggctggagtgcagtggcacaatctcggctcactgcaacctctgcctcctgggttcaagtgattctcctgcctcagcgcccccagtagctgggattacaggcaggtgccaccacacccgtctaatttttgtatttttagtagagacagggtttcgccatgttggccaggctggtctcgaacccctgacctcagatagtccgcctaccttggcctctcaaagtgctaggattacaggcgtgagccaccgtgcccggcctatttatttttaaattattatttatttatttatttatttatttttttgagagaggatcttgctccatcactcaggctggagtgcagtggtgtgatcatggctccctgcagcctcgatctcccagccttaagcgatcctcctgcctcagccttctgagtagctgggaccacaggcatgcaccaccatgcccggctaatatttcaagtttagtaaattccactggatttgaagaacttggtttttctgaggaaagtccgttgtaatgcacataacgccacaagaggtctccctttccctgaaatgcactggtttaaaaggcgggacaaatggtagcttgtcagaaagctctgggcaggtaaggccagtaccaaatttggcaaagaatcttacttaaacttttacaaagtcaaagtatccctttaccagtaacttcgttttgcagtttaaaacatgagaataaggagtgcttcgatgtcaagatatttaatatttaggaggggttctctcttccctctttgaggactattttattaagcctgaaaagtaatttagtatgtaagagtaactctcataagagctaacactgattatatgtgtaatgtgttctgagcctttttacagtattaactgtgtaatcctcacccagttagataaggtagatactgttattcttgataccaataatcctctgaggtagggacttttacagatgaataatttgcagtttagagaaattaacaattggtccaaggtcacacagcttgtgaggggcaggactgggatttgaagacatatctaactccaaaactactggattcatgaataaatggattcatgaatttttatgttattaaacagtatcttaatttgaaattttaccttggttttgttgttgttgttgttttctatctatttatttattttttgaaacagggttgccaggctggagtgcagtggcacaaatatggctcattgcagcctccaactccttgactcagcgatcctccttgcctcaacttcccatgtagctgggaccacagatgtgtatcaccacacctggctaattaaaaaaaaaaatttttaattgtagaggcggggtctcactgtgttgtccaggctggtctcaaacacctgggctcaagcaatcctccagccttggcctcccaaagtgctgggattacaggtgtgagccactataacaagcacttacagtgtttttaaccagagatgaaaatcagattcatctgaggagcttttaaaagaattcgactgcccaagtcttctcccaggacaatctaattctgtaggtctcgggtggggctctcggatctctttatgtttttaagtctgtaagtgattcttatgtgtagtaaccctgggtagacagctaccctagggagctgctatggatgaacagtggttaaattcccataggtagaacaccctgctaagatgtagcaatggctgcctggcataaacatatgattacggtattgaatctgcagctcaaactcccctagcttccagtttgagatgctcttcccttgacagcagagctagaaagaagtttgtgattctccaaagacctagtgagaagtggcgaaagcagaactccctgggagtagccctgagatgttcttagaagtgaattgtgcaagcaggctgtcagtcagcctggccagggctcacacctaaccacccagaggaaacagtttttatccactacgtgctccctgtcagcttggcaaacagacggtgacagtgagcccaagaggctgggtgcctctacctggtggtgaaacgcagatatagaaggggctcttgaaggtcagcggctgtgaccaaggatggaaccaagtcctaagaacaggtaacccactggaaggaaagcagggaacactttttacccactccccaaacaggaacaagacttccgcagtgacttcacgtggcctaagttatcatggggtttggaaatatgtcagataagttcaaagtcagataattgtctaatgttctctagtaccttctgtgcttagttctctctttctcttctgtccccatcttcacacacacactcacacacacacactcacacatggaaacacacacactcttaccacacacacatacaaacacacacactcttaccacacacactcacacaaacacacacttaccacacacacacaaacacacacactcttaccacacacactcacatacactcacacacactctctcacactctcacagacacacgttcacacacacgcacagacacacacacacacagatcttcctagtcttggtggctcttacctttcccagaattcctctatactcccattaaccttgggcttagctgggatttacaatcattagctctggccacagcttcttgccatggagatttatttgttctttttactggagtttggtgggaacctgagtggctgggaatccacccaggcccttctctcctggccctgccccaagagctttctgaagtctggcctcacaggctcctaggacactagagcaaaagacagctcagaaagggaaattttaaaaaatcatgacccttgagaatttctgagaggacctcattacaacacaaccctgtgttgacaggaaggggactcctttgaccttcagggtctgctgggtctgcggcagggggcagggagggcgccgaggcatcaaggggtggggagaggaagctagcgggacgcccagtctgtgtctcaggcagagaggagggcaggctcctctcccttctctttgcccttcaggagaaagagaaagggaatagatggttgcttcttgcaccaagttctccccggcttccaggggtggagggagctcagggtggtgagtgagcactggactgagattctgtgtatcttccagaccctgtttccacagcctcccctctctttctgacttccctcctctgctttcggaagcacatgtgaaactgtctccattcctttctctttaggtcactggattccttgatggggctggcagtggtgctgtaaccccaggtccccttagggcatgtgagtggtgatggggctgagatctgccaacctcctcgctctgggggattttcagtgttccaggactgggtgttctgctggtctccctctcccctcccttccccgattccccggtgccctccctgcgcgcagacccaggggactctgagaatggaagggagctctcattcccgggaggaaaagacaccaggttccctgggctgcctgcactcagttctcagcctccttcctcatgcctccagccactgcccgggtctgcggcacgggcgcgatttgaaatacccctccttcccgctttgaagaaggctgggctggctgggggttattttgggagcagcttctgagatccaatggccttgttagggcaacactgacctttccgtcccagaaggagggcaggattggagaagggggcggggcagcggcggggagaccgacagccccgcacacccactggggtggagaagggggccagcgggctgcgggaattcagcctccggcgggggctgccaccgaggggaatttcccctctttgaaaaggctggggacccctccaccccaccctttcactgggcttcttaaagagatcacaccgttttcccttggacttcttggaaggcagacttgggacgctttgtggggactttgaacctttccttcctgctttctttccagcaggcagccttgctctggctggtggagtcggggctcccgggcatggcactgactagccgacccggtgctgacttggcgccggggctctttcagcctctgctggcatcctgcttcccccctcctggggtgcagtggtgagtctgggggcctgcccccgagggcactggaggagtgttgcaggcatcacccacgccctctgcacccacgctggaggacggggaggttgtcaggggctatgatgagatgagtgggggccgcttcgactttgatgatggaggggcgtactgcgggggctgggaggggggaaaggcccatgggcatggactgtgcacaggccccaagggccagggcgaatactctggctcctggaactttggctttgaggtggcaggtgtctacacctggcccagcggaaacacctttgagggatactggagccagggcaaacggcatgggctgggcatagagaccaaggggcgctggctctacaagggcgagtggacacatggcttcaagggacgctacggaatccggcagagctcaagcagcggtgccaagtatgagggcacctggaacaatggcctgcaagacggctatggcaccgagacctatgctgatggaggtgaggccagctgggggcccgcagaggtggggtggagccagggagggtgagaaaccctggtggagggtgggaaaggcgaccggcaattggcacagaatcagatgggctaggaagtgatttgctgtgtggttttgggcaagctgctctacctttctgagcttccattttcttgtagtaaagatggagctaataaaggggttattga

SEQ ID NO: 8952 - DNA, 6000 bp, Homo sapiens
tgttgtcaccatcaacaaggctggaagtgaactgccccctgaatacttgtccagcctcatctctcaccattttccctctcagctgtcaccattggagggtgtccaggttcttggcatcttgaacaaagaattggacacaacacacaaagcaagaaggaatgaaggaatttattgaaaatgaaagtatgggctgggcgcggtggttcacgcctgtaatcccagcactttgggaggccgaggcgcgcggatcacgaggtcaggagttcgagaccagcctggccaacatggtgaaaccccgtctccactaaaaatacaaaaagtggctgggcatggtggtgcacacctgtaatcctagctactcaggaggctgaggcaggagaattgcttgaacctgggaggtggaggttgcagtgagccgagtttgagccagtgtactccagcccgggccacagagcaagactccatctcaccaattcactccgcagtgtgggagggggcccaagcataggagctcaagggcccctgttacagaatttttgggagtttaaataccctctacttgggacacgccctatgtaaatgaaaaggatgaagtaaagttacaaagtcatttacttggcctacaccctatggagaggatatttcctgtcatagctgaagtgtgaatcagccttttgttccccgactccagactctgttttcctgccttaaagcatgctttcatctcagggcattttctcctgctcttcctccaggtatctttatggcttgcttcctcggttccctcatgtctgtgctccagtgtcaagccctctaaaagacctgcccagactactcttgaaaatagtagggccgggcgcagtggctcgttcctgtaatcccagcactttgggaggcctaggtgcgcggatcacttgaggtcaggtgttcaagaccagcctggctaacatggcgaaaccctgtctctactaaaaatacaaaaattggccaggcatggtggtatgtgcctgtaattccagctactggggaggctgaagcatgagtattgcttcaacccaagaggctgaggttgcagcgaggtgagatcatgccactgcactccagcctgggtgacagagtgagaccctgtctcaaaaaaaaaaaaataaataaataaaagaaaagaaaataatggacccccaccaactctgtattctcctttctcttttttcacagctcttgtcagtgtctgagtgttatattatatacgtgtgtgtttgctgcttgtcttttttccctacagcataaggtcttttaagggtgggcactttgttttgttctctactattttcttatcactggcaacagtgcctgacacatagtaatagcatggtaaatatttatcgaatgaactaataagttaagtgaaaaaaaagcggcgggtggatcacctgaggtcaggagttcaagacgagcctggccaacatggtgaaaccctgtctctactataaatacaaaaaaaaattagccaggcatggtggtgggcacctgtaatcctagctactcaggaggctgaggcaggagaatcgcttgaactcaggaggcggacgttgcagtgagccaagattgtgccactgcactccagcctgggcgacagagcgagactctgtctcaaaaaaaaaaaaaaaaaaaaaagtgccataatgctggcatatgcatattcctgtaggaactctgaaaggagatctgggagatgggggtgggggaagggtgggaaggacacttcattttcaccgtgtgctcctttatgcagtatgttataaccaagtacatgtgttatcttttcaacaacatatggggggaaataacctaggtttttttactcgcgtccgtgtgaagagaccaccaaacaggctttgtgtgagcaacagggctgtttatttcacctgggtgcaggcgggctgagtccgaaaagagagtcagcgaagggagataggggtggggccgttttataggatttgggtaggtaaaggaaagttacagtcaaagagggttgttctctgatggtcaggggcgggggtcacaaggtgctcagtgggggagcttttgagccaggatgagccaggagaaggaatttcacaaggtaatgtcatcagttaaggcaggaacagggcattttcacttctttcgtggtggaatgtcatcagttaaggcaggaacaggccatctggatgtgtatgtgaaggtcacggggttatgatggcttagcttgggctcagaggcctgacaggtttgacaatggatgtgtaaagatgggaggagctgccttgggtggcagtgagccccctaccctagaagagatgttgctaaggggtttctgcctgaggcgggaaattggagtagatgatcacaaagatctgctgtcctcgctttggccaagtagaagtgacacactcaaccagttagggccagaaacactaagagatggggggatcctacatgtgggaggacaaatgcttacaggtaagaaaatgaaaaactgttcagctgacagctagacctaatgtttctaactgaacaaaaacagtgatcacagaatataaacaaagatcagacaagaccaccatgtagttggatcaagatacagacaaagccactctggtaccgcagataggactcaacatcttccaattctgactaataaatgagtggattttgcttctttttttgtaaccgagcgaattatagagaaacgccacactctgagacgaattcaggagtcctttattagccggcaactgagagatggctagtgcttaaaattctctcggccccgaagaaggggctagattttcttttatactttggtttagaaaggggagggggagcctagctgaggcaatcttacagaagtaaaacaggcaaaaaagttaaaaagacaaatggttacaggaaaacaaatagttccaggtgcaggggctttaaatccatcacaaggtgatagatgtgggggctttgggtaccatcaaccggacaaaaatgcaggggcttagggtactatcaaccgggtgaattcctggaaactgcagctatcgcttgccacagtatcttatcagttaattgcattctttgatgtgctgggagtcagcttgcacaagttaaatccttgaggaagtgggatgggtaaggagcggcaagtgaaggagccaaaatggagtttgtctgtctccctcagctaagagagagtcaattcaggttaagacaaggtagggtatcacacttttccaaggactaatctagccttgttttaatccttcttccttctggataaaaatttgtaagatacctaatcactgaattgcctctactccttgactgtgtccaatccaaaactgttctcctcctccttaaactctccttagatttagttacccagcataaacccaaatcctaaaataagttctccccagtcacctcttaccaagacaccttatattttctctgatatgtgttctccctttctgaacaagctaaataaacctaattctttttgactacaggtatgtttctggtagaattcgatctgtaaaatttatcacagtcagctctcttaagtccagaccagcaatactcagacaggaagaagcaagaatgttaaggactacctggaaagttcagtggtcctgaagcaacttgacttgagctggtatttgtgtatgtgtggtgaggagagggatctgggaaaagagaggtaggaattattaaatgtgagtagttctctttcttctttcatcagcccttttcatggccttgggcaaactttgagcctcattccatttctgtaaaagatgaatttggaatacattttcaaggaatccaggaaataacatccccaaatatgccacactggtatgatgattgcttggggaacagcacatggagagaggggcttttcatgaatttcccttatcagactaaaggctgacaatccagaaggaattcaattatgaatccccttccagagagttttatctatcagggaagattaacacaccacaggagaagatattgaagtgtgacaccttgttgtccggacatcatcattgtttgccacattccacctaaactattatatgtgtaagtaaaaaatgttttcattttcttctttaagtgaactctcaaatttgacatgtattttgaaaggaatatttacatcactgcttaaatgggaaatcagcattgctcggaagaaatgaaaaggttattgctaacacacacctcaaaacaaaacaatattttaaaactgcaggcatggttgcctgtttgagagatctggaaaatgaaggctttactctgttagaaagggagataaatactagaaaaatgttaaataccatactggcctcaaacaactagcctgttggtttgaaatgggacgttctcactctgctgtttaatatcgcttaatgtccttcatgcacccttagagccattcatttttcccaaatggggtgcatcccacattttaggatacgatttccatcgtttctaggttaatttggactcatcctttagttcgcagattaaaaaataaatccttcagagaagccttccaagactactgcccagctaaattactttccccttacaataggaggcactaaatacacctttattgaaagcctattcccccatactacttcatcgtattcattacattggggcacggtgcatttatgttgtcagatctcctattaactagagaataaattctgagcgtactgtgcctctctgtacacttctgtaacttccagatctttgcacaatgaatacaaatgatgtaaggaatgacaccttcacagttcctgcaaccccaggatggtttagccccaccttccccctcagccaatgacaggcgcccccctctgccgctccggtcgcggacggtgggcggggccacgccgtgacgcatccgtgcgtctgtggaaggctgcgtttccggcctgagaaaccgtcatgtttctggggagtcacctcagctggcagttaccaccgtgttagaaagcagcctcaggaccggccacctccatcactggcgtcaccatgggggctgtgctgggtgtcttctccctcgccagctgggtgagttcggggtcccgagtcctcgccggacctgcggtttgcggggaaaggcctcgagaccagagctgcacgggccttggctccagaggctctcgggatgtcagcaggccctgggctacagagggtctccggggccccagacgcaaatccgcgataccctcaggtccagcttaggcggctcgccctccgggttcctcggggaacggaagaggctaggccgccattgtttacaattcggatggctccgccctgcgaggcttcctgactaggttcctctggagctggagagggaccaaggaatgacagctcccagcgaggggctccggttcctcccgaagcacctcttaaggtgccatcatttagttctaggtggctcaagtaatatttttatcccctagcacgggatttgccaaaactacagagtgtgtggcaaagctggggttttagcggaggcttgtctgcagttcaggtgcaagggaaagaagcccttgtggattgttattcaaaattggaaaccagggcctgaatattttgggactgctgtaagtcatttatccgaggataatcaccccagcattcctctcttcgagaacgattgtgacagtgaagtgaaggtttaatcaccttgtaaactgtaaacattttaaagagaaaattatagggcctataaaagaatatgctgagttccctcatttacccacttcagaggagcgtgattccttgattcctcattctccagctgatttaattgaccaagtgtgtagaaaaagcacactcagtttctcctgctgtactcacaacacacttttgacacctgatgtgtggtgtgtggggattttcccccaaacatcaggcaaacagtcagctctgcaggggatg

SEQ ID NO: 8953 - DNA, 6000 bp, Homo sapiens
gacataggaggaaaacatttgctgagaagctactgtgtgccagacacaatcttggactttcacttaatcctcaaaacagccctaggaagaagtacctaccgttaacagataagaaagctgagacccacggtttacacagctaaggagagcaaaggttttaacccaggactgtcctgactccacaacatcaaagttgttgttttgtttttggtgttttgtagaaacaggatctccctattattacccaggctggtctcaaactcctgggctgcagcagtcctcccacctcggcctcccagagtgctgggattacaggcaagagccaccacacctggctgatgaataggaattgggtaaacatttttgaaaattaaataccaaattaccattacacaatgccaaacagacctcctttgtccccttcccaggatttttccagaagatggactcacattatgatggccccctttttccgcagagtgttcccaatgaaaatttctgaaatgatgggaatgttctaaatatgtgctgtccgaaatagtaaccattagccacatatggctattgagcactttaaatgtggctagcataactgaaaggccacatttttatttaaatttaaatttaaatagcaaaccgtggctaatcataataatagcttaagagagaaatggtgagcagggttactgggagaggtattttcctataagctctggatatacagttgacctgggaacaacaagggtttgagctgcatgggtccaccaatacaacccttgttttgttttgttttgttttcaataaatacagtcagccctctctatcagagggttccacatccacaatgaaacatggttggaaaatacagtatgggatgtgaaacctgtgtatagggtgggctgacttttcgtttccataggttctgcagggtcaactatagtacatgagtatactcacattttagtatcctaatagatcctcaaaccaacacctggcagaaaatggggaacaattgcataacagtattcaagggactgggtatgatggcttgcacctgtaatcccagcacttttggaggccaaggcagaacaggagttcgagaccagcctgggcaatatggtgaaaccccttttctacaaaaaacttagccaagcatggcatatttgtgtaatgccatttgcatgacccacatggtcaccctggaccccgtggatcaggccctgcctggtgccaccaccgccacttctgtgccaggcccccagtgtgatgcaagttgcatgatgctctttgctgtagtgccttttaatggcatagctttggcaggtttggagatgttcagaataggcaaatcctgtggtggatttgtggttgtctaaggccctggtggaagggagcataggtgaattggaggggatgattaaaaggtgtgagatttcattttggggtgatgaaaatgttctaaaattggttgtagtaatggttatacaactctgaatatactaaaaggcattgaattgtacactttcaatatgtgagttatatctcaataaagctattttacaaaaaaagacacctcttcccagaagacttctctgttcccttgtccctcccctgaccctctcatctgtccctccttcaaattatttcagtactgtttttatcagtcctggcatttataggaagcactgcaggaagggatttccaggtattgactgctgtgtaagaaaccaccccaaagtttataggcatagaacaacagtctttttttcttctcagaaatctacaatttgagcatggctcagcaggaaggctcatctctgtttatggtgtcaatcaggatcaatcagccctgtccaaaaggcatttcacacagctgacaggttggtgctagctgttggctggaagctcacttgggtctgaaggctaggggcgtctccatttttcttgagcttcctcacaaaataaagcctgggttctaaagcatgttcccgagggagagccaagtgggatgctgcagtgccttttagtggaagatacttaatgtcattaccactgtggaggggggccacaaaggcccacccagtttcaaggagaagggatgcagactccacctcctcatagggcagtggcaagggtctggaagagcttggggaaccagaaatattattggggccatttttggaaaataaaatttgccacagctacacttatccgataaaccactcaggaaatattcagctgcaagcaagtgaaaacatctaaatgttggcttaaagcaccatggcatttactgtttgttttgagacagagtctcgccgtattgcccaggatggaccacagcagcccagtgatctgggctcactggattcaagcaattctcctgcctcagcctcctgagtagctgggattacaggcgcatgccaccacgcccagctactgtttgtatttttagtagagatggggtttcaccatgttggccaggttggtctcaaactcctgacttcaagtgatccgtccacctcggcctcccaaagagctgggattacagctgtgagccaccacaccttgcctttattgtttattaataagctaataagtcagcagttgattcaatgactcagcaatatctatttcattttttcccctcccatcctactcagcatgttggcttttcatacttgtgtttattgcctcatggttgcaaaatgactgccacacctccaggtatcatatccttaacccagcactacccaaagcagaaaaagagcaagaatggctacttgacccagtacctctctgttatggggagggaaacctttcccataaacactcagcagactcttttttttttttttttttttttttgagacggagtgttgctctgtcgcccaggctggagtgcagcagtgcaatctcagctcactgcaacctccacctcccgggttcaagctattctcctgcctcagcctcctgagtagctgggactacaggtgcgtgccaccaccccagctaattttttgtattattagtagagatggggtttcactgtgttagccaggatggtctcgatttcctgccttgtgatccacccgcctcggcctcccaaagtgctaggactacagatgtgagccactgcgaccagcctcagactcccttttatctcattgcccagatcagcatcacatgtgcatcccttgatgaatcactggcaagagaaaatgacatttttctaattggcttagagcaatcctgattcacttccccaggctgggagagtctcaggcaaaattcaggctcctggaagcaaagatggaagtcactgagtagccagccagcagcatgggcctcatctggttttcccaccacagtcagtgttcatccttggtcggggcagagggcaaggggaagcatttcagatggaacagccatccagccctcagaaagcttatagtctggtggagttaagtgtatgcagatcattataactgaattcctgaaggtagagactagatctttatcaatcaatgacttttattggatgccagaccctattagggtcttggataaacaaagataaaaaggacccacttcctgccattaaagacctcgcagtgtttaaggaaaactacaaactggcaatcaaagggtgactaatgcaaagttagggataaagctagagaccaatagggagcaaagggagcatagtggggggtggggagggggctggaagcaggaaaggctttcagagaagatgatgtttgaatggaatgttataagttaattcaggattaggcaggagaaaaagtatttagaaaaaaaaatccaggagaaggagataacaagcaaaggctaggaagcaagaatttagtgtgtgtagatagcaatgcgtgggacatagagtcgtcagatgaggctggagataaattgaagtcacactctgtgaaagatcttcatccattctgaaagctgatcatacgaattgggtcattcttgtcatatccaactaagacagaattgaaaagccaggggaacaaatactcagggcatataacattgctccaaaaaagtaattttttgcaagcctggctgctaaaactgcctgctgtaacctaaaaccagttttatctaatagctactgaaacagcctgctacaattctgagttttatccaccactatcacttaccaatcaaagcttgccagctccccaagaagctgataaacccccactttactagtgcctgtaaacttccttgaagagcaatatgtaacatttctgttttataaaaatctccaaaccttctctttgttcttctgacataccaaagacaacctggtctgtgtgtaagccctgaattgcaattcttgattgccaaataaaatatttaaactttagagattcatctctatatgttgactttgacaccatcaatccacctgtgcattaatttattaaataaatatctatagagcactaggtaccaggtactttctagccttggaacctttgcacttaccatccctctggctggaacagcattccctaaatcttgtctggtctcagctcaactattaccccctgagaaaggccttccttcatccccttatttaaaatagcccacacgtggtcactttccattgcattatcctgttttgttttccttacagcactaatcacatgaaatgagagtcttcgtttgcttatcagttaattgcctgtggggaccccactaggacataatctccctgatagcggggccagcctccttccctgcgtcatccacggcgttctagcaactcagggagcccagagcatgctgccgccccgcgtgcaagggagcctaagttccaaaccgagcacgcgcagagggcgggacgctccgggcctccaggtctcgcaggccccgccccctcgccgcgggttcgctgttgggcggagatattcgccgccggcgcttgcgcccggaaggtgtgccgcaccacacgggggaggaaggaaggagctcccaactcgccggcctggccacgggatggcccccaaattcccagactctgtggaggagctccgcgccgccggcaatgagagtttccgcaacggccagtacgccgaggcctccgcgctctacggccgcgcgctgcgggtgctgcaggcgcaaggtacgaccccggcccccatctcacctccgggcctgctcctccaactcccgcaaccaccgcccgggcctcgcgcggcggccagcagtcctgcccggccctcccacccttccagccccttccgactccggcatcctaccagaaacttcctcggccctttctttccacctgcttgttaactgccctgttggcccccatcctaagttatttaggcctcgttctgagccctgagaagaaagctaaaccctcctcccccgcagcaattcatttttcagttagtatttgttgagtagctgttatataccgcctgtgtaacaagacacaaaaagtcccttctctcaaggacagcgcattcttgtgggggcggtggggaggacgtgagtcttaagcgagtcagtaagtaaacgagacctgtgggataatcagggttaggaagaagacaaatagggtgatgtgatagagttgactggagtgggagatcaagggcaacatctgtaaagaagtgatatttgaggtgatgtctaaatgatgagaagccaagcgcacaaggttttcggtcctgaagtgaactgcaatgagaaaggccccccctccaagacgatataaacatggtgtgtttcaggggtcaaagcatagtgagccagggcagggaataggaagacatgaggtcagttaggaaggcagacccttatttattgtggaggtgttgtaaactctgctaaggagttcggatttcatgccaaactggaagcttggcatgaaagctgctggatgggaagctactggagagtttgaaacagaagaatagcatattcttaccagttctcccagcgtccagctttcgtcag

SEQ ID NO: 8954 - DNA, 6000 bp, Homo sapiens
gagcacttaatataggctttaggctgtgcttcgcagaactcatgcactagtggatgagacaaagccctagctagagagttgcatgacatataccagactagagaggtctgggaggctatgggaggccaggagagacctaactcagcctagaaaccaggcaagtcttcctgaagatgatatctaggtcaagaccttgagttttagcaggagctagccaagtagaacacttgtaattatccattctccccttcttccttaccaatagcagtgtccctggttagaaatatttgccccaccccacccccaggctcttggagtgccagtgacattccatattttgtcctgggtggtagttacaatggatacatacatttatttacaaaaaaatcattcagctgttgtgcactttaccataggaacagtatatttcaattttaaaggtaaattaaaattttaaaaatatgtttcctctccaggctcccttgcaccaaacaatgatcacgtgacccaagactggccaatcagaagtaagaaaaatctactaggcggggctacatggcaagctatagttttcctaactaaggagatagacttggccttttgtctgtcatccatttaccctgtgtccttcctggaacatggctgctgccactagaacagccatctggtgtccttgaggattgtcttagttgggttcccccagaataaatcttgagatgaagaatcatatgacagtgatgctttggaaatgtttccaggaaaaatggctataggagtacagaagttcaccaggaagagaagaagccagtgaggatgtgaaatccagtgaagtcccacagggcagttctagaaacaagaaatgtttctatagatggagcacatacattctcaggtacttcaggttctccctgtgcggagccatagcaggctctggcagcctcaggaaagccccagataccagctgtcaggaggaaaaacataccaggagcctgtgtgcacaaaagcggtaaaggatcccagaggagctgtgggcacgaatgagtcacataagaatggtggaggaggaagtgacaaggagcctgggtcttcagggctattcatgagcagctgtacctaccctggcctgccaaaaaaaaaaaaagtaaactcttctctagtgaagtcactgtaattccgtttctgttcccgcagctaagttaaattctaactgatatgcagggtaaagaaagggcaggaggagttgttcatggagagggaacagcatgtgctggtcctcatctcaatcctgaaaggtaggtgttgttcccattttacagatgaggaagataaagatccaagagaagtgcttggcccaaggtcacacaccagtttagtggcaaaggcaggattcgaacccagtgtattcattatctattgctgtgtaacaaggtttcacaaatgcagcagcttaaagcaacacacatgtattatctcacagtttctatgggtcaagaacacgggcacagtttaactgggtcttctgcttcagtttctctgcttcacgagactgcactcgaggggtcggccatggtgggagtctcatctgagcctcaattagagaaggatccactttcaaattcacagggttgttggcggaatgtcagttccttgaggactaatgaagtgaataccgcagctcctggctggttgttggctggaagtcctcctcattttcttacctttcccgcctggcaacttgtttcatcaaagccagctggaagtcacaaccttaagtaacctaatcagagaagtgacatcccatcacttttgccatattctgttcattagaagcagctcagtaaggcctgtccacacacaaggggaggggattgcacaagggcatgaacaccaggaggccgacatcactgggagacatcttagaagatgcccgtcacatccaggtctacttaattccaaaattttctgtattttctgcaaaatcaagcttactctgaaggtaaaaccccatggattccaatgactaaacctggtcagggactgagggagaatttgggggacagaccatccatggtacatgaaggacagggatgccccgtccttcccacccataaggcccaccttcccactcttgtggctcacagattccaccaaaacttcatttacctctcactgtgtaatctggggatgaaaccagatcctggtttcattctcttctgcctttgggaaataggtctgtcttttctctcaattttggaaaccgtctctgcagctccagggaaaactcctgagtcctgaggggtagcaaaggctgcagacaaactcttaggccaggaaacagaagacctgcttctcggcaaatctgcctcagtttccctgttggtcaaatgagggaattgggcaagatgctcactaagcagcttcctgctctaacttcttctttcgagggaaaaactaaagtggcacagcctagggctgtgctgtctaatatggcagccacgagccatgtgtggctaccgagcacataaaatgtgactagtccaaactgagatatgctatagataaatctcaaaaaatctctctcaaaaaataaaaaataaaataaattagtacactagatttatatatgggaggcagaattcagatgacccctcctcaatgatcctcatccctgtataatctcctcctctttaagtgtaggtggaacccgtgaatgtatattatatggcagaagggagagtgccctgggtgggcctggactaatcaggtgagagttttaaagccagagatttttctctggctggttacaggagaggaattcagcactctgatgtccctgaaagaaagcaagcattcatgctatgaactgcctatggggcagcttctagaatctgagattgatccctcggagacagctaacaggaaaagagagacctcagtcctataaccacaaggaaatgaattctgccaacaatctgtgagcttggaagaaaactctgaagctcacatgagaacctcaaccctggccaacaccttggcttcaacctggtgagaccctgagggtccagccaggccatgcccagacttctgacctacagaaaccatgagatcataaatttgtattgttttaagctactaaattgtggtaatttgttatgtagcaataagaaaaattagtactggattttagagacttagtacaaaaaaaagaaaatgtaaaatatctcaataatttctttactgattccaatgttgaaatcataatattttagatttaataaaatatatcactaaaaatacagttgatcctgaaacaacacgagtttgaactgctagtgtccacttacatgcagatttttttccaataaatacattggaaaatttttggagatttgtgacaatttgaaaaaacttacagatgaaccatgtagactagaaatatcaaaagccttaagaataagttagatatgtcgtgaatgcctaagatatatgtagatactatttatgtgtcaatcgactgtttatattattggtaaggtttctggcgaacagtaagttattactagttaagtttcaggggagtcaaaagttatattctaattttctaggcatggaggagtggtttccctaacccccactgtttaaggggtaactgtaatttcgcctgttttttacttctttaaaatgttgcaatcagaaatgtaaaaggacatatgtgggccggacgcggtggctcatgcctgtaatctcagcattttgtgaggccaaggcaggtggatcatttgaggccaggagttcaagaccagcctggccaacatggtgaaaccccttctgtactaaaaatacaaaaattagctgggcatggtggtgcatgcctgtaatcccagctactcaggaggctgaggcaggagaatcgcttgaacccaggaggcggaggttgcagtgagccaagattgtgccactgcactccagcctgcaacagagtgagtgagactctatctcaaaaaatcaaaaataaaataaaataaaattatatatgtggctcacattataggtgttggactgtgctggcctagaggactcagaagtcagccatgggacctccggcaagtcaccacacctctcaaagcagttcttatctgtgagataggaataatagtagcacttaccccacagataaatttgcagtttgagtgagattgaggtctgtgcttgacccaaggtaagtactcaataaacgttggtaattatcattattattaataacaatatgtgcaaaggctcatatccaggccctagtctccaggagcctctccccaaccaggcacacagcagccacacaacaggtacatgtgtggggatttcacaacctctacaaagctctttggcacatgttctctgccctcacaacccacttggcaggtgggaatcaggaacccgtgggcaggtaaggacactgcgcctcaggggtaaaatgatcgtttcaagcttcacaactcacctaggaagaacctggggctccaagggagatgaggccaccttctacagctccctaactcagatgcccacggtctgagaaaatgactggagctcacccctaaaatgggcgacataagatcctggccctgtcaagtgtgtgtgccaggaataactgagatcaatcacttgcagcagctgaagtaccctggcacatactaaacactcaattaagtaaatcatgattactgttgttcctttgccagagaagcttctgctgaaatccctctctacggggaatcctcacgccctaaatgacccctccttcccggcccgtaactccggaggatgcccctgcaggtaggcccagtctccagacaccaccaccccccagccgagtcaggaatagaaaccgccgcctccggccgccagcggcctcactccctcctccggcagcgatcgatgcggccttcagccgcgggggactaggcaaggaagaaggaaggagagggcagcggggccgcctgcagcaggaggctcggcggggccggcggggcagaggcgagaccgagtatagccagcggctcccagcctcggtggctttgggacagacacgcgaggcgcccgggaggtgccaccacaggtaaggggcctcctttggggagggacgtggctccgggacggtcccgggcagccagagtgggaggcggggctgcctggggctcctggtgctcttaccccctctaagagaccccccaccccccgccaaggaggaagcagtgtggggtggccgcgctttggagaccctggctggtacagtttgctcatctgtaaaatgggattagaaaacctccctggcagggttggtgtagggattaaaccgagtgaggtgtgcatggagcccagaggagtgactagcagataggaggtgctcaaaataagtgtgtggagagagaatgaaataaaaaaacctggtctccaaccttagctgtgccatggactagctgggtgattttgaacaagtcacttggtctttcttactgatattcaggttcttgtcagaaaatgtttgttgaattaattatcctgtttcatagagcaggaaagtgagctcctgatggatgaagggatttgcccaatattatgcttctaatgggtgatggaactggattagaaatttcattttttgatgccaaatgcaggtggagatccaagtggaggtgggagcggagctacatcacacgtttattgtgcattgattatgtgccagggaccatgctgccgataaacaccttgcatcatttaattctctgagcctctcctggaaagtatgatgctacccggttccacagacagggaaacaagcccagagagggcgacgaatgcactcaaggacagcagctagtaagtggtagactcaggtctgaccacagggaagtacacaggattaacatttattgagcatctactgttttcccagggctttgacatataccacaataatgatgcatccaaagcaacattatc

SEQ ID NO: 8955 - DNA, 6000 bp, Homo sapiens
ttgtggatataaagaaagaatctgaagtttcttgccccaaaataatgtatgcagagacacataacctagaggagtactgaccatgcatgtgtcctctgcccccagtcatggagcccaggttaaagacccatacatccacaaataattatattcaaacatgttgcatccctttagagattctcagaacttggggaaggggaaattatttccttaattccaggaggttaagatagttttatagaagaacttccattaactctctaaacgagctgttttcagtttttgtttttgtttttttgctagtgtactctgtaaatgattattttaagactaggtactccttgacataatttttagttgatagcttaacatttttcatcaaaagtttaaatagttgcaaaggttgtaatttctggcatattgtaaatttatacacgtaaaagtaaaacaattacatcactcttttaaatgtatccagttaaattaaatgccctagcaattcgatacctacaatcatccatttaaaaaatacatgaacaagctcttttctaagagtcagacattttgcatcatttctttttctatttgaagtcaaatttctactccatgttccaccacaaaattttatcataatgtgtttttttttaatgcgtcagaggcttactgatgactcttttaaaaagtcctgcaataatttaaacagcttcattaaggtacaactggcataaaataagctatacatatttaaagtatacaattgacataaatatatgcttgctgtgttaggctgtttgcgttactataaatatatgagattgggtaatttataaagaaaagaggtttaattggcttacagttctgcaggctatacaagcatggctccagcatttgcttctggcgaggggctcaggaaacttccaatcatggcggaaggtaatggggtagcagacatctcacatggcatcatcaggaccaagagacagggaaggtggagttcccagactcttaaacaaccagatccagcgtgaactgagagtgagaattcatttatcaccaagtggataatgctaaactattcatgagggatctgccccaggatccagtcacctccaggccccacctccaacattaggaatcacatttcaacatgagatttggaggggacaaacatccaaatcacatcactctctaaaccagtcctacaaactttgataaataattattaagtagaaaaagtaaagttgttttagaaatacctgtcttaattaggtggctgtggcaatttttctctccaattagctcactaaaacctccatgagattgggtatagtcgctcatgcctgtaataccagcactttggaaggccgaggcacgcgggtcacttgaagtcaggagtttgagacaagcctggccaatgtggcgaaaccccatctctactaaaaatactaaaattagctaggcatggtgatgtgcacctgtaattccagctacttgggaggctgaggcacaagaatcacttgaactcaggaggctaaggttgcagtgagcagaggttgtgccactgcactccagcctgggtgatggagtgagactttgtcaaaaacaaacaaacaaacaaacacctcaacgaatattgctagaatgaaacaggttttagcaataattttattcctatttttcattttttatagctgtcaaaccatggtgtggtaaagccatcttgtagtggttcatgaaagtcaatttttagaaattttgtggctgggtgccatgtaatcccagcactttgggaagctaagttgagaggactgcttgagcccaggccttcaaacccagcctgggcaacatagtaagactgtgtctctaccaaaataataataataataataataataacaataacaataataataataattagctgtgcgtggtggcgtatgtctagtcccaactactcaggaggctgaggtgggaggatctcgtgagcctgggaggttgaggctgcaatcagccataattttgccactgcactccagcctgggctacagagagagatcctgttttttttttgttgcttttttttttatgtcattagccagttgttaaacataactattactaaaaattaatttatatgaacatacaattatattaaaaaaaaaggaggccgggtacagttgctcacacctgtaatcccagcactttgagaggctgaggcgggtagatcacgaggtcaggatatcgagaccatcctggccaacatggtgaaaccctgtctctactgaaaatacaaaaattagccgggcatggtggtgtgtgcctgtagtcccagctactctggaggctgaggagaatcgcttgaacttgggaggcggaggttgcagtgagccgagattgcgtcaccgcactccagcctgggtgacaaattgagactccgtctcaaaaaaacaaaaacaaaaacaaaaccataaaggaaataaatactcaaaactcatcacttactaattatctcactacactttactgttatccatgcttttgagattatttgcacctattgtatctgtgtggtagaaatatatcttcccagctccatgttcagtgacatctcattggtagcttgaaatcagccatgctggtagtatttacactacagaaattggcaaattagcactcgccacttcccctagccaattgtcaaacatttactggcacaccactggctgtaagtgctgagaaacttataaaagttggtaggaacagaagaactcttgttacaacagtgtgacaatagataactaaaatcacagttacctattctatatttaatgatctatctactgacaactagattaggcccccctgcaattttgtggaaagcaaagattgcaaaccatttaacttgcaaaaggatttcttattctggcatgagatttcttcattttctcagttttgttccaaatcctagggaagcatgttaaaaaccactgaaagtcattgcttacctttaaatctgtggaaaccccgtggtcagcatttgaagtttgctttactgccaaggttctctgccacaagagacttttattctttgataataattaagaggtggaaaaagggaagtcactaccaattctccactccacaaagtatatgaattcataatatgccaacagtggccaaaatgtcctacttctaaggctatgttacacccttagaaagatttatacataagtcagggagagacagggttaggcttcttttgtacttcgatcatcgtagaatgcccaccttcacaccctgcaataattccaacagtacgtgtgcttggggacccagagaattttacagtctccatatagcacccccctccacttcttccctcaacctgctcccaccaatgcactgttaggaggatgaagggtaaggaggacacacaactttctcttataaagggtggaagcttaccctaagaatggaaataaacttgcagaccagttctcagagagatcaaacttttgaaaaagttcaaaatctggtagatgaagcccttagaacagacgtcagccactctgagaccagcgtcagagtggtctcagagtggctgaggcccaccgcctatttttgttcagcccactgctaagaatggtttttgcatttttattttttatttttttgagacggagttttgctctgttgcccaggctggagtgcagtggggagatctcagttcactgcaacctccgcccctcgggttcaaacgattctcctgcctcagcctccagagcagttgggattacaggcgcaggcaaccatgcctggataatttttgtattttgtagagacggggtttcagcatgttggccaggctggtctcaaactcctgagctcaagtgatccgccgcctcagcctcccaaagtgctgggattacaggcatgactcactgcatccggcctgcatttttattataaaatgtcatttatttatttatttatttatttatttatttatttatttatttttgagacagggtctcactcggtcacccaggctggagtgcagtgagcgatcatggctcactgcaactttcacctctctggctcaagcagtcctcccacctcagcctccagagtagctgggccacaggggtgcaccacaatgcctggttaatttctttaaaaactttttgtagagatgggggtctcattatggttgcccaggctggtctccaattcctgggctcaagggatcctcctattcctcggcctcccaaagtgctgggattacaggcgtgagccatagagcccagccgatttttgcatgtttaaatggttgggaataaagtcaaaagaataataatatttcgtgacacatgaaaattatattaaattcaaatgtcggtgtctataaataatgttttattaggacctagctgccctcattcctttagtatttatggctgcttttgagctacgacgctcgagtttgaatagttgccacagggatcgtatggcccgcaaaacctaaaatatttagccctttacagaatagtttgctgtcccctgtcttaacacggttcacatcccatttgggaagttctgtgtcttcagaggggagcacacccggtatgaaggctggtctaaactcaacaccctagggaagtccttcccgtccctgggccttagtttccccaactataaaatggggttagccgcagtgatctctggggacctgcctggcagtgggtcaaataaataaagggagttggacctcccggagggtaggactaggggttgagtaggagccggcgggctcgggcagggcgggtcccttggggtttccaactccgcgggcgggcgcagtgccccgcaggcctcgcttccactggggaattccgggcggggtgcgggcggcggggcgggggcgggccggggcggggccggtaggccgcctataagatgggtggcgcgcccgcccggggccactcgccgcagcctgcgcgccttctccagtccgcggtgccatggcccccgcccgtctgttcgcgctgctgctgttcttcgtaggcggagtcgccgagtcggtgggtgcttggaggttcccgggctgggggcgaagcgggggcgcaggccggtgcctcctttgttcgtcggagcgtgggatgggggggggcagatcgggggtacgctacccccaaccggacaccgaggcccgggaaactttgttggaaactttgctccggggtcacgggccagcctccgggatggcttcacgcgccgtgcgcccctcgcctgttgctcttcccgcctccccgggcctcagccccgccgcgggctacgggctcgttagtgactaagccggtgtcaactcttcaactcccacaccctcgtcccttccctggtgaccctggggcaggcttggagcgctgaatcccctcctcgctctcggggcgcccagagcagacagctttaggatccgagatggccctgggggtcggggggctgcgtgtactcggaagggggagggttttagggttgtgcgaggccctctttcacacaccaaggagaactgagccctaacctcagttctggccccagctctgtcattgacttgtgacttagggcaaagtcctgcccttctgaatctcttcccaatactgcaccaagggtctgagggaatggggcaagaggggacactgcgttagggtttctagaaagttggggactctgctcttttcgaggacagaggagaggaatggtttagactcaacacttagccaggagctgagcctctgctttctgcaagaagtgtgttcattttttctcaattgcagataagaaaattgaagcatccaccttgagtgaggtgaagggggtaggggggagagaaggcctcaatcagcccagggaaacctttccttctcactgtccactggcctccgtcatagctgtccctgggccagcagaagctctatccatgcccgcagccggcttaggaggagg

SEQ ID NO: 8956 - DNA, 6000 bp, Homo sapiens
caatagcatatgacagagcgaaaagtagactccaaggccatgctctctctcccagcatcatgccatggatggaggaccggggagcctggggcagatgggcaggcaccagactcacctcagtgtcattagttgcataaaacttgtcatcggagtaggagaagcccaccccagctggggactccaggtataacacattggcaatctagaggggagggaaaaattagctaaatgccaccccatccaagtgcccagacacacccacagctccagctataccagattccaagaataggggttgtactccagggtgacaccatctggctggacctgaggaggaaagagatggctgagtaagtcccaagggccagctgggtggagggaaagggccaccatgagaggcactttacatgtgggtaaaacctctgagaggtacaggcagcaaagccaatggcatagaggaaaatcccgaggcttagaaggaaggaaactttttggaaaatcacaaagcccctctctcgctttccccagccttttactttgggaactgtgctttccccctgctgtccactcaccaggaaggggccatgctctgtgaggagcccatctagtgagctgcagccgggacccccattgagccaaagcaccacagggctgttctcgggatccttctgggactccacaaacctgggaggggggtcagggcagggttggcgcagttggaggggccctttccagccctcccggctcccaggcatcctcaggggtctgcagaactaccccccatccctcatccgtcatctcttctcccaatcccgcccagaaggcagggcggcagaccagtagtggaggtgcttggagccggagcctttgaggtagccggagtactggcggaaagacggctgcttggccagcccggggaggcgctggatctcgtcctggtcgggggctgcctcgcctcgggacgcccaggacactagcagcagcagcagcagcagcagcaggaacagcggcggcggcgcggctcggatcatctacgggaggcagcagaggggctgttgactcgctcctcagcgcttccgtgcagcagcccccggggagttgctggcggcgcctccgcgagggaagccccggccccagcgccagctcccacccgcgagcctcctctgccgcgcaccgatcccgggctcggggatcccctccagcctccggtgccagctcacctctgctcccccgcgtccttgctctccaggaggcgcccggggactggaagtcatgtgtacgagtcacgtgaactccggcgccacgtgacagtcttcctcccgccccttctttggtccctacggacctggggggcggtggcggtcaatgccgggtcaaggtccgcgggcctcgcagatcgtagcccgggcgcacgcgatcagatgatcctgttgtggacggctaagttgtaggcgggatggctgagaaagcggcgctaggacccccgggcagaggctcggggaagggagtcaggggggaaatgccttacaaggtcgccttgcggtcaccatcattgcccgccgcccaaaatagcccccggcgccagctggcctgccctatggccgagagatggctgctgcctccgagcccgtggattcgggtgcactctggggactcgagcgcccggagccccctcccacccgcttccatcgggtgcacggtgccaacatccgcgtggacccctctgggacgcgggccacacgcgtggagagcttcgcccacggcgtgtgcttcagccgcgagccgctggccccgggccaggtcttcctggtcgagatcgaggagaaagagctgggctggtgcggacatctgcgtctcggtctgaccgcgctggaccccgccagtctggcccccgttcccgagttttctctgcccgatctggtcaacctgggccacacctgggtcttcgccatcacgcgccaccacaaccgcgtgccccgggagggccgcccggaggcggaggcagcggcccccagccgacctccaaccctcctcgtggaaccatatctgcgcattgagcagtttcgcattccccgggaccgcctggtgggccgcagccggccagggctctacagccatctcttggaccagctctatgagctgaacgtgctgcctccgaccgcgcgccgtagccgcctgggtgtcctcttttgcccgcgccccgatggcacggccgacatgcacatcatcatcaacggcgaggacatgggcccgagcgcccggggactgccagctgcgcagcccctctacgcggtggtggacgtgtttgcttccacaaagagcgtgcgccttgtccagctcgagtatggctgtaggtatccctgggcagcgacccctcctggctcagtgtggggactggaatctactagggctccgtagcccatgtgctaggccttcgtctgtccggcactagtttaagagtgggagaatctagcttcaaattgcacctctgcttgtgatcttgcacaagcctctacatggttttgggccttggtacctatcttggttgattgattaagatgccctacaagttcccttttagttttgatagtgtttcctgtattcacctagggcagggattctaaaccaattttagatattaggggcctctttgagaattgtttgcccttttcttagaaacatgcttggccgggcacagtggctcacacctgtaatcccagcactttgggagggggaggcaggcagatcacttgaggccaggagttcgagaccagcctggccaacatggtgaaagcctgtctctactaaaaatacaaaaagtagctgggtgtggtggcatgtgccaataatcccagctattcagaaggctgaggcaggagagtcacttgaacccgagaggtggaggttgcaatgagccgagatctcaccagtgcactccagcctaggcaacagagcaagactctgaaaaaaaaaagaaagagagagagagaggaagagagagaaagcaagcaagcaagcaagctagctagctcaagcctgggcaacaaagtgagaccccatctgtacaaaaaattaaataattatctgggcatggtggtgcatgcctgtagtcccagctatttgggaggctaaggcaggaggatcgcttgagcccaagaattgaaggctgcagttcactgagcactgcacttcagcctgggtgacagagcaagaccctctctctttaaataaaaaaaaaaaaagaaagaaaagaaagaaacatgctcatagacttgggcatattggctattggcttcgaggcataacaaaccccagactgagagcttcttaatgctgagtatgattcattatagccctggtaagcattgcagttatacctctcatcacatttcatgaactcaatgcaccagaaccctctttgtgccaggcctgtgctggaggcttcagttgcacaggcaaatcagacactacccctgcccccagaagctgctaagtgaatggggaagggattgtgctaagtgttatgatataaacagggctgcagctttgtggcagctctcaggaagaggtgcttctctcagccccatgaagcaggctgggcccagagagcagtaaggacttgcccacatttaatgacaaagtggggaccatgacctagaccttctggatcttggcctcagacccaccctccagttcagtttgcctttcacagtcttcttcccacagtgccatccctgcagactctgtgccgcctagtgatacaaaggagcatggtgcaccggctggccattgatgggctccacctgcccaaagaacttaaggatttctgcaagtatgagtgaagacccacagtgcaccagagcacagctgcatcctggagccccagacctgtggctggctggtccgaagttggccacattgctgccagccaagaccagaaataaacagccgatgctgacatcttgatcactggaaggtctccttgcccctacagcctatgagagtcacttcgtttagaatcactgcaggtcagcaggtcggagcaaaagagcaggggtccctaggctggctgcttgttagagtcatcttaggatatgtaaagagtgctggtgtcccacatcccatccctagggattcgtatttgatttgttgggaaattaggcctagacattgtgttttgtaaaagcttctcaagagattctcatgtacagccagggttgagaagtatgtccctagaaaaaaggttccaactttgtcatatattataatcacttgaggaattttgaaaaataccaatacctggcctgtaatcccagcactttgggaggccgaggtgggcagatcacttgaggtcaggagtttgagaccagcctggccaacatggtgaaaccctgtctctactaaaaatacaaaagttagccaggtgtggtggcaggttcctgtagtcccagctactcgggaggctgaggcaggagaattgcatgaacccaggaggcagaggttgcagtgagctgaggtcttgctcctgcactccagccttccagtcatggcgacaaagtgagactctgtctcaaaaaaagaaaaagaaaaataccaatactgggtctgacccgaagtcttactctacaaggcacgaagcacttggctcctgtgtttccatctctggtcatctgcttccatacaaatgatctcatttcatcctcaaaactcctaatgaggtagtgggcagtcatcagacacactttacagataaggatatcaaggaacaaaactatctgggtgactcgttcaaggttagggcaagaacctagaacacccagctcctggtctggtgctcttttaacctcatcctattgtcatgtccaggttctagaatgaataggtcaacgctgtaaagtggattccaagtgtgaaggggagggtctatgaggtgacattctagaagggtgaagaagggaggacaggcggcagatcactattccctcacaaaccggggctttggggaagccatgtcctacttcaggactccacaaactcatccaggtcctctgccttccggccaaggtgagcggggggcacctgcaattggagggagtgcggcagcttcccctgagaagttgctttctggctctggggaggtggcggttctgctgggcatttgggggctggccctagaatcaattcttttagaagaaaagccattccaaacatccttgccaatcaataactacccgcttgctcactattcattaattcaacaaacgcttctccatcacctactccgtgttggggactgggagtgtggatatgagtaacacctagttcccaacctctagacagtccgctggggctggtcttagttacgcccccaagctctgctcccatgccctgcccctcagggccccctcctcaaagaactgagaataacgttccatttcattcctgtctctgcaggtggggctgcttctccaggcttgtcccttggcctctgtagtcctgtagagccagtggtggtggcctctggtggaacaggcccactgagccagaaagctgagcaggtggcacctgctgcccaggcctggggcccagccctggcaatgccacaagccaggggctgccctggggggactagctgggagacactacggaaggaatacagccgaaactgccacaaattcccgcatgtgaggcagctggagagcttgggctgggacaatggctactccagaagcagagcccctgacctgggtggccccagcaggcctaggcccctgatgctgtgtgggctgtcaccacgggttctaccggtaccctctgaggcagtggggaaggaggccagctcccagcctgatatctgcatcctcaccctcgccatgatgatcgctggcatccccaccgtgcccgtcccaggagttcgggaagaggacctgatctgggccgctcaagctttcatgatggcccatccggagccagagggtgctgtggagggggcgcggtggg

SEQ ID NO: 8957 - DNA, 6000 bp, Homo sapiens
acacaaacaccacacatacacacacgccctacagcctctccttccattctgttgcctgtatgggagtctggggactgttgggggacatcaggtgtcagagcttgggttttatggggcgcagcatggggctgctggtgcatgactccacctggcgcacaggccccgggcaccacctgtcaccacctggtgctcggcaggttggagtgggtggtgggagaggctctgaatgcctcatcgactcccccgccctacccttgtctcttctactggcagggagacaagaagcccagtcttccccacagcagaattaatcttgcggtcacccccacgcctgctgccctccctgcttccaataacagcttggaggactgtctgctccgtgattagctggtgcctggatagaggatctagggcctggagagggttggggtgcacctctaaggctgggggataatttggttgtgggagggggtgtgaataagaatgtgaggtggtagctatgagtgtgcatgtgtgtaagggactttgtatgtgttcttatgtccatacaccacaaatgtgtgaactacgttgcatgtgtgtatacaggtgagtgtgacagcatagtgagtgtacatgagtgtggacgtgagtccagttcacaccagccaagctgctgctccatgcctggctctgggctgtgtgttactgacacaggcctggttcatgcatagaatgtcaagtgggaaaactgaggccccaaaagtgggactggttgcccaggggagtcacacagttgcttttgtgttgtgtctgtgtgtgagaaaatgcaggtgcaatgtgtgtgagcaagtgtgtttgaaagtgtatgtatttgagaccaagtgcagtggctcacacctgtaatctcagcactttgggaggctgaggcaggtggatcacttgaggctaggagtttgagacctgcttggccaacacggcaaaaccctgtctctactaaaaatgcaaagattagccaggcatagtggtgcatgcctgtagtcccagctactcaggaggctgaggcaggagagttgcttgaacccgggaggaggttgcagtgagctgagatcgcgccactgcactccagcctgggcaacaaagtgagattctgtttcaaaaaaaaaagaaagaaaagaaaaaagaaaaagaaaaaaagtgtatgtatttcagtgtgtgtatgtgttacagtgtgtatgagagtgtgtgtgtatatgttagtgtgtctgtgtgtgtttgtgtgggaggatgtgtatttgagagtatgtgtgaatgtgtgtggatcattgagtgtgtatttgagagtgtatctgtttgtgtgtttgtgtgtatgtgagtatgagttatttgtgagagtgcatctgtatggccaggtgtgagtgtgtgtgtttctgtatggatgtgtgagtgtatctgagcccatgtgcatttctgcatgggcaggtatgtgtgtgggtgatctgtataggcctgtatgtaattctgtgtgagtctgtgagtgtatgagtggcagcatgtgactggatctgtaaggtatatgagtgtgtgtttgtgagtgtatctataggagtgtgtatgagtttgtgaatgtttctgtgtgtgtgaatgtatctgtgtgtatctgtgtgtgtgtgaatgtatctgggaataaacctgtgaataaacctgtgtgtgttattctgtgtgagcctgtgtgaatgtatctgtagaagtgtatgtgagtatatgagcatgtgtgtacatctgtgtgatcatgtgtgtatgtgtgagtatctgcatccatatgagcaagtatgtgagtctatctgtgtgaccgtgtgtgtgagcatgtgtgagtatatctgtgtgggcatgtgtatctgtatctgtatgagcgtgtgtgagtgtgtgtggtgtacactgagccctgtcccacatggtggacacgtggatgtccttgtgtggcccactctcctcctgagcttaattttcccaggagtcacagggtctgaatcccgcctgtacaggggtctccacatcagtgggcaggtggtgtggggtgccctggcctcaccctcactcacccacaggcgtaatccggacggctgtgcctgaccttgaccgcgagagccaggagcgctacgaggtggtgatccaggccacagacatggcgggtcagctgggtggcctctcgggctccactaccgtcaccatcgtagtcaccgacgtcaatgacaacccgccccgtttcccgcagagtgagtgaggccttcccagaggaaggcgcgtctgtgtgtctgtctgttaccccatccaagccacctgctgaccccagcttccctttagacttcccaccaaaagaagggcttccccctctctttctgtctgtctgtctgtcctcccaagccaccagctatcccccagcccccctccaaccatgcttcctaccaaggaagaccccagggctgtccgatgctccacagagccaagtaacacaccatcaccttcccagacctcctcttgcttccggcagagggggagccccacccatccacccttccgtccatcctccaacccctcactggcccctgcccactcccctagccacttgttgggccatcccatgccgctgacctaggcttgcagagggaaggtactggggagaaagggggcacccagggatctaggcagaggcagctcagcccccagacagatagaggttgtgcagagaaaaactaagtctgagtgacaggcatttccctcctcctctgagcctgggtagcgcgactctgtgcttctgaattaggaggcctttccaccctctgcctctgctggcacagcgggggttgggggatgtctccggcccagcctcccagctccctatcagcccagccaacccctctgtcccaggctcaggccgagagccactacagggaagccaccaaagctggcagggactaaatgccgcaggagctgggctgattcctatcgggtgagtcattacttgaggtctgctgctctcacattaggccccgccacaggggactgacccccgagagataagggaatccaatcccttagctgagagcgcagcatcattgtggcctacagcctcagctcagacacagagcggagtgagctgagctcaccaaccggcttcccggtgccagggagcctggcacagaagccatcccactgcccaatctcccagcccagccccagcccctgaaggcagccccatgcagacgggtggcatgggtgggacgcacccccacccagtcttctgcccacttgtgccaggctctgaatgagctctgaactggaaggggtggggcagagcagagaggaggccagggcccccagaaggtttgctttcctgctcgtcattcctttcctccttcctttctttttctttccgtctttcttatcatgaactatggcacacaaaaacaacagttcaacaaataattataaagcaaacaatcctatgaccaccagccaggaccccagaagccctaatatgccctttcctgatcatagcctcttccccaactcctccctccagttagccactacctgcttttgtgatggtcatcttttgagtctgttcatctacgcaggcatcaccagtcacaagtctaatttcatccatttttgaaccttatataaatgggatgaatcatacaatacaaattgtttttgtcttgctttttacctctcaaaattgtgtttatgaacttatgttgctggtagctgtaatttattcattttctttgctgtatagtattccataattatctattctgggggtggtggacactggcattatttccagtttggggccattgggaaggagactgctttgaaccttattgccccaggtctccaggtgcccatttgcacttgttctctatggatacagaggagtgaaattgctgggtcatgggatgtactcatctttagctttaccaaataaagccaaactgttttcccccatgaggaaacgcacatgtccattgtaccacatcctcactgactcctggtactgtcacgttctttgatttgtgttaatctggtgagtgtctactggtaactcatgctggttttcattcatacactcactagtccctcacacatttcatttatgcgacagcctggcattctgccaggcactgggaatgcctgatgaataagagatgtggtccctttcttccagcagctcatacccaagagagagaataaacagaaaatgagagtaaaaacgcagtaattctaacaatgggataagcttgggggccaagggagcacaggagcagagcctggaggtctgggaaggttccctggaggaggtaacattcagtgagactagaaggcagagcgggaattgggaaggcaaaggcagagaggaggacagggagaggggatgcctggaggtgagagagagtgagtcagttgcagaatcacaagaacttcagcaaggctgaagctagagatggagtggggattggaggatgaggctggagaagccagaaggggccaggcagtgttttgtagggcaggccaagggacttgcacaactccatcccaagggcaatggggagctataaaagggattaaagcaggggagtggcatgttcatctcgtgtttcagaaagtgccccaccccggctgctgtatgaggatgaatcagaggcagccactccacgcaagggttaccaagacctgtggagcccccaagagacacatccccacagaccctgcttcagctaggctggcccatcacttagcaagtcatcctcacctcgacctcagctctggttggagagcaagctgcagcctccatcccatctgatctcattccttctggtttcccctctgctcctcccctccagccacacagccatcttgccattcttccaacatgccaggcacagcacccacctcagggcctttgcacctgctgctccctctgtctagaatactctttcccaaatatctgcttggctcgctccctccccaccttctgacttttgcagaaatgtcatcttctctgcaaggcctttctagatcagcctatttaaaactgcgcaacaccctcatcagcactcccacaccttccctgctttatctctctcctaagtacctatcaccattggacataccatatgtttcactgatgtgattgtttagtgtctttccctttctattaagaggaaagcaacatgagagctgagattttggtccattttatttgttgctgtaaccgcagtgtctagaaccgcatgatgtctgggggcatcataggtgctcaatgtatacattgaaatgaaggaataactaccgttaacatcaacagcaaaatcactatgaagccccaccattttaacacaatttattctatttcttgagtagctaccaagtgccaggcactgtactaagcatgttacaggcgtcatcatctaagttagttgccataaacacacagctgttaggaaggcaccatcgttatttatttccattttacagaggaggaaactgaggctcagggttacacagctaggactgactccggagtcttagcctttatcactgtgctcctctgtccctgtcactggctaggtagggaaactgaggcccaaagaactgcaggcattttaccaaatcaaccagtgaataaacccaaaggtcagaatttaaaccctccttttgcactgccacccaaacttctgcaggggacattcctctcccagcccccattctggccaagctgagagcccctttcaggcactgtcctccatagaggctcacctgggcccccttgtcccctcccccactgctggcagaggctggggaaggggctgccttcatccctgctcatggccgtgtcccccacagagatgtaccagttcagcatccaggagtcagcccccattggaacggctgtgggacgtgtgaaggctgaggactcagacgtgggagagaacacagacatgacttaccacc

SEQ ID NO: 8958 - DNA, 6000 bp, Homo sapiens
tcatgcaacagtgaccaattttgtgtgtgtgtgtgttttgttttgttttttaattgttaagacattcctatgccaaatacagcacgatagaagttgttagtcatcttggtaatataaaaacttttaggataacttacagtcatggatcgtgaccttccagggttctgagtgttgaaaatgacttttttccaatcttaaaaatatcacaacatctttgatgtgacttgggcagggagtgggtaagttaaggttgatttatgctgggcctcatctccagccacacttgtggccgcctaggagcattgatgacattcatctgaatcagcatgtttggtgatgatgccgagtcactaggactttggccaagatcttgatgtgcagaccccaggctgttccatcgctctaatttaaaccctttctccttcaggaggtgttggaattggccttctccatcctgtatgaccctgatgagaccttaaacttcatcgcacctaataaatatgaggtgagcagtgtggcgctgccttagacaacagagctatttctgtaactcttcagttggtggcaggaatgagcaaaacaggaaagtcccctgtggtgggtggctgcagtgtatattgaagcctaggaaggctttgagaagaaggtggcatttcaataggatgggaatgtctcaaaggaggagctgtggttgggggggcacccagatgaagcagcaggtatcattacataatgctggacctgaggttcctccaggcgcattgggtggctgccaaggatctgtcacactctggattgtttatctgtgagctgggctctccacattactcttcagcagcagccataggttgtcattacaaagataaggtcaactaggaatgagtcatttacctgggactgggaaaattctccccttttcagtttctctgtggtcagctacccaagagaacttgacagatccttcctcctaggggctcctggtcacatgttgtaatggatccagtgtggactttgaagccagatggaactggtccttctgacaagggccctgtagttccatctgcagcactggaagatactagatattaaatgagtgattgcatttgagaccctatgtgcctggtgagctctgagagccatcactgggaactagaggtgggacttctggcagaggagacacttgggcagggcctgagctgccgctagtggaatttggttgagaggaaatgaagaacaagcaagtggggaaccaggtgagcaacggtgtggaaaaaggaaaatggcagcagaggaagcaggaagagtcagggagcggtgggatcagaaggcttcctggtcaccccctcttagcatgagacccaccagttccatttctttagtatttactctttaatatgtattgactggattatttttaattttgttttcgggggggcggggcacaaaattgagatcccacagtgacttctgtttgtgtcttgcttcttttcacctaatacatatttcccttctctcgcttctgattttgggtaacttcaggtagatgatgccccagtactcagatctcattttgctgtattcgtttattgcatttttaggttctccttcatattattgtaaggagttgtaatataaaaccccttataaaaaccagatctcttgagaaagtgaaggatcacctcctaatttatctttgctatcattccaaatcagttttgcctatactgattagttccaaaaggaactgttgtgagccccatcagaaaagagaccttggcaggatctcctgctgaccaggggtcacgatgtgacattttgcaacttgctccccacagtactgcatctggattgatggcctcagtgcccttctggggaaggacatgtccagtgagctgaccaagagtgacctggacaccctgctgagcatggagatgaagctgcggctcctggacctggagaacatccagattcccgaagccccaccccccatccccaaggagcccagcagctatgactttgtctatcactatggctgagcctggagccagaaacgacggtacccaggagaagggattttgggcccaggagaaacacttacattctggtgccttgtcttttgcttgtacagaatctgtagtgattttggtggccagtaaatgccagccatttctcaaacccacctcggaccacccagagtttcctcttggtccctgtctactaagagtcatgaaggcagggtgctctgcccactccatcaccatgaagcctgggattgggccacgaggaacaaacagcagatgcccttgccttccagtccaagaaactgcttcttgaaatggatttaacaacagccactcaccttttcctcctgagcctgctctctgatcagctggatccccacgtgagcaacagctggcccaggaaaggctgcctgcagaggacaggtgtgttgggcgtgttgagagccttgaagtgactacctgtatcttagatctgagtacaagcctgaggcttttgcttttgtcttttttgatgagggctcactccagcttcatatggtgccaagacgttgctgcttctgaggttggctctaacatctctggtctttagagccaccagatctctctggcccatacagatatcagagcagacggaaatttctccctgcaagcgctcagtctcatcccagcaagtcaaagacctcctggccaagtcctgccctcttaagtctccaggaacgctgcagggaaaacccagctgaggcctgggcctagactgtggtgaggtcactagattctactgctcttcccccacattaataccttttccttcctcagagagaaatctcccctaacctgaattgcagccccctccagtttgctttcctttggccttccagaccccaggaagttggccttcccttcctagtgctatggtttctgccattggccatgatttcagggagctggctgaggccggctgaggccacacctgtgccagtggggcttccctggtgctgcagcacttgtaaaccacacacacagcctctctccctggacatacgttagcacattggcattcagtattggtggcctggcatggtaggtactacccaatgaagagtgtactatatattttcattactataggccatacttatacagacgtgtatatatatttatataagatctacctatcttaggatggaaccttggggaaaaataaaattgaggggaagtaaaaagtatgtaacacttccagttgtgagccaagattgtaaccagagagcagccaggagcttcctgtcagtaaccatgttttcaataaatactctttcatgtacaaactgtggttcctgttaacagctgtttgtctgtacttgccccctgcccaatggtgaagatttcaccttgacaagacttgatctccatgtatctgggagactctggagagctccagctggagcccttagtcaccttccaagagtcccttcctcctcatcattcgctcctcccacacatacacacacacagacacacacctgctggttaagagtgttcacagattgctgcactgggacgaagcgttttctgctcaaccctgctgggtacagcaaggtaaggcatactgtacacccccatgaacacatcctccctcttctccctgccagggacacagccagggaacagctcgagtacttgtgccttacaaagaagacacgctctttaccctgtgtgttgcctgtgcatagtgcccagccttccagctggtgttttaggctgttgctccaaaccttggccttggtagctgggagacttaaatgagggtggtgatgaaaatagatctcttgcctctgagagagaagggtgtgaggacaggctctttcaaaaggcatagaaagtgcatgcaatacaagcctgaggactgaataaagccaagaccttgggcagtgatgggtaccattgtaggtgcttggtaagcactgaatgaactaatgcctgcatgatgccagctggcggcggtgacagccgcagtttgcataaaacactgcttacactctggccttgagccttctgttcagaggggccagggatcccagctgagtcacttgtaaggatccatgtttgcagctggtcttactgccagagagcccaggaggaggctagaggagggcgaaaggcacaaaactgggtctgaatgtgcaaccctagcttgccctggcctaatgttcttgactgcaaatgctgcccttttaatccatcccgcaagatgaagaaaatctgaactccctaggctggcattttggggccactgcaacctgcctcttggctactttaaccaccacagttacaaacaacctgtgagccccaggcacggctggagctttctcaccctcctttaggattctcccatttcctctatctgggatgctctctccctactcaacctattgaagttgagataattcttagaaagtttcatacagaaaatatttcacaaatgtttcgtattacttctggatcgcccaagttttaagttgtaatggccccagctggcctgagctcccagaagaaaaagcccatgagatacttatcttcgtggttcattccatggttgcccagcattagactggacataagaaaaacaatttgttcagtaaaagtaaacaagttaccattttttggatgctcactgtatgcagaacactagcaggcaccggggttccaaagcaagcccctgattgagcgcgggagagacgcagacaattacacggctgtgctctgagcctgagggacttcgcggaggacaaaactacgctgtacctcagaaagaccagaccacctcagaacccgaccacaacagacgccccgcccccgtgctgccccgccccgccttttcgccccggctccgcccagcccctgggtagcttccggcggaagttaccgcccgtgccgcggttcggcggcggcatccggcctcgcacttccggtggggagattccggcctggagctcccagggccgaggtgagtgggtgtgcggccggcctcccggcgcactcccagaggctggggggccggggctggagaagggaagcgggctccccacccgggatctgcgcgggttgacatggggcacgccacgcccctgcccctccccgggcctcagtttcgccgtctgtggagggggcaggggtctccaagcgccctcctgcaaggcacctgccggacgccggctcatctggtatttcctgagcacctgcgacgtcctgggtgcgggacccgggccggaatcggacacggccctgccctctgaggggctgcttcccgcggtgggattggggcgggcagtaaacacgtgagcaaacaaggaaacgtcagaggtgggagtgccacgaggattgggaggggtggggcattggagaaagtattcagccaagcggaggtctgcggaagggagctgaaggcaggaagagcagcaagtaaagaaaaacacaggtttgatgtgtttgacacgtggcagggggccgctgtggcgggtgctgggaccagtggcagaagaatgaggttacagaggccttccttgtggaccaggctgaggagctgggcttagccttagggcatgatctgtttcgtgtgccatctctctggctgctttatagattccaggccttaggggcgaaagaggaaacagggagaccagttagaccagtggcagtcagcaggtgaaagataattgtggcttagactgtggtagtgggaatggagaggaagagaagtagaggggtcaagaagtgtattgaaagtggaactgacagggcaggatttgagaaatgacagaaataagtggtcaaagatgacttcatcatagatttttggttttggcttaagtaaccaagtgtattatgctggcatttactaaatgactttgggatagattgggagcgtgagaaataattacgaaatcttcttagggcatcttaagttttagatatttggagt

SEQ ID NO: 8959 - DNA, 6000 bp, Homo sapiens
atacagtataatatatactgtatagtatatcatatacagtataatatatactgtatagtatatcatatacagtataatatatactgtatagtatatcatatacagtataatatatactgtatagtatattatatacagtataatatatactgtacagtctatataagtatacagtataatatatactgtacagtctacatcacatacagtattatatatactgtgcagtctatattatatacaatataatacagactgtacagtctattacatacagtataatatagactgtgtggtatattatatacagtataatatagactgtacagtatatataatatatatgtatatatagtatactgtagtatatgtatatatagtatactgtagtatatgtatatatactgtatatatagtatatgtagtatacatatatacatatatacatacatatatacatatatgtatactgtatatatatactgtagtatattatatacgtatatataatatactgtacagtatatatattatatacagtataatatatactgtacagtatatatattatatacagtataatatatactgtatagtatatatagtatatacagtattatatattatatatactgaaggcatatatatactattttcttttgtataaaatatatatatagtatatatatattattttcttttgtataaaagcagggactcagacagatactctttgtacacccatgtttatagctgcattactcacaatagccgaaaggtagaaacaacccaatgtctatcaacaaatgaatggataaacatgatatggtatatccatacaatggaatattattgtgtagtatatctgtatttttgtatagtatatataatatatactatataaaaatatatattatatatataccacacacacacacatatatatacatgttggctctctgaggcctccccagaagccgagcagatgccagcaccatgcttcctgtaaagcctgcataaccatgagctaattaaacctcttttggcttatatatacatatatgtatatttggtatatatatatatgaatgaacatatctatgtgtatatatgtgtgtgtatatatgtgtatatatgtgtatatatgtgtatacatatgtgtatatacgtgtgtatatatatgtgtatatatgtatgtgtatattataaatctacagacccaagaagctgagtgaactccaaatattgctagggtaaaccaaggaaatccacaccaagacatatcatggccaaacttctcaaaacataagacaaaaaaaagaaatcttggaaaatatttattcaagagaaagagaaatgaaccttacctatggagaagaaataactcaaatgatatcagatttttcaccagagaccatggaggccagaaagtaggtgcatagcatttctcaagtgctcaaagaaaataacagaattctatgtccaccaaaaataagaaccaaggggaaatcaagaccttctcagatgttggaaaactaagagaatttgttgcctgcagacctggtctcaaagaatgattaaaggaagttcttggccaggcatggtggctcatgcctataatcccaacaatttgtgttgcctaggccggtggatcacctgaggtcaagagtttgagaccagcctggccaacatggtgtaaacccgtctctactaaaaatacaaaaaattagccgggtgtgatggtgggtgcctgtaatcccagctactcaggaggctgaggcaggagaatcacttgaacctggaaggcggaggttgcagtgagctgagatggcgccattgcactctagtctgggcaacaagagcaaaactccatgtcaacaagaaaaaaaaattatacctgatagctgaaggaaaagttaaaacactgatgtggttctaaatgtatgtagagaaaatattgaaagaagtattttaaactgggtaaggcaaaggggcatgaagtaaggtttctatgctttgctggaattggttaaatggcaataccagtggattataacttataagttatgtacatgcaatgtaatacctagagcaattactgaaaaaagccatgcaagtgacaaaaaccaaaatgctaaaaaaatggaccaaggccctggatagacatttctccaaacaagatacgcagatggccaataaacacatggaaagatgttcaacatcaataatcattagagaaacgcacatcagaatcacagtgggataccacttcacacctattaggatggctattatttaaaaaaatcacagaaaataagtgttggtgaggatgtggtgaaactggaacccttgcacatcgtgggaatgtaaaatagtgcagcctctgtgaaaaacagtatggccatttctcaataataattttcaaaaagcgcagaattaccttatgatccagcagttccacttctgggtatatacccagaactgaaagcagggactcagacagatactctttgtacacctatgtttatagctgcattactcacaatagccaaacggtagaaacaacccaatgtctatcaacaaatgaatggataaacacgatatagtatatccatacaatggaatattattcagccttaaaaaggaattatgacacatgctacaacatgggtgagccttaaggacacaaagctaatcacaaaaggataaatattccatgataccgcttgtatgagctatccagattaatcaaatttatagagacagaaagcagaatgatggtttccagaggctgtgggaggagagaatgaagttattttgtaatgaatacagtgtttcaaaactgtaaaacttctgacaagcttgtccaacctgccttattttgttgttgttctttttttgtttgtttgtttgttttaagcttttagcagcctgaagccatggtttttagtttctgtctctagtgatgagtggaaaagagggatgaggaaggggctttactggcccaaccagaaacagaaactaagaacccatgactgtattctcttccttggacacttctgtgagaacaaagcaaactaaacatacgagaaactctttggggtctaaggctatgcagagagcttaacccgatcatccaaaggaaaaatttgataaatttaactacatcaaaattagaaatgtttgcttggtgatatatagttaagaggctgaaaagacaagctacagacggggagaaatatttgcaaacagcgtaactggcaaagaactgacatctagaatttgcaaagaactttcaaaactcaactgtaaaaaaccaaataatacaagtagaaaacaggcaaatgacaggaaaagatagttcaccaaagaggatatagagatggcaaattagcatgtgaaaagatgttaaacatcactagccattagggaaatagaaattaaaaccacaatgagctattactatgtccctgtcagaatggttaaaataaaataaacagtgacaacaccaaatgttggcaaagatgtggagaaactggatgattcatacattgttgatggaagtgcaaaatagtacaatcactttggaagacaggttgacagtgtcttaaaaagctaagcattgcaaatactgggcaacccaacagttgcactcctgtatggttacctgagaataatcagaagtgaatagaagtgactcaccccccttaaaaaaaaataagaataacggccgggcgtggtgacgcacacctgtaatcccagaactttgggaggcccgagatgggcggatcatgaggccaggagttcgagaccagcctggccaaaatggtgaaaccccatctctactaaaaatacaaaaaaaaaaaaaaaaaaaattagccagatatggtggcacacgcctgtaatcccagctactcagaagaattgcttgaacccgggaggcagaggttgcagtgatccgagatcgctccactgctccccagcccagcctgggttacagagtgagactacatctcaaaaaaaagaaaaaaaaacccaaaaataagaataactcatcagcagcaataactctcattgagcacctgctctgccagacactgcgctaatcacattacatgtgttatctcatttaaacttcctaacaaccttcttgtctggtgtagactatttttaaaaatttaacttttaagttcaggggtacatgtgcagatttgttgtataggtaaacttgtgtcatggggatttgttgcacagattatttcgtcatccaggtattaagcctagtgcccattagttatttttcctgatcctctgtctcctcccaccctccagcctcccataggcttcagtgtcagttgttcccctctatgtgtccatgtgttctcatcatttagctcccgcttataagtgaaaacatgcggcatttggttttctgttcctgtgttagtttgctaaggataatggcctccagctccatccatgttcccgcaaaaaacatgatgtccttcttttttgtgactgcatagtattccatggtgtagactattattatcaccactccactttcaggctcagaggctgttgttgaaggccacgcagtgagtaagtggccgtgccaggatttgaacccgggtaataggagtacgcgccttaatcctcgccttgtcatcctcagccatctcacaggcgagtaaacagaggcgaggagaggataagccagctgccccaggccacattgctgggaagccaagaggcaaggccacactgccctgcggctggggtcccgtttgctaattctagtgcctaactttctccaacgttcccgggcctctttcacccggtcccaggggcgcaggcaccacccttttcctccaggaggagcagggagagggcgggttccccagcgcagtcccctccccgaccctcccccaggctttaagccggcgccggggccaggcggggcagtcccgggccggcccgtaccgccaggcgatcgcgctgatggcggcgctggcagcagcggccaagaaggtgtggagcgcgcggcggctgctggtgctgctgttcacgccgctcgcgctgctgccggtggtcttcgccctcccgcccaaggtaacgcctcctccgcctgtgcgcccccggtcaaccacaggcgggatcctcttctcccaagcctccaagttgggagaccgctgaggtcccagtgtagacaggctccaccagaccccctcgccttccctcccttgcacctgccgcggaccgctgtgaacgctcctaacgcctcttccctcttcccagctgctccttagagcttgagtcccaccctgccttctggatctcacttccatgggaataatttcgtttcgtttcagtgacaggttctcgccggtcacccaggctggagtgcagtgatgtgatcatagctcactgcagcctccaactcctggacttaagcgatcctccttccgcagcctccctagtggctagaactacaggtgcatgcccagctaatttttttttaatagagatagggtctcactatgttgtccaggctggtctggaactcctggactcaagcaattctcccaccttggtctcccatatactgggattacagacgtgaaccactgtgcctagcagaattctttctttcctgagctctaattctgtgcttggtgctgtattgcacatttcacgcgacagtcacaatgaacacttactgggtgccaagctgtgtgacatggtgcaagtcacttaacctctctgaacttcagtttactcatgtgtaaaaatgggagaaatgatagtgcccacccatagggcagcggtgaatatcaatgaggcaatatatgtaaatctcttataactaaaccttgtacagaataaatgcccaataagcagtgactggtctttttctgcaccaggtccttacgtgatgaggacggtaagattcatgagtgcttactacgggtgaggatttgccttttgtgtatcacttta

SEQ ID NO: 8960 - DNA, 6000 bp, Homo sapiens
caaggagcagtggttggatactgggggtccagttttaattgtcatcatactaaacactccataataataatagcttccatttcgaagtgcatatcatgtgcccagcacggttctatgtgttttaccttgttacacatttaatcatcacaaaaaccctacaagatgaatattatctacaatcttcttttacagatgaggaaactaaagcacagagaggttaaataactcactcttactcaaacatgtcaagcacacttcctctctggggcctctcctgtctggaaagatcttcccccaggaatccattcacagggttcaaatgtcaccttttcgttgacaccttctcaaccactttatttaaaattaggcccggcatggtagctcagatgtgtaatcccagaagtttgggagggaggccgaggcaacaggatcacttgaggccaggagttcgtaaccagcctgcactacatagggagaccccatctctacaaaaaatggtaacaattggctgggggtggtggcacatgcttgtggtcccagctactcagaaggctaaggtaggaggattgattgcttgagccccagcaggttgcatcactgcactgcagcctgggcaacaaagcaagaccctgtctcaataaaaataaaaataaaaaataaaataaaataaaattgcatcactccctcccacccccactctactacacatagggtaaccatatattgtatcatccaaactagaatgcttttgagagtaaaaaggggacactagcctgggcgcagtggctcacgcctgtaatcccagcactttgggaggccgaggcaggtggatcacttgaggtcaggagtttgagaccagcctatccaacacggtgaaaccccatctctactaaaaatacaaaaaaattagttgggcatggtggcatacacctatagtcccagctactcaggaggctgaggcctgagaatcacttgaacctgggaggttgaggttgcagtgagccaagatcatgccactgcactccagcctgggcaacagagtgagactccttctcaaaaaaaaggcgggggcactaataatagttatgccagggcaacaggcaaaaactggggctgtccctggcaagcccagatgcacgtcatccttcccatcccccttcctgctggatttatctcctgctagcccctgtcaatgacacattttccttatttgtttattgctggtttccacccactagaatgtaaactccatgagggcagtaataattattctctattttgtttacagctctgtccccagggcctagcacagtacctggcctatagtagtcactcaataaatatttattaaattaattggtgaataaatcactgaatgggcatctggtgctggtgggtgggaagtgaagaagaggccataggttctctttcaggctcagaaagggctaaaaagtagacccctccctcccctttactgcttggctgttctacccagagctcagctgcatattttgcagccagaggtcaaggccccaaagggccatgcttggtgtagtcaccccaggctcacagcacctctcctccagcaagagaaatcctttgggaccaggccactgtccttgttctttcagctcccagcctgtccccagtgccaacctgccagcagccatgtggagctgctggtccttgtccaacccaatcctaccctgtgtctgttctcactgcctggaacctgagcaccctccctctccaccccctgactgagcgttccagcacctgagaatctcaatgaagatgaagatatgggaaaatgagacatgaatttgactgaagcataaataggcacaaaactttgggagggtagtttggctgaggagtcgagtttcaaagtgcttgtcacctacaacccagcaatatcacctgtagaaagatgtcctcagaaacattcatgtgtgcaaagatggctggataagcctgctcactgcagcactgtttataagagacaacaaaacaaaaaaaaatgaaacaaaactggagaagtaacattgttaaaatgtcctacagattccatgtaattcttatcaatattccaatgacatttttgtagaaataaaaaattctaaaatttatatagaatcataatagactccatatagtcaaagcaatcttgagcaaaaagaacaaagctggaggcatcatattgcctgacttcaaaatatactacaaagttattgtaatcaaaacagcatgtcactggcataaaaacaggcacatagaccaatggaacagaatagagagcccagaaataaatccacgcactatagtcaattgagtttcatcaaacatgccaagaacgcgtaatggagaaaggacagtcttttctataaatggtgttgggacaactggatattcatgtgaaagaatttagactcttatcttacatcatatgcaaaaatcaactcaaaatggattagacttaaatgtaagagccaaaactataaaactcttataagaaaacagggacaaaatgtcatggcattggcctgagcaacgattttttgtgtaggactctcaaaacacaggcagcaaaagtgaaaatagacaaatggaattgcatcaaactaaaacgtttctgcacagtcaagaaaaaagaaaaaaaaagagtgaaaagacaaactacagaatgggagaaaatttttgcaaaccatacatctgatgaggggttaatatccaaatatataaggaatacaatccaatagtaagaaaggacaaaacctgaattaaaagtaggcaaaagatccaaagaaatctttctcaaaagaagacataaaaatggacaacgggtatattaaaaaaaaatgctcaacatcactaatcatcagcgaaatgcaaattaaacccacaatgagatatcacctctgacctgttagaatcgctattttaaaacataagaaagataataagtgttggcaaggatgtggagaaaagggaaccgttgcaccctgttgataggaatgtaaattagtacagacattatggacaacagtatggaggttcttcaaaaaaaataaaaatagaactaccttatgatccagcaaccctactactgggtacatatccaaaggaaacaaaatcagtatattgaagagatgtctgcagtcccatgttaattgcagcatcattcacaattctcaatctgagtgtccatcactaaatgaatggataaaaatatggtacatttatatacacaatgggatactattcagcctttaaaaagaatggaatgctgtcatttacagcaacatggatggaacaggaggatattgtgttaaatgaaataagctaggcacagaaagacaaatatcccatgatctcacttatatgaggaaggtaagaaaagttgaactcatgcaagcagagtagaatggtggttaccaggcggtggggtagggggagggagatagggaggattttgagaagttggtcaaaggatacaaaatttcagttagataggaggaaacattcatgaaatctattgcacgacatggtgactatagataataacaatgggttgtattcttgaaaaatgctaagataatagattttaagtgtcctcacccccgaaatgatcagtatgttaggtaacgttaactagctggatttagccattccacaatgtatacatatttcaaaacatgttacttacgataaacacgtacaatttttacttttccttatgtacgtcttcatctggctgttcatttttatcttttatactatcttttataataaactggcaatagtaagtaaagtgttttcctgagaaacaacaaactggaaacaactgtttagcaacaagaaactgcctgaccaggtagaaggacgtggtagctctgtatgtattgatatggaatatagtctgagataaattgtttaggaaaatgaaaagcaagttgccaaagaacccacagtatgatgtcatttatgttggaaaaaacgccacaacgatgtgtgagtgtgcacactgaatgaaagaaaattctggaaagaaactaacggccagcagtgtcacaagggggataggtagtttatttatttatgtgtgcgtgtgcaaagttccgtattgtaagaatttgctacagcctgtgttattataagctttgtaatgaaacaggtagaaactgaaaaagtttaattattcccaattcagtttaggttctgtctccggaagactttcccggattccccagcccccactccccaccccatcttaccaccccctctgccagctctgagtctcaattttcttttctgtaaggattttcatcatttaaccttatttcttctgaatgcactaaatggtagttatcctagcacttaagaggatgtcggaaacatggttcattgtctgacccttccgactctgacttgtatgagcacattttggggggaatgtaggagtcaggggaagaggagttccaaaaagagactactagagggtacagctgtcccggaagagacttctgaagagagcaaagcgcgtccgacgtttttctcgagaggcgccgaagttttccggaaagagacgaccaactgagaggtgggcccccaaagccggctgcgagagtcaccgaagatttccggagagccaaggagtcgggaagagccacttactgagcgttgccgaacgtgtacggagatagccgaagaggcggaaggcggggccacaagagcccttcctgcagggaacctcaggcttcagagagccgaaaagttgggaggcgtaaccacttacaggccggaagtgtccggggtggacgcattcgggtagccgaagaagtcccaggattgccgaagaagtcccaggatttccgaagcgagccgaagcatcgcgacagttttcagagacagctgatcggttggagctgttgcgccgagcagtcatggcggcggccagagctactacgccggccgatggcgaggagcccgccccggaggctgaggctctggccgcagcccgggagcggagcagccgcttcttgagcggcctggagctggtgaagcagggtgccgaggcgcgcgtgttccgtggccgcttccagggccgcgcggcggtgatcaagcaccgcttccccaagggctaccggcacccggcgctggaggcgcggcttggcagacggcggacggtgcaggaggcccgggcgctcctccgctgtcgccgcgctggtaaggtgggccgggatcccggcgtgggcggccccgaggctctggggcctgggcgggtgagggactcccctgcgctccgaagctggatttccctcagtttctccttctgtgccttctgcggtgtccggcctttcggaaatgttattctttcatcccttttttcattcgttaagtcttaagaaaccacgtggccatgcagcgtcaagcttttgtcctgaggccgttctgcctggttcaaatctgggatctgtcattattgctcaatgttgaacatgtttaacttccctgagccttggtttccccatttgactcgtttcaattttcgatcattatctttccatttattagttttaagaaacatgtaatgacaagtacttgccccactggagccaggctccctgggttgaaatactaactctgctgcttgtgtagcctttcaacaagttatttagcctctcagcctcggttttctcacctgtaaaatgggagacatagtagcagtatccatgtcatagggatgttgtgaccattagaggaggtatgtgtgtcacgtattatgttcaaatgtgtgcctggcacatagtgcccaataaatgttggatttcattaaattgcctattttttcattaaacatcattgtgcgccagcaccataaactttgtcctcagatgagaaagtgacactcagagagaagtaacttgcccaaggttacacggttactaagtggccggtccaggccctcagctccttatgcctctgactcagaagccctgg

SEQ ID NO: 8961 - DNA, 6000 bp, Homo sapiens
tcctcagggggacagaactaataggatagaggtatatatgaaagggagtttattaaggagaattgactcacgcaatcacaaggtgaagtcccacaacaggctgtctgcaaattgaagaggaaggaagccagtagtggctcagtccaagtcccaaaacctcaaacgtagagtagcttacagtgcaggcttcagtctgtgggcaaacacctgagagccactggtgtaagcccaagagtccaaaagccaaagaacttggagtccgatgttccagggcaggaagcatctagcatggaagaaagatggaggccagaagactcagcaagtcagcttctcccaccttcttctgcctgctctatttcagccacactggtggttgattggatggtgcccacccacactgagggtgggtctgcttctcccagtccactgactcaattgttaatctcctttggcaacaccctcacagtcacacccaggagcaatactttgcatccttcagtccaatcaagttgacacttagtattaaccatggcaacattcctcaggggtttcactgggtagaggagctgtgggtaggctttggtggcaaactggtgatcaggattaggaaatgagtgcaagggaagagaaactgtcccataacaaacttactaaaaagtttgtagagaggattaaaggtccacaaatagccaagtgtgccctaaaaaagaacaaagaagagagacaagggctacaggcactaaagctcactataaagccatgctaataaaaacaggaccacagtgacataagcacaagaagcccaatggagcagagtggggagtgcaagaggcttcatatgacaaaggtggcccacagatcagctggggaaaggacaagttatttcataggtagttttcagaaaactagccagctatagggaatgaatgaagttggctccctaccaaatcacacacacacacacacacacacacacacacacacacacacacaattggttaaagacctaaagtaaaaaataaaaatataaaattaataaacaaaactgtttgcaacttaggggcaggggaggactcaaacaaaaactttaaaagcacaaactatacagccaaaaatagattatcttgatcactttaaaaagatttctgcttaataaaggacaccataggcaaagttaacaggtaggtgacaaagcagaagaagatatttgcaatgtctaaaatccacaagggacttaaaatctgcattatacaaaggaatcctgcaaatcatcaagaaaaaaacaggaatcctgatagaaaaatgggccactatgtgcacaggtgatatttatacaagagaacaataagcatatgaagagagtctcagactcattagtaatcagagaaatgcaaatttaaatatactgagatgttaccttgtacgtgttagactgtcaaaacctacatatctggataataccaaatgctggctgggatgtggagctgtaggaactctcaagcactgctggtgagatgcagcctggaacagacatctgtagggagacttgggtgtgcttagttaaattaagtgcaacatactctgtgatgtgtcaattctgaacctgcaggaaatgtttttttaaaaaatcatcacactggctcataagcagacacatgggaggatgctcgtggatgcattcattgtggtggtgggagttggaggtcttctgggtgaccacatagcgggtggacagtggaaaggggacttgtgtcatcgtgaacaactgtgcagctattacaagcagcaggctgggtgtacccacagcaacgtggatggatcttagagaaaaataaatagaatgtgatgtataacacaaaccatatatgcaagttttaaagtgcacacaaaacaccaaacacagttttcaagaactcatacaaacaaagcaatatacaggccgggcgcagtggctcacacctgtaatcccaacattttgggaggccgaggcagaaggttcacttgagcccaggagttttaggttgcaatgagccatgatcatgccactgcactccaacctggatgacagagtgagtcccgatctctaaaagcaaaagcaaaaacaaacccaaacaaaacaatatacggttgacacatgacaaccatttcctatgggctagtgggaggggaatgcagataaaagggaatttaaaaatgaaaaaaacaatacagaagaaaaacaagtaacaaggttttctgtctgttcctggccttggcaagagaggtgtgtggctccacgaggacagggaccatataaattactcaccctcaattcccagcaccaacacccatgctgaggcacacagtagatgctcagtaaacatctggaatgattccattaatcaataaatgaactgatggagaaaggactttgcagagaggctgctctggtatttggatagcccgttgattttggagtcaaacaagagattcccatatctggttgtgccagcacttgccagcaagatattgggcaagacaccttctctcggagctttagcttccacatctataaataacctcatctcttatttacagatgtggaagctgatggatgttataccttcagaggactacttgtagtaggtgcccaacaaacatgcatctccactccttggttatatggagtagagaagaaccgcacttctaggtgttattttagctgtacctggaaggcaccgtaatgcctgcagtaatgcctggaaatttcaccattatagagtcattttttccctctcatcaggaaggatttattgctttctgaaacctcctgtgggaatgcccagatctctggagaaaagttgccttcaacagattaggcttacagaggggccagctgagaaccctttctgaccctaggaacaccagactgaagcaggagggaatgtgattgttcactgtctctcacaccccaggtcatttgcacttgctgtttcctccacctggaatgcatttccctcattctccccatggctagtcccttcttatctttcaatctctattaatctcctctgagacacccttcctgaccaccctgtgtaacactagcagcttggtctctctttttccaccccatcatgatgttccatttcctttataacaatcactgtagcctgaaactctctctttaaaaatttacttttttagttacctgtcttcctccactggtctacaagctcagaaaggggggcgggctgaattagggcaataggccagaagtttaggttttagtctaaagcaagggaaagtcttgggaaggttttaagcagatgagaaacatggtccaacatttcatggtccatgaaatgtagcagttgttttggtggccatggggagaatgaactgtaggaggccaagatgggagccaggcatgggagccagggatgaggccaagatgggagccaagttgcagggaggttgcagggagacaagacgatggtaccttggacaagggtcatgatggtggagatgataagtggacaagtaaaaaatatataataatattatgtgcaactctatggaaattatggaaatgaaccccttaattttagaaaggaagaaaagggccagagaggaacctgtgttggaacactgtatcttgttcagtttttgtcctccagggcaggggagctcactgctgtacccatccccggcacttttttttttctttttttttttttgcaacagggtctcactttgttatccaggctgaaatgcagaggtgcaatcacagcttatagtggctttgacctcctgggctcaagtgatcctcctgcctcagcctcctgagtagctgagaccacaggtaagcagcaccatgcccagctaattttttattttttggcagagatgggtctcactatgttgcccaggctggtctccaactcctgggctcaagccatcctcccgcctcagtctcccaaagtgctgagattacaggcatgagccactgtgcccggccgctgacacctatttacttatcatgcagtaaatgaatatttgaaagaataaatgagtaaacacaaggcccatctgtggcatccttagagaacccttgcctgcctctccaggtacctcctccagttttcatttctgggattatgtgatgggttttgcctcccccactggatggggagctccagggggaagactttcccttcacggagcctggcattctgcttgcacataggaagctgtcaataaccagatgtccaacttaacatgaataaatgaatgaatgaatgaatgaatgaatcaccagactatataaaccagctcactcttcaccctctcttccccatacctcgctttatttttcttcttagcggttatcaccacctgccacattgcatatgtactgatgtattcattgtccgcctccgtcccccacccccgaccccccgctaaaatctagaatggaagctcatgaaagcaagggctatttacagttccgatctgccccctcccaccctctgacccttcctcctgtttcattatttcccccagcgcttgtcaccgcctcatatatcctttcgcttttttgtttatgatctgtttccaaccagctccacgagggccggatgtttgtgtttgattcacagctgtatctcagacgcctgtcaccgtgccctgcaccgcggctcgcgcacaggaggcgttcaacacacgttgttgacgggacgaaggaaggcgggatcgcgaggccagctgtgcaggtggcctgggtggagagggatgcacggccacgcgcgtctccttggcccgatcccggagcccgcccccggcctccccggcaggctgggccgggcaggcaggagttaagccgcgctcgcttccgacccgcaggtggcgccgtcctgccttggtgcccggctccgggcgctccgaagtgcgggacagaatagcagcgagcgcggagccgaagctcagccccgacttgttgatctcgcccaggcagccgccgccgccgccgccgcgggagcaggaggaggaggaggtggaggaggtgccgcgcggccgcggtcctgcccccgcgcccccggcgcccgccggcgccccccgcctcggagagcgcgccccggccccgcggcgcctgcagcccgggcgagttgcctgcccggccggggtaggcccggctcagcccggccccgggaccgccgctgcccacgggcgggggcgcccgggcggccgggacgatgcgcggtccctggccccaggaggcggccgccctgggggtgagtgttggggcgtacggccttccgtgggggtgcatggggacacggacagggggtttgcctgccgcagctcggcctgttggtctgctcgggctccgcagctccaggctggaggggagcggggtgggaggcaggcaagggctgaggcctgaggggacgcgcaatccccattctggggctaaggcgtgagccctacatgcagggggtgctcaggggaaccccccgaaatcactagtgcgcggtaggaggatggcaccttttgaaaaggccagaaaatttagctcatttccccgcctcccacctcccccaccccttcccttccaagcccggggaaaggcgcagaacccggagttataaaaagccatcgcgggagaggaacgaggaggaggagtaggaggaggaggaggaggaggaggaagaggaggaggagggggagaaggaagaggagggggaggagaaggaggagaagggggcggggaaggagcgaggggaggacggagcaggcggatcccgaggactctgcccgcccctcctgcggtagggttgggggctcagagggagaggcgagagcgggcttttcctcctcgcggctcaccttgtcgctggagcaatctcaggagatgctccagtgtttgggaagaggggtcgctccaggacagaggggctgttgtgcacaccccgtctgttgtgacctcggacaggtgggcacctggaacccccggaattc

SEQ ID NO: 8962 - DNA, 6000 bp, Homo sapiens
gtaagtggaagaatttattcttgcattgttccagttttagacggcagctgtgcttcctttcgtagctgcagcagccatgaaaacacacctctgggacctcccttggtggagcctgattgacagatatgccatgcttcccagggtttgctcctagccaatcactgggggaagcagacttgttcttgggagacatagggctcctcaggaggctcaaggacaacctgttagccttgaactaacttacttactttctttttctttctttcttttttctttttgacagagtcgctctgtcacccaggctggagtgcagtggtgcggtctcggctcactctaatctctgcctcctaggttcaagcaattctcctgcctcagcctcccaagtagctgggattataggtgccagccaccactcctggctaattttttgtatttttaatagagacggggttttcaccttgttgcccaggctggtcttgaacttctgacctcaactgatccacccacctcagcctcccaaagtgctgggattacagacatgagccactgtgcccggccagacttgacctttctaagaatgcactgcagcccacggtcccttctttcctctgtcccttccttccatttgtcctcctttctgtccctttctcccagccctctctggctccctcttcattttactccctggcactccctcaataagcctttagtatatctcatctcatcttggctctcctggagaacctgctcctaaccgatttggaaaaatcaaaaggtagagaaagagagggcttccaggcaggtaaacagcatgagcaaaggtgtggaggtgggaaggcccagggtgtgtttgcagcaccagggagtaagttagcttgtcctaagaagccatcaaattcccatgctctagcttatcaaaggaagtactacgtgaccttgggtgaagtgactctttctggaccttgatttcaccatctgtgaattcggaataattttactacccattttataggttctttgtggggaataaataaattattatgaaaaagtgtttcagatggcttcagttactaactaaagttagaactattgttacaaaaaaatatttaaaactgcccctctctgttgagactggtttttagccttgaagaaggcaatacacataatattttcctttccggacacagtttatttgtagcctttaggatgcagacatgaatcagacctgatccttggaagagagaaagcaggggtgtagggtagaagggctccctttcccaggcaaaattccctgtgttctaattgggttgggtcttgacattactctcacaaccccacagtggccacagaagagagcagaggcttggtgagatgggagagttgcctagatgtcttgtttctactggacagtgaacatctgaacacactgaggctcctacagggaaatgtctggatgttcgtccctgggagaataaattttcccgggggtccagtttcccttccccagaggagcttcccttccccagaggagggcttagatggcacacttggaagctctctcggtggctccctgctatcaccactaccagcaacatgcccattgcacaagtaaagtagttgaggctcacagattaagcgacttgcttaggtttatatggaaagcaaaacttgcttttcaaatccttgcgtattccagcccttttgccatgggctagaggggtcttccttgggatggtcttccctcatctttattctgaggccatatcagctctgtcctcagcagggtcctttgagtcctcccggggcaggggaattcggaatttctgctattttcaaggcctgcctgttcctccaagatgccatagccagagggttggatgtcctgtcagcctgataaacatagaaagcttacacagtaagcaaagtaaaaataataaaacaaagcaacacttttgaattctcgcatgggccagtcctgcagaggtgctccggatgcatcattgcctcatttggtcctcccttcagccatatctagaaggcgtctcagttgggaatgtctttggctgcaagtattagaaaaatctgactcatggtgtcctagcacagacgtgtggttagctcattaaatgagaaatctataggcaggtggttccagggatggtgattccgcagctctggtttggggctctgcagttttcttggccttccctcataacactacagcccccctcagctcccccactaatcacattcccacacgattgcccccaaagcagaagagaaggcaaataggaaggaaacacatttttctagaagcccgcaacagatatctggaaggtgcccacctcaggacaaatcactagcaaaggtggatttcctggaccagctcagacccatggtgggtcattctctgggaagggggcctggccaccttcctaaacatatgccgactcctgaacaaatccaggaagaaccagaggctcacattcatctccctttggtgtgtgagcagctgcctctccttccctgggaggattttgtctatgggtcgagaagggaagagagtatctggaagagatatttgtattgaggtgatattggtctgcactgaagccaggggtggggagtagaagaactaatatttattgagtacctattgtataccagaccctgtgctgggtgatttcattctcttttcatttaattcagttctcaaagcagccccatgaggaaggaactgttcttcccatttttcagatgggaaaattgagaccaagcctgatcacagataatggagaggagcggaactggtataagcgctaattgcggttaactttccctgatgctcatggtgtgacaggcactcacataggtgtgccccatggaccaggtcgtttgttcctgacctcaactccatgaggttctcttttccccattctgtcaatgaggaacctcagcttagggaggtggagcagtctgcttggggtcacaaagctgaggatcggccaagcccagctgtgaaccccactgctagcagacagccctttggagctccccaaatttggagaaaatcctctggacccgttctatggccttcttgggattgttggcttctctggcagataagctggaaaaataaacaagaggatcagaaaactccttttgcctcctgctgttctgaatctgctgaggccacaagggggtcatccagctgcctcgacagccaacattaagcaggcaaatgaatgaatcttgagtatgatagcaggacatgtgaagtactgccagaaaaaaaaactatcaaaaaaacaaagaaacaaaaatcagtaagaggagatgactgttttagaccaggtggccaaagacagcttctctgcagtgacagctgagcagagatagaggcaccggggaggtggtggaaagagcaggctgtgcgaagaatgctccgaacagagggaacagcacgtgcaaaggccctgcagtgggacctctagggaaagatggggagatcagtgtggctggagcagagtgggtgagggagagagtcgggggcatagggtcaggcaggtaaaggtgagaaggggcggatcatgctggttctcgaagggccttgtcaggaccctggctgataaggatggaagccaggagaccaggaggagcaacagcttctccagagctctgctgggactatggaatgaaacgtgcctaagctcacccggcactgaatgggtggatacaggactagaacaagacctcctgggtcttacctccaggttcagcccatggtttcataaaacttagtgtgccaagcactcaacagtttgtgattccttttagtgtcaagctctcatcacttcctcacaacagccccagaggtaagcacaactctgccctccctgtttccagataatgaggtgagctcagagaggttgagctacctgcccaacgcttcccagggtgggaatggggatggtgggggcaggggcgtggagtgaggctggattgacccccagttctcatcagcaccctggggtggtacattgcagagccgcgggcacagggggctggcaccccaagcaccaggtagcgatgacaatggccaccacatccggaggccctaacgtgcaccaggtagagggtgcatacttcacgggcactatctgtccccaaagcaggtgaggatgaggggactccctgagacacccttgtaccccctgcccagtagttactgaagatactatagggtgcgatataatccagaccagccctcccagcccagaccacagaatggaaaactccaggtccccagcacgcctggggtgggggatggggtgaggaggagccttggggggtttcctctgtctaggtggaatgtggaatgtggtgggaaagctcctcctgacccccttacactcctcctccatgttcgtcccctcccaccacattttctcctcccactgtgccccctcctccccatacctccttggctgtttccccatcgtcccgccgtcttcccacattccctcctcttcccttccccaaaagtcctctcccatcttccccatccctcttccctccccgcatataatctcttccttcctgtaaatcctctccctctcccctcccttccatcaccccccagtccaccacatccccctcagtcccccatctatctcctttccccttgatcactccccagcccaccacatcccttccgccccctccccctccccctccttctcccctcccctccctcccacattttccatcaggcctgagctggggggagcagggtttctaacagagcgccccggtccgacccctgcggacctcggagggccccatcccccaccccccccaccccgccccaaagcgggctggggtgggcggagtgggaggggcgcgccgggtgggggcggggaactttacctgggagtgggccaggccgccagccccgccagccccgccagccccgccagccccgcgatggcttgggccgcgctcctcggcctcctggccgcactgttgctgctgctgctactgagccgccgccgcacgcggtgagtgtcctgctccgctcggccccgccagacaaagggggcggctcccgcccgggctgcagcccaagggtctcggagcccgcggccggcccggcccgagtcccgctccagtatcccgggcaaggcgagaccctcggaggtgggagtcccggggccccgcacgtgggtgagggggccaggccgtgctccccctgccaagaaggtgcaaggtgggaaggtgcggggtccggtaggtcccccggggcgaatcgcccaccgcgacaagtccgagtctggcccttagcgcgacggcagggacctaggagggggtttcaggtgaggaccgagggtttgtgggtggggagccgtgcggggacagcctctgcgtggcccgggtggaagaagcgctctccactctccagcctctgcctgcacctggcacccacctacgcgctgtcaaaccctgccttgctttcggcagtcctatagggatagcctcgctcctcaacccattacacagatgggagtgttgagccagcggagtgtagagcccctgggggatgtcttgatcatgccctggaaccacccaccccgggattccccgtctggaagacgggggtcggtgggcttagtaatttcatttgccagggagaaactgaggcctatgaagtctctaccttcccctgaggtcccacagcctggacagaacggagccagggtcagatgtcacagcctcctggtcccaaaggttttccagctccattgagcatctgtgatttaggagaaaaagtaaagacagcctcaaatcaaggagatagctgtagctctccttttcataaaatattttttaagttaacttgaattgcataaggaatagctgaatacattcgacttaacacaaatatttatcctgttataggtaagaccgaagccccttaaccctcccccagcccctgaagtc

SEQ ID NO: 8963 - DNA, 6000 bp, Homo sapiens
tttttgtatttttagtagagacggggtttcaccatgttggccaggctggtctcaaactcttgacctcaggtgacctgcccatctcagccttccaaagtgctgggattacaggcatgagccaccatgccctgccggattgttttctttatgtgtgtgatttcagctagcctgcaattgggtgttgacaagcacaagaggcccaacctgtgctctcctgagatttcaccaaggacctccctttctttaggccactcccctgcgctaaaaccttcaagggctctctatggctcagaggaaaaagttaagaatagtgatggctcccatggattgagcacttcctacatatcaggccctttatagagatactatttgtaatctgtgcacaatcctagaaagaaggaactgtctgatctccattttacagatgcggaaatggaggttccgagaggtgaagtgacttgccaagatgacagagtgagggcagggaggaaggaagactggcagccagatccatctaattccagggcccatgctgagccacagggtcaggcctcactcctccagcctcacccctcacctctttcttttccttggcaggactagctgctccaaccaggcaggcctcttctcactgccccttgagcaaacctgtctcaatgtcccttcaaagaccatctagaatctcacagaacaccttttcctactgccagccatgctgagtcctgcccttatgacagtgtccctcagttagtcactttcctgtagctcatatgtcactaggctgcaagaatgtcttagtcatctttgcatctgccatgcccagcacacagtcactgcacacctgtcgtccttcaacaattattcagcgcctactggctgctgagcactgtgctaggtgcaaggatacagcagagagtgaaaccaaatccctgctctcgtgaagtttacattctgatctgggagaagaaaatgaacaagtaaacgcgtatatgtatagtagaatgtcaggggataaaaagtgctatggagaaaaatcaagctgaggaaggctatggatagagagtgctgggatggggagaagaaagctactttagaggaaaggtctttttgagacggtaacatttgagcagagattagaatacagtgagtttgtctgaggagctgaatagtcaaatgaatatataatgaatacatgctttagtgagttggaaacctaacttggagatgaaaaagtagtgtggaggaaggagtttgaggtagggatccctggatactcctgacatacttctttttcttccatttaaaaacataaactgccggaggcggtggctcatgcctgtaatcccagcactttgggaggtcgaggcaggcagattacctgaggtcaggagttcgagaccagtctgaccaacatggtgaaaccctgtctctactaaaaatgcaaaattagccgggcatggtggcgtatgcctgtaatcccagctacttgggaggctgaggcaggagaatctcttgaacctggaaggcgaaggttgcggtgagcagacaatgtgccattgcactgcagcctgggcaacaagagcgaaactccactgaaacaaacaaacagacaaaaaccataaccagtttatttatttatttttgagacggagtcttgctctgtcgcccaggctggagtgcagtggtatgatctcagctcattgcaacctccacctccagagttcaagcgattcttgtgcctcagcctcccaaatagctgggattacaggctgcctgacaccgtgcctggctaatttttgtattttgcattttttttttgaggtggagtctcactctgttgtccaggctggagtgcaatggcacgattttggctcactgcaacctctgcctctgcctcccaggttcaagcaatcctcctgcctcagcctcccgagtagctgggattacaggcacgtgccaccacgcccagctaatttttgtatgttttagtagagatggggtttcatgttgttggccaggctggtctcaaactcttcacctcaagtgatctgcctgcctcggcctcccaaagtggtggggttacaggcgtgagccactgtacccggcctaaaacataaccaatttattttgatgccttgttatttcagataggtcagaaatagagactgatcattggtacatagtttaaatgtaggaaggtttctctttctctgtctatccagaacagactggatgttacagaatgttatggtataattgttaattctcttagtattactgtggttttgaaggataatgtaattttccttaggatttgctactgaagtattaaggcatgaagtactagtaaggcaacaacttacttttttttattgtttttttgagtcagggtctcactctgtctcccaggctggagtgcagtggcgctatcttggctcactgcaacctccacctcctgggcttaagagatcctcccacctcagcctcccaagtagctgggactataggcacacgtcatcacgcccagctaattcttttgtattttttgtggaaatggagttttgccatgttggccagactgatctcaaactcctgagctcaagcgatccatctgcctttgcctcccaaagtgctgggattacaggtgtaatcgcccagcctacctttaaatatttagcaaaaaataaaaattttcaacatatgaatatagatacatacatgtggaaaaatgataacaatgatcaaatccaggtggggagtgtacagatgtttcttgtactattctttcaacttttctgtatgtttgaaaatgtttcatagatacgagggttgggaggggccattgtgtgggccaacaaaaactatttgcaagttagatgattccggctagtctgggatttctggtccagggccttacctgcactatttcatcgaatccacatcacatccccgtggggtgggcagcactgggtccgattcacaggtgatgaatagagaagctcagagaggtaagtgactttcccagagtcacacagccaggagatgccaagccgagatttgaactcacatctatctgagtcaaaattctctgctttcctttttgatcgtttaagcctcttctcttccaccataccattctccaggggtattgaattaggtgacagctaagcactcttactatgtgcactttgcatgtattacttaaatcctcgcaacaacctgatgaggttgctaataacctcctccattttaccgaggcacagagagtttaacttgcgtgaggtcacacagctaacaatggaaaagctgggagtcagagaacctgggcagtgtggctctagactccccacttaaaggatcaaagaaacactgtaaaaagtagaaatcactttaggaatataaatcagaattattgttgattctcacagaatccctgcaaagtcctctcccctccccactgcttctggcattccaagacagtaccctagtttcagatatgtctacacagggacactggcctcctcagtccagctccttgaggctactgcttcttgccataaatttctaggactgttcattgccttctgaggtcctttgagctgatgctgatctgaaagcatttttttggatatggtcccatacccaggtgatggggataggataccgatttgcctgcaggataagaattagaggtcatacagactgctgagacagttacaacctagaggtcaagggcctgacatgggagacaggccagttttgatttaagcccttactgcaaggcttgggtgaattgcctttccatctagaaacctcagtttcctcatttgtatgatagtaataataacagcacacatctcaagactggtgggggaatttcatggcatgagtgaagtccatgtttctcagcagaagtctagagacattgacaattgttatcattatgctatttctgatacagtaggatccctgactacagctccaagctcatccctatttccccccctacttcactggattttatccatgttggccttggattcaactcgggggcagatcagcccttttcctacctcagggcctttacacctgctgttccccctggtatgactgctttttccccagcttattcaaaaaagctggcgctttctcacccttttatatctcagttcgtgtcactgctcagtgaggccttccttgaccactccagcctgcctgcaatacatcctcctgttttatcgtattcatatgtgttaccagtacctgatattactagctgatttgtttcttttatctctcacataatgtaagtttcaagtagacagagatttttatcgttttttttctctgtagcatgcccagcgccaacaactgtgtctggcattcaataaataaatggtgaattgaatgaatgaatgaatgaatgaatgagggtgtataccaggccgaacccccaagccttgcagtccccactcttctgctgcagtgggcaacgagatgagtcagactttgtagatggccccttggcccccgagatgggggacgagctagcgcggagcacttgggagacattccccgaaagcctgggcggtggccgcactgggagagggtctgtcgccatttggcgattactccatgcgggctgctgtgggcgccgagcgagggtcggcggcgagcgcaagcgcgcgggtcttttgcgacggtgcccggcggcactggccccgcctcccgcgcgtgcgccccgcctccgcccccgccgctgcgcccgctcggggccgctctggcccccgcccgcttcatgtggcccggcccgcgacggccggcggctgggagcggcgaggcggcggcggcggcgagtggcggcccgcgaggcccgggaggcggtggccgaggcccaggcggtggcggcggcggcccaggaggcggcggacggggagctgcgggagcaggcccggcctggctctctagcggccgcctggctgcagcatgcgcgcccgccgggggctgctgcggctgccgcgccgctcgctgctcgccgcgctcttcttcttttctctctcgtcctcgctgctgtacttcgtctatgtggcgcccggcataggtaggaagggggcttgggaccgcggcggctgccgctctggccttgagggacccggggaatccccgcccctccctaaggggccccggccgggaggcggccctgagcctggtcctccgaagactccggagtcctggcccggctctcggggacgccaggacattcctgccctccgcaccccaacaggcgcccgggatccctctcccgcgccagcctccggcccaccccgcccctcctaacgccaccctcgcgaacccgactgtaccttcacgcccgccccttgctccggaacccccttcccgctcttgcctcgctggaactcccacttcccgctcctctgctcgagaactcccgcttccccttcccttccccggggtctcctcgaacccccattcccggcattccccgcaccccagtcccccgcggcgcgcccgctcttcgccgagcccatgtgcccgggtcccaggccgccccaccttctagctcccatccatcctcccccactccccatgactccatcgtttcctgctcccgtgagccccctccctcccctttcttcctctacttcccctattacatccacctccaggtcctcctccctaactcacgttcacctcttcagtggcctgatctctctgcctgccggtggcaccccccttccccttacagaggtccacccccattcaatctcctgctaatcccctgagcgtcccatgcctcttccccatctcccccccccccacctcgcgtacccacaagggcacatccttgtcacctttgcccccagccccccagactttcagccacagcttctttctcaactgaagacctggggaaggggtgctgtctgtgttctttcttccacttctgccctctcctagccttgagggtagatggtgtgg

SEQ ID NO: 8964 - DNA, 6000 bp, Homo sapiens
ttcaggttttgggtttaatgtcatctctgaggccttccataattaagctattcaaaacagatcccctcccccaccctaatatgtcacagtttcatttcttttatggcacttatcagtaatttacttatcaccatttaaatataaactcctctacaacaggaaacctcttgctcatttttattccagaacctagaagaactagtacactgaaggcatttgatgtttgttatgaaaaggaaacaacaaaaaaatcaagttcaggctgggcatggtgcctcatacccgtaatcccaagcactttgggaggctgaggcaggagggatgcttgagcccaggagtttgagatcagcctaggccacatattcagaccccattgctaccaaaaaatttttaaattaaaaaatggctaggcatggtggcatacaactgtaattcaagctacttgagaggctgaggtgggaggatcacttgaacccaggaggttgaggccacagcgagctgtgatcacaacactacactccaccctgggcgacgaagcaagacttcgtctcaaaaaacaaattatgttcaaatcctatctcaccataaaaacctagctacaatccccagagaaaaccaaatttcaaatactaatatatgccaggtgcagtgactcatgcctgtaatcctagcactttgggaggctgaggtgcacagatcacctgaggtcaggagttcaagaccagccaggccaacatggcgaaaccccatcgctactaaaaatagaaaaattagccagatgtggtggcaggtgcctgtaatcccagctactcaggaggctgaggcatgagaatcacttgaacatgggaggtggaggttgcagtgagccgagattgtgccgctgcactccatccagcctgggggatagagcgagactctgtctccaaaacaacaacaacaaaaaacaaatactgaaatagatctgggttgtgtactgggtatctgttatattcttaacagcccatcttttgaaaaatatttcactatttgggaaaatcccacatcatgagttctgtcttcctattgtagatatcaaaacacaaattcccagcctctcttgcagctaagatgtaggcatgtaattagactctgcctaccaggcaccctcataaggcttgactcagaaaagaataatgtagtgactctgtttctcgacacatggactgtggctgaagtgttgggctttctgggagagttgggggggcacgtcaagtgaaactggtgagactgtagtggcgtttcctccggtacttgatagggcagcacaacatagacactgttctcctaaggccagttttgtgcatgatttcgggcatcattcctagaagtacagccttgaatctgtccccaaaattctcaaaagcacctcctatcactttagtaaaccttttaacacttagctagtcagcttctcttgcctgtcccctgtgacaaccaggtttataggaactacaactgtctataactttaggacttcagtctttagaatatgaaattgttcctgtgtgtcgctatttgtttcctgctatgtatcagaatcagttgtccctggaagaaggagatgaaaaacacaggccagccatctttgttctccactccaggtcacagtcatttacctccataactcgttggcaggaacagtcataagagacctgcttcatctttataacagaagggtataccatactttaagtatacctgttcaaagaattagttacaatgtttcacagttaaaaagtgatgactaattttgaatttgttaaataccaccctcttataataaaacaagattctatatcacaaattgcaaactggtaagtaaatctggtctacaaagggtttttgctggcttatgatacatttaagctttaaaaaaaatggttaacagaaatacaaagattttatagttgtatctgtgatttctgccattcttaaaaaaacaacagcagcaattgatgattataagcctgcatgcagcaagcaggaggtcacaggcccccttctgacaagccattagttcatctggccactgataggcactcacaaatcaaatttttacttataatgttgttgtatatattggaagttggtgagactacctactattttatgaaaatgttaagtaaacaaacataaaaacattttacattagtataaaatgctggaataaaaaaacattaaatcaaaagagaaaaggcaaattaaagggggagaggcaaagggttgggactttgacttgaaaattccaaagcaagtcaaaccatagtatgcaatttaaacgatgtgatatgtgtgcaacataaggtggaccctgaagttaactttaagaaaacagtagcaatttataagagacactgacagactacaaaggtggtttcctttattttggtaaactttaaagatctcgggagggtgtggtggctcacgcctgtaatcccagcactctgggaagtcgaggcaggcggatcacgaggtcaggagttcgagaccagcctgacaaacatggtgaaaccccctctgtactaaaaatacaaaaattagccaggcgtggtggcgtgcgcctgtaatcccagctactcaggaggctgaggcaggagaatcgcttgaacctgggaggcggaggttgcagtgagctgagatcgcaccactacactccagcctgggcaacagagagagattccatctcaaaaaaaaaaaaaaaatctcattttgatactaattcaaaaggccaaatagaatgaccctctttctgaataattaaaacaatttacattttaaacatgtatttctgtaggatgtattctatcatctgaaatattaataagatccaagaatttcttaactgaacagtaaacagatccgaagtatataatctgtgaaaatgatttagaaagcattttgactgggggaggtggaaaataaggacatgtaaatgatctgcagtttaaaatgcaaaatcctgtcacgttacatctcacatgtccaagacatcctccgtgtgctgaaaaaaaaaatgatggttctcagaaacggtataatccattaataagtcattcatccaatacataacaatttttaaaactccttataaaaaggagtccacgtattcacagatactgtagaatccccagctcctatgtatattaccgaaaaatgcaaacaagtgtatctttgaggtattatggcaatccacatctttctcatcagactataccagtcacctcagtactgtggaaatgttccatcgattttggcagcccaggccatgaggccccccacaacatcccgaactgttaaagggtctaactcttgagctgctgataaggactggaggatcttcacggctttctgtgagtcatttcccagtttgcaaatcacataaatggggacagcagccccttcttgtgtgccctgcttctcttcccagattgcttcttttaagagtttcaggctctccgcatccctgcgttccaaatgtttcagagggatgtgtagggcatgaggcaaacgacaaatgtccacctccacctgaggcctgacgtccagcaacaggtggaatgccccagaatccagcagtcgcttatagtcggtgacagaaacacgctcctctgggctcagtagttgcagggagcggcatttatcagtggctgaggagccacagaaggcttcatagtccagcagatcagtcacagtgggccgttccccgcaagctgcacagtcgagcctgcggctccgcagccgaatagagcggaaatgccctctcagggcatcaaagagcaacaagctgccactgtaagaggggcccagacccgcagcgattttcagcacttccaaggcctgcaggcagcccaggaccccggtaacgacaccgagcaccccgccgtccgcgcagttggtcactgtctccgctgggggtggttgggggaatatgcagcgatagcaagggccaccgtcataatggtagactgtgatttggccctcgaagcgcaaggcactggcagacacgaggggccgacccgccagcacacatgcgtcattaaccaggtagcgagtgggcacgttgtccgagcagtcagccaccacatcatatcggcggaccaggtctagggcagtggctggcgtaagggcctgagtgtacggcacgcattccactgccgaattgaggcggcgcagcgaggcggcggccgaaaaggccttggcctggccagccagtgcctcgccatgcagcacttggcgggccaggttgctcatctctaccacgtcatagtccacaaggccaaggcggcccacgccggccgctgccaagtactgcgctagtggacagccgagcccaccgcagcccacgattagcacgcacgcggtccccaggcgcagctgtccgtgcacgcccagctcgggcagcactagctgccggctatagcgcagaatctcatctcgggacagagcggccttcggcggcagcggcgacaccggaaccagccgttctggctgcggttcctgctcagccaaaagagccgacgccagcttctgcttcagcgaattcaattcctcctcacgttgggcaacttcagcttgtaaggcgagtacctcctcccgggaagccatggcgacctcttccggaagttgtcgtgaaaggcatttccgcttccgtcttctgtctcctagcgactgggataaactaaaaaactttatggagcttgggaaaaggtgatgaatagatatttacttcctgaagaaaccttcagattaaacttcaaagatgtataaatccagaatatttctaattgaaccacgcaatggccctagaagaactagcgatcaatcacacaggtcatcccccgcttccgaatttggtacggtccgacccgtccttttccgcgccacattacgtaattccgcttccggcatctggctcagttccgccatggcctccttggaagtcagtcgtagtcctcgcaggtctcggcgggagctggaagtgcgcagtccacgacagaacaaatattcggtgcttttacctacctacaacgagcgcgagaacctgccgctcatcgtgtggctgctggtgaaaagcttctccgagaggtagcgcaccaggtctccctccccgaagaatgagatgagctggcttccccggcccgggtgtcggcagctggctgcgcgaagcggccctgtccagccttctttgcctcacacaggaaggcccggggagagggccaccctgcgagggaagcagaggcggatgcttgttgggttttcttcgtgtcctgggttctcattcctgcccttgggttttgtgagactctcatttatctttattatgtagtactcccgtcccccgcctttccgtagaaaggttggccactcttttacttggaagcgaggctgaaagcgtgatcccactcctccctctaggcggtcaggatctgcggcaagagccgggagtccaagcgagagctctcactctccgctccggtgccgagtgcttacataagcatgaggtttggtgtgtgtgggttagggagctattgctgggcacgataacctttctggaaaggagaaagcagaagagcatcttcgctgatcactggtggatgtttggtgtgattgttagaaccgggatggggggtgggtggagttcgaatttggaagtgttaatgcagtgtttttaaaaactgcaaaaaatcctggagtcagtacgaagtaacttgttttacgattgcacaaatgggatcatgctgtgaaatctttgaagactttttctcatattaacatgtacaaacatagcaaattactttggaagttaggtaacattccatatggctgtgttatttatttaatcaggtcatggcaatgaactggattatttccagcgccttttggttgtttctgttttttggcttttgctttgtcgatgagaacaaggactttgttcacaccatattttccagctaaatttag

SEQ ID NO: 8965 - DNA, 6000 bp, Homo sapiens
agatcacctgaggtcaggagttcaagaccagcctggccaacatggtcaaatctcatctctactaaaaatagaaaaattagccaggtgaggtggcagggtgccagtaatcccagctactcaggaggctgaagcaagagaatcgcttgaacccgggaggcagaggttgcagtgagccaagatcgtgccactgcacctcagcctgggcaacaagaaagaaactccatctcaaaaaaaataaaaaaagaaaagaaaaaaaaagtaaggaggtgcccaaaagctcaatcatcaaggtaaataacattttgaaacaatattttttaaaaatcaaaattagtccacaaaaatccacaagaagcaaaatatcacattttaaaagaaagacttcaataaagtcacacccttgcatgcctcaacctcacctactgcaacctaaccccatcccagaccaggaatcccaaggtgacaatgggctgagacctgcaggaagtggctatatggaaatctgcgggaaggtgacaggatttggggaatcagaggaacagaaagggaaagtgcctggggcagagtgtctgtggagagagagaaggagaatgcccccatcccaatccctgccttgactcaaacaccagccttcaccccacagacacccagtgggatcccctgtccaaagagctaactccaaaccaagaaaatcccaccccacccaccactctcaacagattcctcccaactccaaccaaatccaagccttttcatctcaaggaggagatgggttaaaaaaaaatggacagctctggataacttttcctgccctggaaaaacagcccagaactttatggcttactgacagctggttatggatgggaaggaaggcatattcttaaactgctgacagtaactcccttttaaggtatttcctcagggccagcaatgtcacattctcctcctgcccgaaaaattaacagcagtttttatttcagtgacaagcttgggcttttgggttaggcaggcctgggttcggatctggctctgccatttaccgcgcaaccctagacaatctgccaacatgaaaagtcaccaactcttgcttccaggggcctggcagtaaccgagatggtatgatgtgggtagaggggcacaccgcagggagcagaagccactgcccagcgccagcatgctgtgtgggtaaaggatgttggccagatctcccagtgtttcaaaagaaaaaattttacatgaaatctcccagtttttaaaggtcagcaactaattttaaattaatttttaaaaattttaactcagtagggacaaataaaacaggtctgcgtgccagagtccacctccgggcccagttgtggctctgatgtcttcaaatcacccagcaaccacctggcacctcgtagctgcccagcaagcactgacggttcccattttctcaggaagcttccatgggtatcatcaacatctctttccacacaacagcttggggaaggatgcttttcaagaggaaaatgaagatatgaggagaagagtgaaaaatctggaaggctctaagggagggaggaactgcaaagagggaattccttaaaaggacttaaaaggattttattggacattgtttagcacagtcagggataagatcaggcagtaatttaactcctgggtacagcaagtgagtgtgtatgttgcgggtaggcaggaccgggtggaagtcattgttctcactgacggtctccacacagtgtaccaggtcttctgtctgcaggtcactatgaaatttgactcaggtgcatagtgttctaataagcccagccccatctctagaggtggccattagttcctatggatcctacataagaagaagctggcttgagtttgtcccgggacctcatgagggctccgaagtcagacccagctgggtaggcgttcaagtcttcaatatcagtggttctcaaagtgggatccccagacctgatgcatgagcatcagcagggaactcctcagaaggaccctacgccagacccactgaatcagccactccagggtgggggccagccgtctgggttttaataagccctcagggggattcagatgcacagtaaagtctgagaggccctgctctgcatccttaccctgtgagcatcagtgaggagtctgactctctgacgcagtcacatctattccagaaaactgtcctgaattcccccaggaatcatttccaggaatcatttaagaagcctgctctgtatgtgcctagcagagtgggagctgctggagaggggagagacagcacacagtccttgccctgatggagcttggtccccagtggggacacagataatacgcaagtaaaaaagatagaaacatggccaggtgcagcggctcacatctgtaatcccagcactttgggaggccaaggtgggtggatgtcttaagcctaggagttccagacccgcctgtctctgcaaaaaatatattttgttttaaattagtggtgcatggtggtgtgtggtagtcccagctactcagaagtctgaggcaggaggatccctagagcccaggagttagaggttacagtgagctatgattgcaccactgcactccagcgggtgacagagtcagaccctgtctcaaaaacaagatagagagcaattttctggctgggtgcagtggctcacgcctgtaattccagcattttgggaggctgaggctggcggatcacttgaggttgcgagttcaaaactagcctggctaacatggtgagactccgtctctactaaaaatacaaaaattagctgggcatggtggcacacacctgtagtcccagctactcaggaggctgaggcaggagaatcgcttgaacccagggggatggaagttgcagtgagctgagatcacaccactgcactccagcctgggagacacagagagactatgtctcaaaaaaaaaaaaaaaaaaaaaaatttcagatgggaaaggaaggcagaagcctgatccaccacaagaggagtgtttctcaatatgtaatccagggaccctctgacaacaaaagcccaccccaccccactcaggcccctcccccacactgctggttggtctctttgatgtttctcagacatgcctccttctctcctgcttgaaggccagtgcctttgatgttctgtccacctagaaagctctcttcccatcttgccagatgggctccttctggctcagggctccatgtaaccatcacctccacaggagccctcccccattattctatctaaagtggcctctctggcttcattctgcaatcacgtatttcagcagtttcccaattctgccaagcccccagtagaaggtgagctcttggaaacaggtccttaggcagatccttgtctgtccaggcctccacctcaccagtaagccagtgtttttattcttgttgttttagaggctggatctcgctcagtcacgcaggctggattgcagtggtgccatcatagtgcactataacctggaactcctatgctccacccggctgggactgccgcgcaggctagtgtgccctgcgctcatttcttagggttaaccctaacccacttaatgagcacccacgactccccaacccgagccccactcaagcagaaggcctcaggctggtcggcagcagggtttcttcatgtcctttcttggttctctgatgataggcaaaggcagtagagacagaaaggaaaagaggaacggagtgcaagagacagaaaggagaagaggaacggagtgcaagagacagaaaggagaagaggaacggagtgcaaggcaagccaccctaagaggccagccctgccagcagcacagatccctccaaaccaataggtccctccaactcagtagattcctccaacccaatagatccctccaacccaacctccagcatctgtgcagcatcctaccaactccgaggctaggcggccacactgggagcaagaccccaggacctggtccaagtgccctgcaccggccaggggagtggacgacgaagtgcggctctgctagcccgggagggctctggggcctcggccccgcgggactggaagggaaaacacctggcacggtacgtactggccctaggaatttggcacagcaagatgctggcagtccctgggtggcggtggcaggaagggcccaagggcaacattggtctaggaggtcgagaaaaggcgcgcgatatatggcccccaggatgtggaagcttgcttggagcgttcggctccagggcagcagcgcgtggagggcctcaaggatgcagtatttgcccggggtaggggggcgagggacccagaggcagcagtgcacttggacttccaggacttccagggaaaggcaggagacatggcgcatgtggttcccaggatgtgtaagcgcgtggagcgcggccccggggcagcggagagtggggttttaatatctagcacatgtagaccctggggcggtgctgctaggggcgcggacccgggaccaccggagcacttgcaccgcggggaaagctgacagggcgcgcgaccctaggaggctgccgcgccgcctggtgcgtgaagctccagggcagcggagcgcggggaccttgaaggctgtcgcgtgcaggcgaaggggccgcagggtggtcgctcctgggagagcagacggggaagaaggcaacgggagggagggcgtagcgcgagcagtcccggacgcgggctcaggaactggccgcgaggagcgcaatccagcaggcgcgccagggcccccggatccaaggtgcggggtcccgattgggcgcctggacgccccgtgacggtggcgccgctgccactgtcccgaagcgaggcgaggccaggcgctgcgctttcggctgcccgccccttctccccgccccgcgctcagtcccctccctccgtcccgcctcctgcctcgctccctccctcggcggctgctgcgccgcgctcccggcgcactcggagcccggcggggaccgggaggcagagacggggcggccgtggctccgagggcgggagctgagccgggccccgggaccgaagtttggcggcggctccgggaggcagagcgggctccccgggcgacttccaggcccctctcgcgtcctcgccccggacccgtgggcagccggggggaacggaagccgcggccgggccaactccgaggcggggacgccgcgacgggaacttgaggtgggaactttgcgcgctgcagcctcgccgggcgccaccaaagcgcgaaccggaccccgagcctgcaaactcgggctcgggggcggctgcacgtggccgtggccctgaactccctgcgggggcctcgaaacccgcctgcggggaggccagggcgacagaggactcgggagtcaccgctggtgcgtggcggcgtggagcgcgcttgttacggccaaggtgcgggtccggcttcggttcatcccaaggggtcaccgggatgcgaagtccgggacgttcgccgccgcggtgaccccggcgggggcgcatcccggctgtgggccgaggtttctcccccgatcctgggaggaaggagagttagggattggggtgggggagtgtgtgtcacttgctcattcactgtatccttaggcacagtatggagccccccttcacccccaccgtgggcctgattgagtcattcattatgaacacagcaagcgtttattgagcgcctactgtgtgctaggcactggggatactgagacagttcactgggcacccccaggaactggtaggaaggtggtggtctcagccttagggtttccatgtgggagagaggctcagcccggaggtatggaaggaaaagggtgaagttcattcattcattcatagattggacaaagattggttgagcacctattgtaagcagctcatcataccaagcgctcaacagtcattcatccagttcacaaacatttatggaggcgctatgctggggagaagtgaagagggatggaatgggggcaccct

SEQ ID NO: 8966 - DNA, 6000 bp, Homo sapiens
tcactgcccgtacccttgacttcttgcccacttaccaccaaacactccttctttacagcaggtccaaagtagcagtggggcagggcgcagtggctcacacccataatcccagcactctgggaggctgaggcgggtggattacctgaagccaggagctcgagatcagcctggccaacatggcgaaaacccgtctcaactaaaaatacaaaaattagccgggtatagtggcgcgcgcctgtaatcccagctacttgggaggctgaggtgggagaattgcttgaacctgggagttggaggttgtagtgagctgagatcatgccactgcacttcagcctgggcaacagagtgagactccatctccaaacaaacaaacaaacaaacaaataaataataaagcaggagtgggcttggaggtctatgaacataaggcttcatggtgggccaagatgagagtttcaaggtatattccggctccagcctgtcatccatcgggcatggatggcatgtgacatagaggcatgtgacatgacctctttgggccacagtctctctgatttctggaaagtagaagttggactagattggcttatccctccaggacctttccactccacatacctaggagtcaggggtgcactgtacccaggacctattggatggagaggattgtcaaggggcttttcctgaggaagcagaaccatgaggtgactattcctgggcagaaggtagtgctgtgtcaggaagaggggttgctgtatacccagaagggggcctcagattaacctctcacatctcatcacttcccccagccttgcccctctcctagaccctggcaccgctctggtgatcccttgggtgtctcgcttgtcccaagcaggcatctgattctctctcaagatgagatttaagcctgcaggtgcgtcccttcctgagggattaccttgctgaaaaggagtttcggcctggtgcagtggctcacacctgtaatcccaggacactaggaggtcaaggcaggaggatggcttgagcccaggaggtcaaggccagcctgggcaacatagtgagaccttgtctctataaaaaataaaataaattagcctggcatgcagtgcacacctgtagtcccagctacaatagagcaagactctgtctcttaaaataaaaacggccatgcgcagtggctcatgcctgtaatcccagtacttagggaggcgaggcaggtggatcacctgaggtcaggagtttgagaccagcctggctaacatggtgaaacctcttctctactaaaaatataaaaattagccggtcatgttggtgtgtgcctgtagccccagctactcaggaggctgaggcgggagaatcgcttgaacctgggaggcggaggttgcagtgagctgagatcatgccactgcaatccagcctgggcagcagagtgagactctgtctcaaaaaataataagaataaaaacaaaaaggagtttttttaaatgtattttctcctctgattatgaaagcgtactaaagaaaatttggaaagtaaaggccggttgcagtggctcacgcctgtaatcccagcactttgggaggccgaggcaggtggatcaggaggtcaggagatcgagaccatcctggctaacatggtgaaaccctgtctttgctaaaaatacaaaaattagctgggcatggtgatgggcgcctgtagtcccagctactggggaggctgaggcaggaaaatggcgtgaacccgggaggcggagcctgcagtgagctgagattgtgccactgcactccagcctgggcgacagagtgagactccatctcaaaaataaaaataaataaataaagaaagaaaatttggaaagtaaaaaggcaaaaacaaaacaaaacaaaacaaaaaaccacctacaatttccccctctctttccatatgagagtgttagtacctttgagggttaatagtgggctctttcatcttttaaaaacttatttaaagaaaaaattattgcaaaagcaacacgttttgctagagaaaaagtagagagtattgacaaaacaaaagcaatgaaatatttaagatccacctggatgtaccgcaaaatgttaataagggaaactgtccccatgactggggacatggatataggatggggacatatgaaactctctgtgctaattgcttatgttttctataaatggaaaactactaaaacaaaaaatcctgctaattaaattgtattttaaaaacccacctggaatctttcagggatgagcattgataatgctgttgtgttcattcttgaattagggaaaactatgaatattcatatcatagaagtaggacttttaatagctaaccttttctttcttttttttttttttttgaaacagagtctcgcactgttgcctgggctagagtgcaatggcatgatctcggctcactgcaacctccgcctcccgggttcaagcaattctcctgccttaacctcctgagtagctgagattaccagtgcctgccaccatgcgtggctaagtttttgtatttttagtagagacaggatttcactatgttggccaggctggtctcgaactcctgacccgtgatctgcccgcattggcctcccaaagtgctgggattacaggcgtgagccactgcgcccggccgtgcccgggtgattttaatatatttttgtatttttgttttttagtagagatggggtttcaccatgttggccaggctgatctcgaatgcctgacctcaagtgatccgcccacctcggcctcccaaagtgtcaggattagaggtgtgagccaccgcgcccggcctccttggtcttctcttgtaccctgtgtagtagtggggttgagaagagggtgtggagtttgaaagggggatgtctagcaaagcagatgggagatggtgggacccacactgatgccataattggtgtgtcagggtgtttatccttcttccatgcaagaagcctttattgagtgccaacttgtgccatgctatgtacgaagcatcattttagatgtagaagagacagcaggaagcaaagcacaccaggcctgttggctggagaatgctatttcctctccaaatgtgcaatgcagcaattactaatgacatgcttcttttcttgaggaacttctctggtgcatgagataagtcacacttcttggtttgagatccacctcagacactgggatatttggtggctccatcctgtgtgacagcaaacacaaaaggcatccacttgctggcagttagcactaacttaaaaaaacaaacaaataaaacaaaataaaagggccaagcgcagtggcccgtgggagcagggaaaggcttctggtgagagttggaaaggtggactgggccggatgctcttccttcatcccaattaaatctctatggcatttagcaaatgccaaggaagagcccagcactttgggaggccgaggtggacagatcacatgaggccaggagttcaagaccagtctggccaacatggtgaaaccccatctctactaaaactacaaaaattagccaggcacatgtataaccccagctacccgggtagctgaggcaggagaattgcttcaacctgggaggcagagattgcagtgagctgagattttgccactgcactccagcctgggcgacagagggagattctgtttcaaaaagaaaaaaaagaaacggcgtccaacatgatcagtcattagatgtaactatgtaaaagtcagctttagattagtttatatggtattattacaatttcaggctctttagttacatattgatttttaaactccctcactttgttccttccctctgttttttttttcctgctctcataactttatcaggcctttgaaaagttcatgggtcccagacactgtgtgggagggtgtggaagtgagtgtggatgtgggctgcggtggagataggtgtgtgtgtgagaccgtgaatcacagtgacaggtaatgcagggtgactgtctgaggcctgagagtggggcccatgtgcaagcccaagaaagtggctggtgtgagaatgagggtgttcagactattgaagggtgtttggatgaaagaggcaggtgcgtgtgtgtcatggtgagttcccagaatccagatagagaatgagggtgaggatggtgaaggtcagagggtgaaggagtctgataagctgagggtccctgtgtgactgtgatttctgcaggcacatgggtgtgaggcttgagaaactgggtgcatggatgatggtgaccaacaggagggtgagagtgttatgtgtgtgtgcaggactcacatgtgattgtgaatgttagatgttgcaggcagtgagcagtggcaggtgtgtgtgtagggcctgggcgtgaatatgcacgttggtgcaagagtgagtgagaatgactgactgatggggtgagcgtggccgggtgcccgtgtgattgtgcatgtcagatattggtggggatgagtgtcacagcgcgcgtgtatagggctgggatgtgattgtgaatgtgggattttgcggggggtgcggtggcagggtgcgcgcacggcgggcgtgggcggggggcgcgtggccgggtgggcgcgcgtggggggcgcgggcgcgggccgggggcggggacactgcagcggtcgcggcggcgcggacacggcccggccgccccccgtggcaggcgcggcgcggcgcggagcgagcgggcgcagcgcggagctcgggcccatggtgcgcccgtgtccgtcggtcgggccgcgcgggcgctccgcgcgtggcccggcgctcgcgagctcgccccctcgctgcgggcccggcccgcccgctgccgccgcctcctcccccggggcggcgcggcgccggcgggcggcggcgcggaggccggaccgggcggcggcccaggcggcgcggggggcgcggcggccaaggcgggcggcgccgccgacatgacggacaacatcccgctgcagccggtgcgccagaagaagcggatggacagcaggccccgcgccgggtgagtgggcctgggcccgtgttttcctttgtccgcgcctcccggagcccggcgctcgggccagcctggccgggcctgacaggttggccgcgcgccgcgcccggcgccatgagcctggggcagggctggggaggcggggaggtggggagggggtccctgcgcttcagccccgggcggcacctagcctgatgccggccctttggggttcgagcgcccggttgcctgggcctccttgcccaccttcctttagaaaccccgagaagccgggcccgccccagtgctgtttacacactcgcggaattcggatcagccgtgctttctcaccgttttattgttccgtaattaatatctgtccgtaattaatatctgaggtaacaatttggtcagtgtcacaccgagctctgcgcttggagcattactcgggagcccagatatgctcagcttttaggggggcgcggcctacgcctcggggtaccccatcagcgcccctgggtcccagccccaggaggctgcgccgagaccacctgcgctccggtggccccttccccctccgcccggggtggacccgaaccagcagtcgcaggagggtgggagggtctcctactggccgcttggtgacactaccccttgtgttctccccccacaatttcggggaaggaatcccacggctgggacaggggctgccacctgctgtgcccttcccgcagtaggagaccccgagggcagcttaggcgcggaacaggcaagggtttttctgcatttgggaagaggggacgggttggtattttgcgcctcgccgtcttcctgttcggaggatggcagcgtgacgcgttgaggtttgcggggctctcgtatcgcctgccatagacttacctgggcgtgaggggcgggggtgggaaggacgggggtgggcgctggtgcaaatgcagatttcccggcccccgcctagacccgccaatcagagttctggggg

SEQ ID NO: 8967 - DNA, 6000 bp, Homo sapiens
tctggatactcagctgcaagaggatacttggaggtggagagggtgagtgagcgggaagacttgttagccagtcatgaaggcagccaaaaatgggatttggatgtgtttgtgggtaggtgtccctcctgcatttagtccacagaggtttgccaagcacccactgcaggccagaccccaagcaaggcatgccagactggcctgccccctggagcagtggaggggatggtgaactcacagacaccgagtccaggggccgctgggccctgtgctgaggcctccccacactgcctctccctcactgtgaaatcccgctcctccctgtttagtggcagaggggacgcaggttcagtgagctgaagcagcctgccaaggctgcccacgccagacccagagcaggtgctggagtggcctctcaccaacccagccgctccagcctcactccgctgcagagtcagctgcccctcatggtcggagatgaggttttatgaacagacaccaccagcggtgaggcaaatggtggatccccgggggcctccgtggagctgagggggacggcgccaaccgagtccagtgggacggccagggggacggcgccaaccaagtccagtgggacggccagggggacggtgccaaccgagtccagtgggacggccaggggcacagtgccaaccgagtccagtgggacggccagggaggacccagtcaaaggcagtgaggagggagacagggtgcagaaggcatcatttgctgaggccagcccatgggctttagggcccaagtacctgattcacatcccagctccacctcatccttgggtccctgagcctcagtgtccccatctgtcaaatgggaataatatcagcttggacctcagagggttgtcgtggggatccagtgagctcatttctggctctccgtaggatcccaatgcatatttgtggaatgactaagtggaagaatgtgaagtggttagaacagggcctggcatggcacatgggcagtgcccaataaacattggctcttactagtgtttaaaagtaaaacaagacaaaaaaaatgaaatccaaagttgctaacctgtgaaagttgacagccccaattaaccccaacctgaggaagaaaatgaccctgctggacggtgtttccaaaggtgctaagttgggaggggaggtcattaatctgcctaaggtttcccaagactaattctgcagaggcagctccgtccaggcaggccgggggtggcaggcagacaggggcacggctggccctgaggagggcctctgccttgtcccctcaaccggctccccaagcaggacttttgttggctcagtcaggcactttccacagtggccagccaccctcggccagcgggcacagtcagaacactgccagccaccctcagctgtggccaaaacccacactgacttccatggggtcccaactggctgccagtgtgggcctggcatctgagcaggactggttacagatttgcaggcccccgtgttcagaaactgttaactattaggaatttcacgatgtcaacagtagaaaaaattaaactaaaaaataaataaataaaataatacaataaacccccgacccttcagagcatggggccctggagagtgcaggggggtcacactcccacgaagctggctctgcacacaagtccagcagagcacagatgcgcggcgctgctgggagcaaagccccttaacctgctgaaacaggacgtttcctctggaaaatccccccggccgcggattcaacccatgggcagggcggatggtggcacacgctgtctggagtcccagaaaggcctgtctctgcagtcacccatttcacaatccatttgcttcacacacccatttcacaaccccatggccacagccaggctgagaaatgtgtcccaaactccaaacctgctgggaccatgagagtctcccagttcctgatgcccccactggcctggcatcccctctctactgtcccctacatgcccagcccacatctccccagagaggaggcccaaccctttgggctcaagtcgcctccaaaccctctccttttatattcttcccaggtctcgtccctctctgaaattatcacctggactcatctttttacacatgtgatgtcagcctcacctgtgagcctcagtatggctggggctgcacctgtgggtggttggtaactgcaggtggaatgagatgccacctcctcagggagggcttccttgatctcaccccaactctggcctttggcctgttatcaccatgtctgaaatgacctcctgacctcattgagctatgagtttgcatgtgtgtgtgtgtctttagtccctttgtcccccacaatgtcacacgaggtcagggagttggttttcttcccagccctgtgccccatacccagcacagagcttcacactgaataggagcagaatgtttgttcaatgagtgaacaaaacctttttttttttgcctctgacttgtggcattcttcccagggactcaggcctgcccaatcgcggtgccccctccccactcccactcccagcagtgagccctccctcctcagcccattaacaccttggctctgcccatttctcctgggtagaatcagggagttgtgaccttctctgcctgtgcctgacagtgggctctgcccttcatgcccaaaatgccagcatcacagtccctggcacatctagggttatcagatttcgcaaagaaaaatacaagctatccagttaaattgagatatacttacactaatcattattcatagtttatctgaaattcaaactgaactgggtgtcctgtatttaattctcgcagtcctgggcacacacgaagcctcctatgagtgctggcagtccagcctatgctccttccaaagcaattctcctttcctactgccccgtcaggggccctgtctgtgctggaatcatcattgtcctcaactgcaaaatggaaaataaaatgatagtggttcctccctcccggggttgccaagatgattaaataacataacaactaagatgtatccggccccttctcctctacttgcaaggcatcgatcccttcattcctcgcaatcacaccacgtgaaggtgccatgaagccaccccattttgcagaagaggaaactgaggttggagaggtgaaagcactcagccgaggtcacacagctatgtcccactcatctttgggtgaccctcaggttcggaccctgaggtctgaacactgcattaagctctccagacagaatcaacttcggaactagcgccagagaccactaagtcaatcccaggtgacaccatcagcactcaataaatggtagccactgccggtgtcgcagatggatcaatgggaggtcaagcgttgtgggtaggtttggtttctttaagccactgaattaactggttatttttgcctgctggcagtgcagcctccattgtgtaaatgccatctcacttccaagacaatcaacgtgtgacttctcccagccagactagccaggtctcccgagacttcccggagggcaggggctgtgtctggagtggctgaattccccggctcagggttgcagctcagccagtttgttgattgaatgaatgaagaaatggctgaaagcaggggtggtaatgatgacctccttcaccctaggaagtgaatgggacccaggtcatctccaggcccagccagtatttgcagtggcaccccaagggatgctgggggaccccttagcttttctcttaagttgcagcggccaaactgcagcaatatcttccctgataaaagacacgctggtggtattgccccttcctcaaggcaggggctgagggcgcccagttcacagcagggtgccatctggggtagacgctgggtattgccccactcctgggccggggcctgggtcctgacctagtgctggctgtggctccaagagtgagcttctcctcccaaacagaagacggtcagtgcctctgaacctccctctgggctgggcacgcttggactcctccaaagagcttggaccagcctgagccacatccctgggcttgacttctccagaacaagcctcctggtctttctgggagagctctggcagcatcactgtgcctgtgcagggagagcgggaacccacttcctgcaccggctttctctgagttcttcaggatgaattcgctctggtctaggtaagttctaccccgaggccaccttcacttcccaaattccagcttttccttctctatccaaactgttacaaacacagtaacaataatttttaaaagctttttttttctctgaacacactaagtccctgctaattactgaaactccaggcattacaggaatatgtggacacttaaagaatcaggactacgtgggagagggggaggcagctccccagggtcctgggttggcacacaggctccaccactgtgtgactttcaacaagcgacttccttgaccagctgcccgctctgtaaaatggggagagtaatattcggccacactgagtcggtgtcaggttgagttaatatttggagagtttctggcacaggtaggtgctccttaagtgcctgttaaataagtgaagctttgagaaagtgtctaaaaggcgacacactaaatttttaagaggctggaggtgggccagggaggggaggtctcttatgtaatattttaatatctttttaaacctgaagaatgtgttcttgtagcactcctgtaattaaaacttaatgaactaaaagtacacccctcctgctcataccccttttgaactccgcagccgcgccccccagccggaggccccttgggcagcagacaatgggtgtggattcgccccaggtcccgccggctggggcggcgacaatacaccagtccccgacagctatttacatgacaagggcttccgggcgtgtctacgcgagttcccgtctttcctggtcgtcctccttgggttcgggtgaaagcgcttgggggttcagtgggccatgatccccgagctgctggagaactgaaggcggacagtctcctgcgaaaccaggcaatgggtgatccatcttgggggcttcctccccctttctccaatttctcttccctgagcccccagggaccttgtgctcctcagaagataggctagccccaagagcctgggtcaaggaccccagggacgggggcgaggggagggcgcaccagcaacccgcccgggtgcggctggcaccgagttcggctccccggccccgggcgtgcgccgggcaggcgttccaagctgaccgccgttggggagagggcacagcgcccctcctccgttgcgcgggtgccgggtctacgtgggccgcctagctctggccctttaagagcccgccccgtttcccgtcaccccgccccccggctcggggagggggtgcgggggaacctcggcggggattggcgcagcgcgcgccccctccccggcccccgcgcggtgggaaccggcagccccgtctagcgctgacgtcagaccgtctgcctgcctccgaccgcggtctcggagcgaaacccgatctccttggacttgaatgaggaggaggaggcggcggcggcggcggcggcggaggcgctcggctggggaaagctagcggcagaggctcagccccggcggcagcgcgcgccccgctgccagcccattttccggacgccacccgcgggcactgccgacgcccccggggctgccgaggggaggccgggggggcgcagcggagcgcggtcccgcgcactgagccccgcggcgccccgggaacttggcggcgacccgagcccggcgagccggggcgcgcctcccccgccgcgcgcctcctgcatgcggggccccagctccgggcgccggccggagccccccccggccgcccccgagccccccgcgccccgcgccgcgccgccgcgccgtccatgcaccgcttgatgggggtcaacagcaccgccgccgccgccgccgggcagcccaatg

SEQ ID NO: 8968 - DNA, 6000 bp, Homo sapiens
gacggcccaggaagctgaagtgcctctgcctccgagaataagaagacagggtgggaaacggtatttctggcgaagaacaattccaaaatggtggtggggggcagggtgtgtgccgtcagggctggaagtggggggctgcactgctctgcggggagctggcatctgggtgggtcctgagtgtgggaacggagttcaagggggtgggggattgcggggaacaggaccacgcgtaccgtgaggggccagggaacaagaatctcacccaggaagcctgggctgaagccagctgggaagaagctgcggcaactcccaggcagctcccaagaaacctctgggaaaacgccccacccgaggcaagcatcctgggctgcccctgaagtccagctcagcctgattcccacactgggagtgcacacacgtgttgcattgttgggcaggacgttcctttcgggagggagaagctgggactggagagacccgggccaggctctgagccagagaggggcctctctgtgtgtctgcagtaaactggaaaccaaccagcacccttttttttcaaaggaagaacagagtcgacaacattgcctgtgggcctggatgaaggggtctggctgtgctctctgtggagccatggggattggcctctccttttccaggagtgtttgttgcagttgaaagttctcccggtttcatctgaaacggggacaggggtgttgtgacaacagaggggcctttgcagccccgcacaggctctgcggacagctctgccgggaacccaggcctgggttcctcttcctttccttttcctgttgtctctgccacaaggaaggtctgccctgcgggcgggctggggctgctgcaggtgtgggagagcagcgactgaatggtggcccccaaatctaggcctggcacagtggctcacacctgcaaacccagcatgttgggaggccaaggcaggagaattgcttgaagccaggagtttggggcaaggttctttgcagatgtgattagggatcttgacatgagagcatgctggattacataggtgggccctaaatggcatcacaagcatcatagcaagtgacacacaggagaggaggaggtcacgcaaaggtggaggcaaagaccagagcgataacgcccacaggctaaggacgctgggagccacaggagctgggaggggcaggaaggaccctccccagagcttcgaaggcagtgcaaccctgcccatacctggatgttagatgtctagcctccacaactgtgacgtaataaacttccgtggcttcaagccgctagtttatgggaatttgttatggcagccgctaaaaatgaatacactgggtttactaagaaagaaaaaaggagaagatgcacaaggtcctggcctgaacaagctgtcactctcctgagtttccctgccctggaggcctttcccagcttgccagtcctcccaggaatgcatgggccccactcggcctgcgtttgtgctgactggggtggctgtccttccattgctgtccttctctgtctttcactgtcctcctctgtccatcactgtcctccactgtccatcactgtcctccactgtccatcgctgtcctccgctgtccatcactgtcctccgctgtccatcactgtccattactgtccatcactgtcctccgctgtccatcactgtcctccactgtccatcgctgtcctccactgtcctccactgtcatccgctgtcctccactgtcatccgctgtccatcgctgtcctccgctgtccatcgctgtcctccgttctccatcactgtcctccactgtccatcactgtcctccgctgtccatcactgtcctccactctccatcactgtcctcctctgtccatcactgtcctccgctgtccatcactgtcctccgttctccatcactgtcctccgctgtccatcactgtcctccgctgtccatcactgtcctccgctgtccatcactgtcctccgctcgccatcactgtcctccgctgtccatcactgtcctccgctctccatcactgtcctccgctcgccatcactgtcctccgctgtccatcactgtcctccactgtccatcactgtcctccactgtcctccattgtccatcactgtcctctgctctccatcactgtcctccactgtccatcactgtcctccgctgcccatcactgtcctccgctgtccatcactgtcctctgctgtccctcactgtcctttgctgtccattactgtccatcactgccctctgctatcctccactgtcctccactgtccatcactgccctccactgtctgttgctgttcatcactgtcctccactctctgttgctgtctatcactgcccgtcactgtccatcactgccctcctctgtccatcactgtcctcctctgtccatcaccttccatcactgtccgtcactgtccttcacacctcagcaggaccatcagcttttactctctggaaactgggggatattttcctgcctggctgctccagctctgcccagagtcccccaggtgggcaggccgtggcattccagcccccattccccagccccttaagcgacagacctgttgggagcctgaagacagcccacctgtcctcaggtgtgactcacactcactgcagtttgctgctgccccaaagtccagttccgggcaagggtgggggcctccgactagggtcttcccacatgggattctgtgtaatgatggagacgtgctgccatttcacttttaaagctgtcattcttaggcagaaggaattcgaacaagaacgagagcagatgaagcgtccgagaaaacctcaccacccacagctggccaggccccaacaactgacctgggccaagtcacaactgtgtcacccgcgaaccaggtgtgcagaccgaacccgcctctggaggctgctctaacgttcacgaggcaacactgcgcctggggtccccgcggctggctgctgccgtcagtgtgcaccagggcaggtggagtgtgggctgtgcacggcgtgggacctgtgcagacctgctctgctgaactctcaaaggggctgtcctgaccccttcaccagaactcgtaactttggagcaggggatgcccacgacggctcctggctctgacactggctcctgcaagggacactagagcatcgttgcatcctcagcaagtgaagtcttttgctttcaagaggaagagcaggcagcctggcaggacagaactgcaaggcgcacgcatgtccaggcagcttcccctgagagagaaggatccacacacacaggcaaggctgagcaggtgcccctccctctccctcaggacctcagcagccggctccgggccttcctctgcttacgtggcactgggcctctgcttacccggctcctctgcttacgtggcacctttgcgaatcaccttctaggagtccacgtccttccaccaatggctccaagtgcctggaggaaccagggttatgggggacggggatggtaccgctgtatttaaaaatcaatgtcttatatatcgtataaataaacattaattttttcacatcttttaaaaatcgggatataatcctcacaccataatagtcacccctttacagtgtagtgctcagtgggctgcagtatattcacagagctgtgcaaccatcaccaccatctgattcctgaatattcttatctccccagcactgcaaacaacctgacgctccccctccctccacaactggccacacctttgctctctaacctttggggcttggaagctaccccctcacccgcccatgagcctggactacagatctggggtggctccccgcagtgcagaaaacctgacccttggtcttctgttaacccctcctgatccccgggactgtgggacacacaaccaaaattaggaaggcaagaatcctcagtaattcataaaatctcgagtggggcaggaattcaggttgccatgggaaacccatctcaggctcctcaggcggtgggtggcagtcagggagcctgccctgccactgagtaaagaccaagtggcagccctggcccggccacctgccctgatctcccgctgttctgcccccatgggctttccgaccggctgacactctggctcactgtatccacgtcctgctcctctcgggcctggctgggacccttccctgcctccagcgcaagcttcttccggaagcgcaggctttacggggttcagccccatccagaccccaggacctgccctgggcagctgggtcctgcctccaccgtgcacaaggcctcaggctgtcccaacccgaggctccctaggcccctcccgcgcaggcaggaggccggtccaggcagttggagcagacctggccttcaggtctcagccttccagcagaggagctccctgtgggaggtgggcgagcccggctcactccctcctcctgagtcctcggcccgcccgcccgtggaggggacctctgagctctggacccgggtccaggacttctccaagccaaggaatctctgagactctcagagaaaacgcctcgcggatgcgggtcgctcagaccccacacggggaaggttgatggggatctcacgccggagggcgcacggcgggagcaggtgctgggcaggtcatcctgcaggagggggcggacgccggtcatccctgccgcgtccagggcgggctcccctcagctgcaggtctgtcctggggccgcggcgccgcccctcgctacccgagaggccgcgccatcgcccctttaagaacggtccccctctccggccggcgcgaagcccccaggggccgcaggcgggggtgggaggggagacgcagcgcagctgttacccggggctggggctgggccgggggttgcggggaggaggggggaacgggatgcggagggggcggggtccaggctgcggcgcgtggggagcgggcggagcgggggcgggggccgagcgcggggcacccgggggcctcctgtataggcgggcaccatgggctcctgctccggccgctgcgcgctcgtcgtcctctgcgcttttcagctggtgagtggcgacccctccgcgagcctcctggagcccccggtgcccgacccacggcggctgtggggtcccgaagcgtccctccgccccggggcccgttcgctgggtcccgcgccagctccgaggggggatgcctcggaccccgggctgctacggccgaaggtggcgtcgcctgcggggcgtggggagtcgcggcgccgggtcccgtccccggtgtgcgtgcgcggggggcggccgcgggtccggagcggcggggacaggtgcggggcagcggctggatgggctggccggacggaagccttcgggcggggccgcctggaccccatcgcctggggaggcgtgtgtggccccgggtgcgcccccgggtgcgcgcctgtctctgtctgtgcgagcgtttcccgcagccggccccgggcgccgagtgagcggccaagttccgattctgagattcgggtggggcgatgacggaggctgtgcctgcgagtttgcgagtgtagggggcggggggtgagaacgtcctgcccacccgcgagcaaaccggccccgcccgcccccgccgccccccattccgcccggcgtggagctacgcggaggcgagaaggggctggagccgatgcccggggcgcagcgcgggcgtcttcggtgtcgggattggtcggggctccctcggccaagtttccattctgccccggagtccgaagctccctgggacgcctggggggcggattctttcccggagcccggtgccctcgggggagggggctaaacaaaggcctcgcctgtccaggctggggaagctgctttgcttcgatgctaattggccctgggtctcccgtcttaaaaaggaaacgatgctttgtgggctgcggagcgcagctggaccgcgcgcccccctcctcctcttgaagctagaagggccagaaggggctgtttcagagttttgagcag

SEQ ID NO: 8969 - DNA, 6000 bp, Homo sapiens
gtcgtctgtttttctgaaggcgcagtgacggggaagcagctccctccatttccactgggaggcacggggtggtggcctgggaggccctgctttccagtgtccgcaggggctattgtcactggtgccgaggccctcagaacgcaggtgaagctgagcacctgggcacagatcccacccatgacagcacagcgtcaaaagagcataaaatctggcctgttctagcaggggccacaacccgcgggggccaccagcaccatgtagccgtcttgcacaaactcacagtggcagtccccgcctccccgatcccgctgctgacggccccacacaggagggcggccagaggaagctcatatgcctctcaagtcactacccatgcttggtttcctggggtttttgttcgtttgttttttttgttgttgttttttgttgttaagatggagtctcgcaccattgcccaggctggagtgcaatcatgcaatctcggttcactgtaaactccacctcccgggttcaagtgagtctcctttcccagcctcccgagtagctgggattacaggcgagcgccaccctgcccggctaattttgtatttttagtagagacggggtttctccatgttggtcaggctggtcccgaactctcgacctcaggtgttccacctgcctcggcctcccaaagttctgggattacaggcatgagccactgtacccggcctgttttgttttttttttgagacggagtcttgctcttgccgcccaggctggagtgcagtggcatgatttcagctcactgcagcctccacctcccgggttcgagtgattctcctgcctcagccttccgagtagctgggattacaagtgcctgccaccatgcctggctaatttttgtgtttttagtagagacggggttttaccatgttggccaggctggtctcgaactcctgacctcagatgatccacccacctcggactcccaaagtgttgggattacaggcatgagccactgctcctagccctcatttttgaatttaattaattaattttttctttctttcttcttttcttttcttttttttttttttttgagacagggtcttgctctgttgcccaggctggagtgcagtggtgtaatcacagctcactgtagcctccaactcctgggctcaagtgagcctcctgcctcaacctcctgagtagctgagacaacaggtatgcactagcaagcccagctaatttttaatttttttttctttttgagacagggtctctctctgttaccaaaggtggagtgcagtggtgccatcatggctcactgcagccgggacctcctggattcaagcggtcctcccacctcagcctcctgggcagctaggatcacaggcaggccaccaagcctggataatttttgcagttttgtagagagagggtttctatgttgcccaggctggtctcgaactcctgggctcaagcagtctacccacctcagcctcccaaaactctggtcttacaggcatgagccgcctggcctggcctcggtttttcacttttggtcccaccattccagtgccgagcctgtgagactggagtcatgacccagcaggactgcacctgcacctgagggagagcacaggcgtgggttctggagggcaccgagtctgctctgtgaccagcaccatatgggcagggttaccctgtgggttctccctggcagtgacccagatgtgcttcagtttgtcctccaacaaccattgactctgggcccctctctgcgccaggctccagggaggacagttcgggaagcccgggggagcccgggcagtaggcggtcacagcccctgtggtttgctttctgctggggagggagcccaccagaggactttggggacagatgagctggccttgatcggcaggagcagccagttctggcagtacaatcttcatgttctctggtcgcttagtgcagcccagtgacgtgggacactggggaggccttgaggttacttgcctggaggagaccagagaaggggctgggcttgcaggttccggggagaggatggtgctggaggtgctgaagggacagcgcccgcgtggaatccgctgctgccctggccgcctgggcgaagactgactgtctcctccgctggagctgggcaccacgtacgtctgaattctgctcatcctctctggagtcctgtcgatgcggtcttggcaaagattgtttgagcctgaacgcttttcccatctatttttacataaatggaattcctcctgcttggatgaaatttaccccaactgggcattttcacgacccactttgcctgggcgcagaggaggggacagggggcaggcatgcgggtaaccagattgctgacaatgtagcccgtgggtgtgcaagacacaaaattaaaaacataaatgattaatgagctagctctttgaaaggacatcctaaacaaaggaggaagcaaggattttcaagccttgatgcaggattcactttccagaaccttccaaggtgtggcaaagctgctggagccaacgccatttgtagacgggagaaccgcgagctgcagggtgcaaagctccacctgcatcctgagccggcccctccagcccggcatccccacgggggatgccactctcggccacccccaggaggctgtgaagccagccgatggctccccaagacctcagcagggttttccccttttttttctgaaaaataagatgaacaggtttgtctctcccaatgtcctggacaccagagcaccttaatccttgctcccatctcagctctggtgcatctgctcaaacgggaactggggtcacttttccttcatcctctgtggatcagccctgaccttgggtcccactgggctctgacatcaaacctgagatgactgcttgcccaggagaggtcacgtgtagcccgggcactgccgaggggcaccggatagtctggggcttccccccacaggatgaggggccccagccctgcagggtttacattttgagctacggctgctccctcgggtcttctggtgagtgggaaagaccagcggcaccagccagcgtgtgcagggagatgccacggtgctctcttccttctgcatactgaagtcctctccctcccctgaaagcaccaggctggtgcctcctcccttaacaatcgagagaaaccgcagccgcttggggcaagcccacttcatgctggtaatcacagccaatgcgtgggcacagaggcagggaggcggggatccagaaagtacccctggatgtgcacaagcttgtgtaagttgccgtctatccccaacgtcctggataacgtacaggttagcattctgcctgcaccgacccttctgtattcagcctagttaaaaacaaaacaacaacaacaaaaacaggccccgtggccactagctctggaaaccaaagggcaaacacaactcaagagctcactctgcaccagggttagggctgttttatgagcaggtcacctgcgaggacggcgccagcgattcagcagagggcctttctctgggtagaacccatggtgccaggcgaacgtgcaaacaggctggatgtagtcagagacgcactcgaagatgacacccctcctggatgtgcagaggaaggcccagtggcggggcacctcacagggcgggcagcactgagccgcaggggtcccttggtctcccagcagcagctccagagggacccctcccaggacacatggctgccggcaggggggaggccacctccgcgcacttgcccccaaggaaacaccgtcccatctgtgtccaggaggcacagatctgcctcctttgtcccgaggtgtggcactgggcttcctgctggcctgtctgctgccctggggccaccctccagtccctgcccctgccacaggccccttctggggtctgcataactaagtccaggccccttggggggcttcaaggccctctaggagtgactctctcccatcccccaccccatggcccttgctcctcttcttgcctcccggcctctgtggccaccccctttcccctgggctgctttccttgcagggtgcctccagcctccacagaccctccctgcacacaccctggggtctagggggtcctactgcctgggcaaccctgacaccgagagcatgaggtcaccatgggctgagccctaacagagtcttggggagagcccctacccccatcccttcccggaggcgtccactcccagggcccagctgagaagactccagtcctgctcaggcggctgggcaccgctctgggaccccaggagcgctggggccaccaggcaggtccacttggttagtactaccggactcaaaggtgaccgcagggtcagtgtgcacatggccgggggattgggcaggctcagcccagagctctggtcccgcgggccttggtcccttctgcctccccctcctctccccctgccctcccctccccctcccccactccccctcctctcccccctcccctccccctccactcctgtctcccccctccactcctgtctcccctctccccgtccccgccactctcctcccctcccattcccctctcctcccctccccctcccctcctgtctcccctctccccgtcccctctccctcccctcccctccctttccctcttctctcctcccctctcctctccttcccccctcccctcccctccccgtccctccctctcccctcccttcccctccctctcttctcctcccctctccttcgactggcgtcgcgggggttaacgcggggcggggcgaggcggcgggcggagccggcgcggccgcgggccaggcgccgaggtgcgcgcggagcgaggtggccgcagcgtctccgcgcgcggcccaagcccggcaggagtgcggaaccgccgcctcggccatgcggctcccggccggggggcctgggctggggcccgcgccgccccccgcgctccgcccccgctgagcctgagcccgacccggggcgcctcccgccaggcaccatggtgcagaagtcgcgcaacggcggcgtataccccggcccgagcggggagaagaagctgaaggtgggcttcgtggggctggaccccggcgcgcccgactccacccgggacggggcgctgctgatcgccggctccgaggcccccaagcgcggcagcatcctcagcaaacctcgcgcgggcggcgcgggcgccgggaagccccccaagcgcaacgccttctaccgcaagctgcagaatttcctctacaacgtgctggagcggccgcgcggctgggcgttcatctaccacgcctacgtgtgagtggccggcggggcccccgtggcgacccccatggcgacccccatcggcgaccccatcggcgaccccggccaggctggctgcggcgggtttggctccctgcccctgggtctgggtccggggccggcgctccccggcgggagtgctgggccgagaccggagagcgattgtacagcgcgcgggcaggaaggattccggggtcggggccgctcaggtcggggtgggggctccaggcccgcaggacagagacgtgcggccgccccagccccctcctcagcctgggaggcccctccccgcggcctctgcgccgaacaaagggccggccggggagggacggcggcagcgctgggtctggactctccgggactctcggggacccgcggggctggggccgcccgaccaagcgagggcgggggggaggggtctggcctgtcctccgccatcctcccgagccgctctccctcagactagggtgagcttctgggttcctgagatgggggaggggccctcccatgacccccccaccccagcccgggctgagcgcagctgtctgtcctgccccctcggcgccgacgcccctccctggccccgcgaaccccctcagctcctgcgctcagctcctgcgctgtcccatctctgcagccgccggccgcccccgtgcacatcccgggctcaggacccctccttggca

SEQ ID NO: 8970 - DNA, 6000 bp, Homo sapiens
caaattcctgacccacagaaattgtgaaagatgataaaaatcattggatttggagtggtctgttatgcagccatagacagccaaacagaggcatcttaatctgcttgggctactataacaatttagcatggagcaggtggcttgacaacacacatttattcctcaggtctgcagggtgaagagtctaagatcaaggtgctggcaaattccattctgctggcaaccaagggcctgacttctggtgtacagacgaccatcctattgtagccccaaatggcacagagaagaagcaagctctcaagtctcctcttatcaggctgtaatccctcccaaaggcccacttccaaataacatcaccttaggacttcaacatatgaatatgagggagatacaaacattcagtctgcagcagagggcttcgttagagctctgacctgagcacgcttcatctcaatgtcattgtttttgccagctctacatccactgccctttttttttttttttttttttttttttttttttgagacagagtctcactcttatcacccaggctacggtgcagtggcacgatcttggctcactgcaacctccgcctcccagcttcaagtgattctcctgcctcagcctccggagtagctgggactacaggtgcatgccaccacacccggctgatttttgtatttttagtagagacagggtttcaccatgttggtcaggctggtctcaaactcctgaccttgtgatccacctgcctcagcctcccaaagtgctgggattacaggcatgagccactgggcctggccccactgccctttcttacagtaacagtatttcaatttccctttagggaagctcttcaagcaggttctcagtccaagaggtttctctgggttaagcactgccagccacccaaagggtgagcaagtaaccagccaatcagagacactccagtgggttcagtaaatgacatattatctaactggggtgaggggaatcaacatcagggcttttcctgagactataaggagaaacagattcttttcccagcagttaaatttgaagtctgtggccattttgctaccatatagggaaaatctgcctgacattgaagccaacacagatgagggaagagccaagagataaagagaaagatcctgagcatctggatacagccatgcctgaagccagtatcccttgacttctcaattatgtgagcctttatattccctttgtttaaagccagttcaagtttaaaactgccatttccagtgagaacaattccctatgttgtatctaaggccaagaccttgcccctgactctaggccagaatgtcctgtacagtgccattcaactctgccaaaagcaaagggcatcaacttctccacaacctggctttccctcatctattttacatctctgttaatgggagcatcacccacctgacctataaacataaaagtcagcctctatcctctctgtctctctccctctctctgtctctctctctctctctcaatccctgtcacttcccttacttcttagtaaccaagttctgccaacttaactttatggacatttttcacacctgcaccctcctttccatttttcctgcccactccaattcttcatcatttctcacctaaatttttacaaaatcaatagataactaacatagaggtgtatagtaaaaagtgaatttcggccgggcacagtggctcatgcctgtaatcccagcactttgggaggccgaggcaggcagatcatgaggtcaggagatagagaccatcctggccaacatggtgaaacctcatctgtactaaaaatacaaaaaaaaattagctgggcatggtggcatgtgcttgtagtcccagctactggggaggctgaggcaggagaatcgcttgaacccgggaggcggaggttgcagtgagctgagatcgcaccactgccctccagcctggtgacagagcgagactccatctcaaaaaaaaaaaaaaaaagtgaatttcattcccacccttgccatcagttaccctcccccaaggcatctactgttacctctttcttgtctattttcccagaagttctctatatgtgccatctttttgagaatttcaaatggaggcatactatcaagacttttcagaacactgcatccttcttcacttgaagtgtgattaatataaataattatagactaatttcttctttctaatggatgcatagtattccacaaagacatataatgtacataactcgtcttccattgatggatatttaagtggtgtcccagttatctgttagcacagaacaaaaccccccaaacctagtggtataacacaataaccacttgaatatgcttgtgggttctgtgtgtcaggaattcaggcaggacacagtgaggccagcttgtttctactctgcaatgtttgagtcttcagctaggaagatttgaagatttgaaggctgaagctgattcaaatggctggccactggaatcatcttgttcttccccttccccttcgccttctacagtgcaatggcatgatgtcggctcactgcaacctctgcctcccgggttcaagcaattctcctgcctcatcctccctagtagctgggattacaggtgcacgccaccatgcccggctatttttgtatttttagtagagacggggttttgccatgtggccaggctggtctcgaactcctgaactcagggtatccacccgccttggcctcccaaagtgctgggattacaggtgtgagccaccgtgcctggcctcatctggttcttcttcactcacttcttttatgcttgaactgggatgactcaaagctaagcttagctgggactgtggtgccttcatgtgtcctctcctgatggtcttggcatcctgacagcatggcagcctctaagcagacatggagccctaggtaggcatggtgcctcaggctccaagagctagagttctagcagaagttgcctgtacttttatgtctggaccttagaagtcagagtgttacttccaccgtactccattggttgaagcagtcatcagctcacccaagattcagagagggtacaaggatcccacctctctacagaggagtgctaaagaatttgtagctatattttaaaaccaccacaggttgtttccaatctgtagctattcctgtagttcattttacaggctaacatctcttgaatgtcttcatttctctgcaccaggccaagacactgtcatctctgatctctttgctgatctcttgctgtcactcttgtgctcaacatgctgttctcttgacagcagccagaggtcttttcagaatgaaaatcagatcacatcccacccctcttcataacccttccatggctccccactacccttgggctgaagctcaaactccttaccttggcttatgaggccccacaaggtctcacttctgcctgcctctccaatgccatctcctgtcaccatttggggcctttagttttgagctgcaagagttcctcccatcacacacacacacatacacacacacacacacacttaaatgagtaagtaaatagaacatacaaaacgcttaaacactttgcacatagtgagcataataagtttgctactattattagactgtcttcagtaaatatttactgggctgcctactcagtgccaagcactatgggaggctcacagatacaacacgaacaagaaatatgtggccttggccagacgcggtggctcacgcttacaatcccagcactttgggaggccgaggcaggtggatcacttgagctcaggagttcaagaccagcctgggcatcatggcaaaaccctgtctctattaaaaatacaaaaaattagctaggcatggtagtgcgtgcctgtagtcccagctcctcaggcgactgaggtgggaggatcacctgagccttgggagatcgaggctgcagtgagccgtgatcatgccaccgcactccagcctggacaacagagtgagacgctgtctcaaaaaaataaaaattaaaaaaaaagaaaaagaaaaactaaaaaggaagatgtggccctatcttgccgagctcattcttctgtgtgtccccagcccctagcacaaggagaaacagaatagatgctcaagacacaaaggcatgtctgtgcaagggtgcttgatgacggttggaggggcacaatgactttcccaagatcacacagcaaatgtgggacaaaatcaaggctgacagctcatgacagggtgggaggcagatgcagctgcctggcacaggctggctctccagggagatgggcagtgggcacgcattgcccagggcagaactggggctaggggaggaaacaacaagggaggctgtcattagctccttccaaagtggaggtcacttctctcccaaccccgagtcctccacccaaactcccttctcaaggtacaagggctgatcccgtaccagggatgggtagggactcaaagaggaaaagaggatgaaaagaggatggggactgagtgagatgtgaggactccagagggattagcggctctcaaggcaagtgggaggggacttcccggtaggagcccggagacagatgggagcctgtgaagagggcgggggcccggcgaggagaagcggtttctacgctggggtggggctccatgagggggatggagacctggaaaagggactgacggtgcagcgaggagaggaaggctcggttaagggatgggtcttccacgggaggggtggggaactgcgggagtgacggcagcttcggtgaggagtctgaggggctgcgtgaggggctggggcccagggagtccgaggggtctctgtgagggcgctggggtgtccgagcgagcagggaactctggaaggggacaggagccgggggagctgcaggcggccgccgtctgcagagccaggccctgaggcgggccggcgccccctcccccgccccgaactgcggcgcaggcgcgaaccggacccgcctttgctcggcggagacagcaggcagagaggtgagcttagccctgccccacgcgcggccaggccccagccccagcccctggagaacccccgcgctctgcccgcatcctcagcccgggccgtgtcccgccagggccgggacctttgcgcctgagcctcggctttgggaggtgggggtcccagggaagcagcaggggcgggagacagaaacagccccatcgcccctcgacgcctcagggttgataggctgggtagaggcttcaaaggacacccccacccccgccaacacttcaaaaacccattcctacccctctctgcctcagtttctctctagggaaaaggacgcagttggtgtggagcagggcatcggtggtcctgtcaggaagagtggcgcgggtgccggtggggaagggaggcgggaaatggcctgatttccccggccgacaccccctacccatcccccccgggagggcgccccttctcccccgcccgggcagcgctggacgctgtagtgggcgagtctgagggtctgggaaggacacaactgaatgaggctgtgcagaggcgacagattccgtccatcttcgggccctggcttccgtcacttccgcccgtgcctgccgcccctcgcctcctccctccgccgcagtctccccacgtcggacagcgcagccccctccgcctcccgctcccctcccaccgagctcctcccggctcccgggctggggacgcctccctagcggttcccatggcaaccctcgtcccgggtgcctgcgccccgccccccgcccgccagacctactccgtgcagccctgaaacgccaggcggaggggccaggccgagcgggaggcagcgtcaaggtcaccttccctctccagtagcagcaggactgagtgattccatctatttggagtcgcggaagcggtgaattggaggggaggagctgacccaggtcaacagccccgaagccccctccacacctcctcacctgtggccttgaac

SEQ ID NO: 8971 - DNA, 6000 bp, Homo sapiens
tcttcttggtgaaatgacccttttattattttataataattctctttattcctggtaatattttttgctctgtagtctactttttctaatattaatatagttattccagctttcctttgataagtatttgtatggtatatctttttttatcttttacttttagcctacctatatcattcattatagttaaagtgaatttcttatagactgcatcaaataaagtcatttttttatccattcggataacctctgttttaattgaagtgtttagatcacttatatttaatgtaattattgacatttttggatttcagattttatttatttaggatttttggattttattttattttttttactgtttgttccctttattttttattcctctgttttcccctttcttgtcttcttttggaatatttggaattccatttttatttcttcttcttctttttttttttttttgacagagtctcactctgttgcccaggctggagtacagaggtgcagtcttagctcactgcaacctctccctcctggattcaagcaattcccatgcctcagcctcctgagtagctgagattacaggtatacaaccaccccactcagctaatttttgtatttttagtacagaccaagttttatatttttaatagagacctgttggacaggctcatcttgaactcctggcctcaagtgatccacccacctctacctcccaaagtgccaggattacaggcatgagccagtgcacccggcctatggtgtttttttttttttttttttactatattttttgtcatagattttaaaaatagctattctaggggttacaaaatacatacttaacttttcatgctctacttagaattgatattttaccacttcaagaggagtgtaaaaatcttacaccatataggtccctttatattgtaaaggaatatacatactcctcctttatattgtactagtcttatctacacacattgaacccccatcaacaattgttgctttccactgtcaaacatgttttaaaagatcaagagaagaatagcctattacatttactcaaatatttaccatttttgttctccttccttcttgatgttccaaatttctttctaatgtaatgtcccttttgtctgaagaacttaattcagtagttcttttagagcaagtgtgctggcaatggattatcttcattttccttaattggagaatgtgtttatttcactttcatttctgaaggatatttttgctgggtacaaaatcctggttgacaactcttttctttaagcaattaaaaaaaattgttctgttttcttctgccctccatggtttctgataagaaatcaacagttatttaaattattattcctgtattttttttttttttttgacacaggatcttgctctgtcacccaggctacagtgcagtggtacagtcagtcatagctcactgcaacctcgacctcccgggctccagcaatcctcccacctcagtctcccgagtagctgggactacaggcaaacgccactacacacagctgatttttgtattttttatagaggtggggtctcgccgtgttgcccaagctggtctcaaactcctgggctcaagcaatctgcctcttggcctcccaaagtgcagggattacaagtgtgagccactgcatccagcctattcctgtattattaatgcatcatttttctctgactgctttaaagatcttgttttgtttttaattttcagcagtaactgaaaactattattattatcattatcatcatttgatttattctctctggggttcaccagaatgctggagtttggagctttatttactctgttccactttgctgcctactttccacagttgaacttgcatctgggaccaggaggtaggaggacagtgacaaaaaaacaacaacaggggctcaccctccctcaggactacagctacttttattgaagaagtttctcctccctcagagttttaggcacctgtgggttcctgctgtcacagacaccactgcaggatggcctagggcctgggtcatgagacaatggagaaaagatttgaaaggaaaagaacaatgatatctcccacatactctgcgcatcagaagtcccttttcctgatcttcaagtcaaaactagggagattctttgggagctttctctttattgagccccaattccagattttgatctgccttgagaccaggacaggagttataggaagaaataaagatgataaattcaccactagttcagtggtagggtatatcaaattctggcttcttccccagtgtgcctgctagtattttgtcttcagaatcctcaaatagctgctacatgcattttgttcaggttttattgctgcattctgtgggagagtatgcttagccagaattggaatacaattgtttttgaaactaaaaaaatttttaatgtattttcaactagtccaaaacaaaacaaaattactaatttattaggaataattttgttttatacttataatcctcatttgttgcaatttacattataactaaacaccagttctcttctcaatcatctgcttcctgatgataaagagaatactttactagctaacaccattccagatgggagtaatgtgagtgaagtcactgtcttgctttggggaagttccttgtggagatttctgggaaatgtagtcttctaagtaccaagcaaaaaaaaaaaaaaacccaaaaaaacccccacacaaaaccccacacacatacacacatgaggatgggacagccaggcatggtggctcaagcctgtaatcccagcactttgggaggctgaggattgcttaagcccaggagttggagaccagcctgggcgacatagtaaagccccatctctattaataaacaaaacagcatgggaacagacaaaaaaatattttaatgacaatctcagaaatgttctccttctaaacatgtaataattacatggcttcctttggtttcacttttaagtgtaaaaatgtcacttatataatttcagtgagcattagagcagataaaacattttatcaattaacttgctaatatagcattaggtgttttggacagaagacctcaacatttcacatggctttttcaactagtttcctattcctgctaaattgctctgccatgtttttctagaaaacataatataataatggctatctgataggatatggtttaacggaatacaggagaaaatagaatcaatgtcctctccaaaatttattagcatttgttgcaaaaaaagtaatggatttattgcagctcagagatacaggaaaagatttgactgtgaaaagcaacagtaaacttaaaataattattttttcatgtacattatcaatattaactgtttctcaccaggccagtactgcagagtcatgatgtaaatcagtgaagtcactttacaaattcttctcttggaaaagtcagcttggggcagagagtagagggtaccaagttcagcaccggcgagagtaaacagacttaaggacttaagagccttaagagacttaagacaaaaggacttccaggatggcatctggcctagtgttcccatagaagactggggcctggcacaatgtgtgcttgctttctcattcacttagtcaatatttattgagctcctactatgtgttaggcactgctctgggcactggaaatacagcaagggaaaaaaacaaagttccttccctcatgaagtgtacattctagtgggagtgataaatgacacatagtaaatatacactatgtcagctggtaattaagtgtagcaaaactaggggcaaaggaggtggagaggagggagttagtattttatgtagaatggttaaggaagccctctctgagacagtaacatttgagcagagacctggaggaaaggaaggattgaaccatgtggctctctggtgtgttctaggcaaaggggacagcaaatgcaaaggcccagcagtgaggcctcagcaagaaggacagcttgatgggagaaaagtgagtgatggggagagccacgcaagatgaagtcagagagctggagtaagatgagggcatgtggcggagagcgatacagaaaaccactggatggtttagagcagagtaatgacagatcagacaggcctggttcagaaagaaggagcccattcccactccacctacttcccacacatgaagcagataagaaaccaagcccagaaagtgagttaacttatctaaagttgtatggctagaaatggaagggctaggcagaaaatccagttttttggactttttggtcttcttgttttccctgtgacagatggaagacagagggaaaagagccacaattaacattttaagttgtgattgtttatctctccgagatctttccaatgattcacctttttactacttaagaggaaaacatttccattttcagacacttaagattcctgctatcattgttagtagcccaagtgcttgtcattcacattaaatacccctggtactcagacttggtttgggcaatgaaaaatgttcctaaaggcttttagataaaaattactatttcactagagccaactatgtgccagggagtgagactggtatcatcaccccatgttagagaagaaaaagctgaggcccagagaggtgaagggacttgcacagggtcacacagccgaccaagacgctttccaccacgcccaatcgatcgcccagctcaaaataccggctggtgtgtaggtgggagaggccgccgctccccgtgtgctcgttgtctctgttcccaggccctctagagcaagatactaactatctctttaagaaggaaagtaaagacgggccgcttacgcagctgccggcgagccgccgactggctggtcccctccatccacctcaccctccccgcccctccctcccggcagccccagccccggcgagcacccagctagccgcctcctgcaggggctcgggagagcaattcggcggcccctgcagggcagctgaagccatggaagcctccgcaggtgatgacaaggaccccggggatctccgggcccaccgcccagctgcacccgccgcagtccagagtgccgagtgccagggggtggggtgggggccgcgggccgcgaggaggaggggacggagcacccggcaggcagcctgccctccaagccttctggctgcagcggcccagctgtcagcggccgggggctcagctgcctgggtgttccccgcccgcgctcacccgccccggtctatctctttttcctaaccccgcaggtcgctgatcagggccaggcggctgcagcagcgactgcagaggcgctgcgccaagccgggccggagtggtgcgagccggcggggctgcggagggccagtggactcaggtgaggaggccgcggcggagcggggagctggccctgcgctgcaccgcggcaggtgggggccgcttgcaaccgctcgctgcggtagaatcccttggagggcaccagcctaagaggggttaatcgtgactcattcttaccctcccttcattcccctacatccctttaagcgcttccctccctccccctccctgaaatgtaagaattagagggtgctgattgcagcagagaagatgcccaaagtgggtgattaggaggcttttagggaacccaccccccaattttatttgtcttccccttctggcatttggcaaacatttaagcttctcttttccttcttggaggaggagcaggggtacctgggggtgggagaaggatgagaccccacccccaccccaaggtcaagtgccaatgactgcttccatcccatctttccctctgagaagcatcagggccctgcagtagatctggggaaaaaatgcccataagtcctagagtggacgatctgagcctccgtctccccggagcttccctgggatgtgaagccttccactccccagccgggatctgggctgtttgcaacacctac

SEQ ID NO: 8972 - DNA, 6000 bp, Homo sapiens
aacctgggaggcagaggttgcagtgagccaggatcacgccactgcactccagtctgggtgacagagcaaaactctgtttcaaaaacaacaacaaaaaaaaaaaattagctgggcatagtggtgcttttttccggccccagctacttgggaggctgaagcaggaggatgatttgagtccaggatgttgaggctgctgtgaaccatgttcatgccattgcattatagcctgagcctgtgaagaagaagaaggaagaaggaagaaggagaaggaggaggaggagagaaggagaaggaggagggggggaagtctgatgggacaatggggtgcgtacatgagcagaggagataggaacatatgccgccctatttgcgtatcccatatatgatgccccatgagcacataattccagtgggcccacgacgcatgggagtttagcaagactcaaagccagtacaaggcaggggtgtaatatctgtggttaaatatgtaggaatgcttccagcccagaggggctacacttcccatttaatccagaacttgcttcaaacactaaaagaaggcagtggtgttctaagaagcatgacaactaagggaccctatcctattctttttcattcaagttacttccctggattagccaaccacgtaggctgacaataatgacccagaagaaaaggaaaagatagagaaacccataattccttttttttcccagttctttttcactcatcagtaagccaaaggcaggaaacattggtagaatatgcacataccaagacgtgaagtaaaaccattgagttggctttgtgcagcatttctacagtcctgataagcctgaaatcctgcacatatacaagctacaaaatacaaattgtgtcatttcagtgattccacataggagttaagtactcttatacttgcactgaaacctgttattgctcgatatacagatgaacagtgggatccatgcaaataatttaaaattttgagttttctcagaatgacgttaaatagtagaaagagaaaggctttgtattttagtatctttaactgttcatttttcttgctttttggacaagggaccccacattttcattttccactgggccctgcaaattatgtaggccgctctgctgcttttaatattaaccctcgggcggggggtgagtgaagactggggaaaaggcagtcgaatcctaatagtcattggaggctagaaggacagacatgttatagaatccttgcatttggttcagagatacaccttggattctatgtccaagcagatgggccagcctaggggtgctcaggcctgtcccactctcctcttggaccttgtctcccccttggtctaagtgagcatcagcatccctgctcccacctccccatgcccttcatccctaccagcctagctccctcagttccctccccagcctatgcaggaggacgagcagctgcctttctagaaaaggcaacattaggcctggttccctaacagcagagcctgagacggggcaggcgggggtggagggtgctctcaggagaagaggcaagaagcaggacagggcaggagaaggggatgagcagagaccccactggagtccagcttctggctcatctcacaggaagctctgggatgtgaatgacatcaataagttgttcccatttttgacagaggccgggctgtcatacctctttgttcatccatctgtggctgtaggctaatccggggatggtgatgggattacctcagggttcagcagcccctgctcggccaaaggcaattctcctccgttgaaggggtccgctatgtgccttagccctggaggatgggtgcacttgctctgagagggaatctgggcagatcactggcagtgtccactacggaatctaaccctgaacaacaaggaaaccacagcccagaagtgaccttcacaagaaggcacttggggatttaatggtcagcccaagtcaaagccacatatcccagcttccagacccagactcaattgatctcttgtcacagacctgcccaggagacacaagggctccgcgttttttcattttcttcatctgacacatgggagtgacaacactgtctcaccgggctgttgtgagaaatagagaggttggggcaagagtgccccaggcaggacctagcacagagcagtgtgcaacacacatgccacgaggataatagttttaagacatcactgtcgttttctttctcacactctctgatgtgagacctgctccctcttgcctgaatgtgtattcatctcaggaagcattggaattgatctaggtggcgtgcaaagaaaaaagcaaaatactctgtgttcagtatctgacttccaaacttggatttttgaattccttagaaataattgtggaaagcagggtttgttgtgagagagaagaaatctgccaattcctagatcactccttcagacaccaagggctaaacccagccaccagacagcaaaaacacatcagcccctgaggacaagggtctctgtttcatttgctgatgaatccccagagccgagaactgactctgaccccagtgggtgctcatttttatctgtgaggagaaaagtggagttatcgactgtgtggacagtcaggtacaagggaatttgatagtcctatctggagggaatttctctccggagatgaaggtgttgtagaaagcctttctcctctggcaacagagaacaacaagagcagggtaaaggcaggaggcggagcttgcagtgagccgagatcgcgccactgcactccagcctgggcgacagagccagacgctgtctcaaaaaaaaaaaaaaaaaaaaaaaagagcagggtaaagggctgctgggggtcctcactcatcaggggagagcgcttggggcacccccagcagaaaccttactcaccagtcctctgggccacgctgtcctgtggctgcacagctgcccgtgctgcttctcacatggaccggggtcctgcactggcatggccctggtggggagagggatttgcggctgcagtcctgcagtatggatgccagagaatgcaactgagatcctcccactgccctcatgccccggggactggggcggccctgcaggaaccagttgggtcggagatcaaggtgtgggacaaagagaaaagcttcaaagcttgagatgaaccgttgcacgtgcattttagaggtagctcctttgccccttccctcgccaagcttgcatgaggacaggcactcctactcctgacccctgagaaagtacatgggcatgatcagaggctaggtctgtccttgacacccacaggagacttgccctggggaaggctttttattctgttgtgtcatagaatcctttggcatcctggtaaggtccgtagacccctttttatatttttttttatttttgagacagagtctcactctatcacccagggagtgcagtggtgcaatctcagctcactgcaacctccacctcctgggtcaagcaattctgcctcagcctcctgagtagctgggactacagacacatcccaccacgcccggctaatttttgcatttttagtagagatggggtttcaccatgttggccagactggtccggaactcccaaccctaggtgatccgtctgccttggcctcccaaaattctgggattacaggcgtgaaccaccacgcccagccacagaccgcttttcagaacatagacattaaatccataaaataaaacactaggattacaaaggagaccaatgatcctgaaataggcatcaaaatcactttaaatatctttcatataatgacaatatatgcttcctaattaaataacaagatttcatggcaggtctctaactatcataattttgaagttgtgataacatgtaagatattttgagacatccccagtggtttaattgggaaaaaaaataactgtgacttttgctgagacaaaaatcacatctttgcttacattcatgattgagggaaatgctaaatcgcagttaaggctaggaaaagtgaaagtgtagtattttctccatcactattcacaaacccacagaattccatccacagctctgggggttccagggactccagattaagaactccacactctgagaccttatgactgccttccagagggtccctctgacactttagtgatggttttcaaagcagccaaatctgtgcctccctgaagccagggaggaaaagctgctgagggagggggcgggggctgagcgggaacattcatctgtgtgggctcaggacgcctgcagcaggatccacagtgcaggctcccagggcctggcacagactgactgattccaacgcccagtgccactcctgggagtatgcattttatttttaaaaatttattattattatttttctttttgtggagatggggtctcactacgttgcacaggctggtcttgagctcttgggctcaagcaatcctcctgcctctgccttcctaagtgctgagattacaggtgtgaaccaccacatgccagaatctgcattttaaacagaagcccaagtaataacttaaacaaacattctagaatttccctggtgctttgtcccaatcagggactcaagatagtgggagagggcctgggatgctcctcacacctcctctggctagagtgccagcggcatcattgccaggagataagcctgcagctcctggcccctccagggcccctcatgtataactgatgcctgaaacatgaggccatgctgcctctttgcagggaaacctgagaagaggagtgtgtggccggattgatgggccgggaactcgtcgccttccttcacccgtctctctcccccaaacttcacccacctccacattcaatctcaaaccaagaagccccgcctgctgtcaggtctaggaagggaggccagccaccatgagggcaggaaagcagcccaggctgaaggcgtgcatacaggagcacgctgcgtgagcctgtgcaggaccccagcagtgctgctgaccatgagccaccaggtaaagggcctgaaagaggaaggtgagtccacgtcctgatcctgcggggcccgcccacagggttcctgggcagcagcaggggatgggggaagcacatatggtgttcagaggcatagggaggagctgggtttgagtccagggcctgtcccctgtgcgctgagcgacctcggctggttattcaacctctctgatcctcacgcatgagatgggggtagtcatcacctccttgcagggctactggaaggattcaagacaacctgtgcacagcacctgtgttcaggccagcactggagactgtcacggccgatgcatgctcctcagagcctgctggggcgtctcagccacctattgtctcggttagggttgcctgttccgagcaagcccctcagcagatttctatctgtctctgtctctgtgcagggcagggggtgggggatgttctgacctcatgactgacagtatcagacaaatgtgacaggcaggggactctataatttgctgagtaaaatcattggagctgggtcccagtttgaggcagccacaaatcagctgaggggtcccacagtgaccgggggtctgcagggagggggactcaccagaggccagccatttgtcagcaatcctgtctcttacagcacgaggcggagtgaaagggcgggtgaagagcggctctccacacacaggtgagatggggtggtggggtctctggggagcctgcagtgcctgggtgccctctgcttagcccaacagtccagccacccatccaacattctccttcatctccttccctctcattcaacaccctgcatggagccttcctgggaggcaaggtgtttaacatgggagggggcagagtaccactcagagaaggtgctgctcagccctcggtgtcaggggagactcccagggttagtgacactctgagctgagccttgggaagcagtgaacattcaccagacagagggcagggaag

SEQ ID NO: 8973 - DNA, 6000 bp, Homo sapiens
ctcccaagtatctgggacgtgtcaccacgctcagctaatttctacctttttttttttttttttttttttttttttgagactaaatctcactctgtcaccaggctggagtgctgtggtgcgatctcggctcactgcaacctccgcctctgggttcaagcgattctcctgcctcagcctcccaagtagctgggattacaggcgtgtgccaccacacccggctaattttttgtatttttagtagagatggagtttcaccttgttagccaggacggtctcaatctcctgaccttgtgatctgcccgccttgggcctcccaaagtgctgggattacaggtgtgagccactgcacccggccacatttttttttttttaagagacaagttttcgctatgtcatccaggctacaacatagtttctatttttatttcaattgctttaggggtaccagcggtttttggttacaggggagaactgtatagtggtgaagtttgaaatcttagagcgcccatcacccgagtagtgtacattgtatgcaacatgcagttttttttatctgtcaccccccgcttaccctcctccttctgagtctccaatgtccattataccattctgtatgcctttgcatacccacagcttagtttccatttatttatttttatttaatttattttttttgagacagagtctcgctctgttgcccaggctggaatgcagtggcgtgaactcggctcactgcaagctccgactcctgggttcatgccattctcctgcctcagcctcccgagtagctgggactacaggtgccgccaccacgcccagctaattttttgtgtttttagtagagacgggtttcaccgtgttagtcaggatggtctcgatctcctgacctcgtgatccacccgcctcagcctcccaaagtgttgggattacaggagtgagccaccgtgtcccgccagcttccatttataagtgagaacatatggtatttggctttccattccttagttacttcacttagaataatgacctccagttccatccaaaagacattatttcactcttttttatggctgagtagtattccatggtgtgtgtgtgtgtgtgtgtgtgtgtgtgtgtgtgtgtgtgcatgcacacacatagcacattccctctattcactcatcagttgatgggcacttagattggttccatatctttgcaattgtgaactgtgctgcaataaactatgtatgcaggtgtctttttgatataataacttattttcctttgggtagatatccagtagtgaggttgctgaattgaatgtagatctctgtttagttatctgataaatcttcatacagttttccatagaggtccagtctacaatatagttttaaaggtaaatcacatttaggcttgtaatggaagagtcggctctatgcctttcccaagccaagcacttttagttctttttgttatttctcctgtctttatctctatgcttagatttcttgctatttccttttttttcttttttcttttcttttctccttcttcttcttttttttaaaagacaatttcttgctctgctgtccaggctggagtgcagtgagctgaggctcactgcaacctctgcctcccaggctcaagtgatcctcgtgcctcagccactcaagtagctgggattacaggtgcctgccaccatgctcagttaatttttgtatttttagtagagatggggttttaccatgttggccaggctggtcttgaactcctggcctcaagtgatctgcccacctcagcctcccaaagttctgggattacaggtgtgagtcactgtgcatttcttgatttttctttatgtagttgttatctgtggatttctgctatgaaattaaggcgttagtttttctaccaccctcccctcaatacacacatccagatacacaaacatacactccctccttccattttcagtaaagctcaattgctatttggaatcaatattcagtgcttttgttatgactatgtaaatattatgtttaaatttgtgctacctggagttagtaattactttgtttttatcatttgcttagttttctaggcatcactcattaattcaatcgcaaagcttccagtgtaactgaacatttactcaatatagccaaacatagctaataatcagttgatttcattttcctctggagacatcgctcctagagcacatcttctgatttcaggctgggttggttactttctttacccgggggtatagttgacatcccaggcctttctcatcgtcccttttctgtgcttaatctcatttattgaatgccatattgctctctttcttagtttaattctttgttttgctgaagcacatcctccagtagctttctaagaaagggtatatgcaaggtcaaatttctgagaccttgtatgattgaaatgtcattattctaccctcccaattaataatcattcagacctatacatttctatattagacatcattttgagggcatttattgtcttctagctaccagtattggtgtttagaagtgtgataccattcttgcttcagatccgatgtatgtgatgtttttatttggtggaagctcttaggattgtctttttatccctgctaatgtgaatttcattatatgccttgatgttagctgccctgtttcatgtattgggctgtgaattggtggaaagttatggtctagagaatcatgtccttcaattctgaagagtctcttgatttttaaaaatctttcccttctggtcgggcagggtggctcacacctgtaatcccagcactttgggaggctgaggcggtcacatcacctgaggtcaggagtttgagaccagcctggccgacatggtgaaaccctgtctctactaaaaatacaaaaattagctgggtgtggtggtgggtgcctgtaatctcagttacttgggaggctgaagcaggagaatcacttaaacccgggaggcggaggttgcagtgagccaagatggcgccattgcactccagcctgggcaacaagagcgaaactctgtctcaaaaaaaaaaaaaaaaaaaaatagaaagaaaggttttcctcctcagagcactccctcaataaaccatgtgtacaagtatccccatctcaggctctacttttagaaattatgacccattgatatagtctgaatatttgtccaaatctcaagttgaaatctcaaatcccaatgttggaggtagggcctgatgggaggtgtttgggtcatgggggtggatatttcatggcttggtgctgtccttgaaatagtgagtgagttctctcaagatctggttgtttaagtgtgtggcaactcccctaaccaccactctctcccttgctcttcaccctttgccttctgccatgattggaagtttcctgaggtctccccaaaagcagatgctggtaccctacttcctgtacagcctgcaaaactgcaagccaattaagcctcttttcttataaattacccagtctcaggtatttcttcatagcaacgcaagaatggcctaatacacccaccatctggtgcagtgcctggcacataggaagcacttaaataaatgattgttgaatacaaaataaactctgagaaaatcacagacagaactctcctatacatgcatacagagcacctggtgcatagtaaatctttaaggagctttagactctccgatccccccatgccctgcaatatggagtagcctcatcttggtggactcatcaggacatgctccccaggtctgtatgtccaggaatgcaattgtgtggatgcatccaggattgatcaggctcagggaattgccaatcttaaaccttaatgttcctttacaagcacaattggaacttaatgccaaaaaaaaaaaaattctgggatcttctgttataccctatcccattacggacaaatctactcgtaaaacccagctgctggataagcaagaacagccagaccaagggcgatcagtgcatggtcattagggctggtgaccctcgtctctgggcaaggcctgctggaggtggatatgcagcctgattcttgttctgtctcctcctctcctaggggctgtatggccactgtctcccattttgccacccctaccagttttccttcaaagtatgatatgtgggcaaagattaagttctcttaattatgacacatttccgctcttgcctctcaagtcactaaactgagatgtgctggacccctatggccaccacccatttacagatgatcagtgtaatctgatatactgataatccaagtgactaagcccttcattatatgttcattttccttaactccattctcagactgtaaccttaacctctaataagggggttactaggtcatagtcctcttaagttcatgtcctctacctcattactggaaccccagtatgcataacaccccctataaactgtagtgcttagaatacctgaacagccccctcctctctcacccccatttagcaggttatgcggaagcccagccccagaagcctcaggcagtcccctggcagagcccatctctgcaatctggaacttcaggcctgaaaaatcccctagaaggacccacagggaagacagctggggacagagatattgaatgacttcgccctggacctgcagctctgcaaactcacaggaagaagaaagcagacctcgctcccttggacagatgcccaagtagtaatggggttagaatgccttcctgacaactcagatccccaagggagggccctagggcagagaatcagcaaaggcaagaggatgagtcttagttctcagaaatccctgacttcccagctaagccccacctaggccaccagctgcttatgaggtcagagcagcagcagcagcagccccctccctaccccacggccccacgtggtaacaggtcacaatgccccgggtgcccactcccagaatgctgaccaaagtgggaggaggtgaggagggtttgctgggtgggtatgggggagggggagactctgcaggagcctaattccccactctgagctcacccttctgtctgcccgggccctaccccttcccctactctcacccttataatccttttcagcactaggtcttcccgtcacctccacctctctccatgacccggctctgcttacccagacccgaagcacgtgaggatccgatcccagttcctccaaggggcctgggtgctggggaggggtcaggtagtccagtgcgtccacctgtatccacctggggccctagctgggcccagctcctggacagtgtcctatggctgggggcactaggactgacaatccaggcagtcttttccaccactggcccagccctgctgctgcttctggtcagcttcctcacctttgacctgctccataggtaagtgggcagcagcctggcaggtgggcattgtaggcgggcgggccagtggacaacttccctaagcccagtcaccaccctctctctccacaggcccgcaggtcacactctgccacagcgcaaacttctcaccaggggccagagtcagggggccggtgaaggtcctggacagcaggaggctctactcctgcaaatgggtacagtctcaggacaacttagcctccaggacgcactgctgctgctgctcatggggctgggcccgctcctgagagcctgtggcatgcccttgaccctgcttggcctggctttctgcctccatccttgggcctgagagcccctccccacaactcagtgtccttcaaatatacaatgaccacccttcttcatcaggcccccttttctccttcctggctgggcaggtgggatgatacccctttcttcccagcctgaacctcacagtcctataatataggtatcagatacctggatctgagtctttgggcagcaagagaaggtaggatactagccagggagcccaaggaagaatgtggcagccacctcagagcctgtggattgggggcagccactc

SEQ ID NO: 8974 - DNA, 6000 bp, Homo sapiens
aaaaaaaaaaaaaaaaaaaaaaagggagagccgggtgcggtggctcacgcctgtaatcccagcactttgtgaggccaaggcaggtggatcacaaggtcaggagatcgagaccatcctggccaacatggtgaaaccccgtctctactaaaaatacaaaaattagctgggtgtggtggagcatgcctgtaatcccagctactcaggaggctggggcaggagaatcgcttgaaccagggagttggaggttgcagtgagccaagatcatgccactgtactccagcctggtgacagagtgagactccgtctcaaaaaaaaaaaaaaaaaaaagagtcaagtcatacacttaagtttgatatatttcactgaatgtaaactgtgcttcaagaaacaaaacccttccatgcacaaaacacctagggtgacatctgtttcctgcactgaatatctgattttgggagaggagccctaggacaagagacagcaagaggggctgagagcaagcagggcaccagaagctgggagcgtggagggacgtgaccagggagaagtcccctgtgttgggggaggcctgtgaattttaggaactctgatatctaactctcaaggcatgtccttgccaagcagcaatacaattaagtgtgcctaatcttatggctcccacactttcaattgttcttcctgaaacaattagatatgaagccgcaagagcccaggcagggctggattgattcttgaactaatcaacatttatgccctcttggctaaactaggcagagttggttttattacagttcagatgtgattaagcacactgtattgtgtcagcggcaggtgacgagccacacagtgtcctgaggcctgatgaaagggctatgccaaccacagtcccagaggaggagctggctgtagcagcgactgacccaggagctgaagtgagccaagccccctcctcctgagacccctgagaggtaaggcaggctcatgccagaccctattacgtcccacatcatggctagaaccagaaccatcttacatggctggtcaaggcaaggataaccccaggaagtcagaggacttggagactctgtattgtaggaaaaaaaaaaaatactagaaaagacactggagcgtcaccagcagtcacccctggatggtggcattattattattagtagtattttttttgagatggagtcactctgtcgcccaggctggagtgcagtggcatgatcttggctcactgtaacctccgtttcctgggttcaggcaattctcctgccttagtctcctgagtagctgggattacagatgtgtgccaccatgactggctaatttttgtagatggtggcattatgaatatggattttggttttcatcatcaaatatttctgttttccccacattagctgtaaacagtatatatttttggtaaattaagttgaaagaatgaaaaaattaaaatagtataaagaatatctgtttaagtgcagtggagtgtgcctgtggtcctagctacttcggaggcttagatggaaggattgcttgagcccaggagttcaagaccaaccagagcaatgtagcaagactgtgtctgttttattttaaaaataaataaataaaacataaagaataactgtttaaaatactattcaaaatgaagtcataaaggaggggattatgttttttagtcatagttccctcaagggctcagaccggagaacataaccgagtttggagccctctggcactgtctttgcgcctgacctctgctctccagggggtgacgtgagctggtgggtgctgagtcatcatgggtgggtcacagcctccctcggaggcctggagatgggcctgtctgtgctgaactttactgggcagggggcagctccaaggccctcactgggggcagcctagagcatagatcactctctggacttgctcttctcctaataaatggacagtgatcaatgaattacacccatgaaatagggtgggatgcaataagaaataaaagataatataaatagccagatagggtcaaaagatgatttattttactttatatttttgaaataatttcagatttacaacatagttgcaaaaataatgcaaatgtttacatcttacataacccagtacaatgatcctaacactgacagattgttgttgttgttgttaatttgagacagagtttcactgttgttgcccaagctggagtgcaatggtgcgatctcggctcactgccgcctctgcctcccgggttcaagcgattctcctacctcagcctcctgagtagctgggattgcaggtgcccaccaccatgcctggctgatttttgtatttttagtagagacagggtttcaccatgttgtccaggctggtttcaaactcctgacctcaggtgatccacccacctcggcgtcccaaagtgctggaattagaggcgtgagccaccatgcccagctagattattgttaactgatccaaaagccttatttggatttcacctgaagtcctttttctgtttcaggatccaacccaggttcccatattgcattcagttgtcatgtcactttggtgtccttttctctggagcagtctctcagtctccttgtttttcctgaccttgaaatttttgaagagttattctgcagagcagtgctatccaatagaactttcagtgatgatagaaatgctctgtttgggcctgacgctgtggctcacacctgtaatcccagaactttgggaggctgaggcaggcagatcacctgaggtcgggagtttgagaccaacctggccaaggtggagaaaccccgtgtctactaaaaatgcaaaattagctgggcatggtggtgcatgcctataatcccagctactcgggaggctgaggcaggagaatcgcttgaacctgggaggcagaggttgtggtgagccgagatcacgccattgtactccaacctcaacaacaagagtgaaactctgtctcaaaacaaaacaaacaaaaaaaatagaaatgctctgtgtcaccgagtatgaagccattagctacatgaaaatagcatttgaaatgtggctcatgggccaggtgcagtggctcacgcctgtaatcccagcactttgggaggccaaggtgggtggatcacttgaggtcaggagtttgagacctgcctggcccatatggtgaaacctcgtctctactaaaaatacaaaaattggccgggcgtggtgacatgcgcctgtagtcccagctactcgtgaggctgaggcaggagaatcacttgaacccgggaggcggaggttgcagtgagccgagattgggccactgcactccagcctgggtgaaagagtgagattctgtttcaaaaaaaaaaaaaaaaaaaaaaaagagaaatgtggctcgtgggtctcaggaactggcttctaagtattatttaattttaattaaaatagctacatgtggctagtagccattgtattggataggacagctgtcaaatgtctctcgttttgggtttgcttactgtttccctatgattagtttcagatcatgagcttttgataggaataccataagcatgttgttgtgttcttctttgtctaaatctttataaaagctgttgataggtggcagggaaccacctagtcaggcagtgggattgtttgaatgctctttgaggtccagcaaagacaggagtgatagctgcacttggaagcccgctcctacactttcaatgttcttcctgaaagaattagatatgaagctgctagagctgctccggtggggagcaggcaggattgattcttgaactaatcaacatttatgccctcttggctaaactaggcagagctggttttattacagttcaggtgtgattaagcatactttgtaaatgctgaaggttgtgaaatattcacagggatataaagtacagtaataaaacctcacttgaggctgggcgtagtggctcacgcctgtaatcccagcactttgggaggccgaggtgggaggatcacctgaggtcaggagtttgagaccagcctggccaacatggtgaaactccgtctctactaaaaatacaaaaattagccgggcgcagtggcatgtgcctgtaatctcagctacttgggaggctgaggcaggagaattgcttgaacccaggaggtggaggttgcagtgagccgagatcgcgccattgtactccagcctgggcgacagagcatgactctgtctcaaaaaaaaaaaaaaaaaaaaagaatagaagaccctgtgcctggaagatcgtaggtgctcagtaagtgctggcctctgccccagaaggggaagggcgaggcagatggcaggaactgcgggaggtacctgtcccaggcccttgggcgtaagaggcctctcccacgcagcacccaacccatacccagcctgcccgccagccaaccttggcgtccctgccttgcgcctacctacccagcagtcccccgcccgctcccactcccacaggcccagcgtgcacgtctccaggataggcatccttgcccctgtgacttcagcggcacccaacgtttattgggcactaactgtatgccaggccatgggggtgccggagagaacgacacgaagaccctcacccctcaaagttcccagggggaggaggggctgcttcacttgggaagcgtggggatggaattctcagccccccgatgactccgaggccggccacctgcctggtttctggccggacaccggacttcccctggaagttgctcgagactgcgcgcccccagcaaaaaatcaggtcggttctccgagcccagtctagcgcttcccgacccgcaaaccaaggcccagtgaccgtccccgctgcgcagccgcctgcgtcgccagccaaccacgcgcggccgagtagccccgcccctccacatggccaatggccgcgcgctctgcccgccccgcctcctcgctgcgggaagggtcctgggccccgggcggcggtcgccaggtctcagggccgggggtacccgaggtaagatcgcttcccgggcgttgggtcctttcggctcagcacgcacggacgcctttagggaaggtggctgcagcggcaggacggagtccgccgggacgccctgggtctggggtgcgcggggggcccaggaggggacaggacgcgcggggatccggaagagcgggccctgtcgcaagagtttcgggaacactgagggctccaggcgccgcatccagcatccggggaaaagggggtaggtggcgctgggcgtctgctcaggctgggggaaaggtagggccagaaggggacgggcagcggccgctgacctcctcctgccgcccgcgggcccagggtgacgctaaggtggggccgagcctcgaccgggtgcgcctagaggtcgagtgctgccgccctccgctgggtctggacagttctcggcggcgacaccagctcaaaacggcctccccgccctccgcggacctgggtcgcgcccaggaatccgatccaaggctgtgaggcctgtccctttgggaagggtgggtgtttatttccgggatgcactcagagcctctggacagtcaggtcggaaactttgctgtattgggaacactctgtcacctacttccttctcagttgggaaggaagtgccaagaaaacatgaaacaaaccaaaaacacgaaaaagggattctctgtatggaagccgtgaagcctcaaaaatatctaggaggacagccagcgacctgggacctgtggcagccatgtgaaagcagggttaatgtctggactaaatgttgcttccacctaagtgcaccctcagcctccctcccgccaagtgaccttgggtcctctttgggcttgaaggcaggtggctgtgtgggtctcgctgcaggggtctctgtgccctgcaaggtgtatgaccagttgcagtgaggcagcaggttttgggttcaaatcctgtgctagcctctggccagctgtgcaccttggcaacactttccctg

SEQ ID NO: 8975 - DNA, 6000 bp, Homo sapiens
cctctgtctgaagtgctatgccatgtgatgcctcaaattgctacagctgtcaacaccagcttgggtagggcagagtggaaacagggaagaaacgaggtctgtgaagatataaatataccattgaatgtaccctgacccgaagaggatcctccagtattcaaaacaccctttccagcgcccaccctctcctccagctcctgcccactcctctgctccccgcagggtaaaactcagaaatgttgtcgctactccctcaccttccattccctcttcaatttgcttctgcccccattaatccattgaaactgctctcctcaagtccccaaaaacctccacgtcaccaaatccagtgagcactatcctgtcttcacatgacttggcctctcagtagctggctctgccttcttgaaacaccctcctctcagcttccagaaccctcttatttcactggctgtcccttttcagtctcttcctctggttcaaagtgtggtctctggcccagcagcatcagcatcacctaggcacttgttagaaatgcaggttcctggaccccatcccagacctgctgaatcaaatctctggtccgggaggggcgaggcagcaatctgtgttttagccaagtcttccaggtgatgcacactagagactgagaaggactaatccgaaactgtgggcattcctcattacgaaatcctgattcctttctcttccctggctacattttctcccatgatgatgtcatctaagcccgtgactggaaatcatctatactctgacagcttctaaatgtgtatcttcagcacccatctggggattacacagccatctcaaattcaacatgtccaaatggaaggaaggaactccagatgttccctctaaaatctggtcgccatccatttttttccatttaagaaaatagctccaccattcccccagctgtttattaaaaaaacttaagtcatccacgagtcctccttttccccaactccttaccctattagcaatagtatatctagagggtctatctctaaattgtcatgaatctgtcctctattaccactataggccaagccacaattttctctccccagcccactgcaaaagcctccagccaggtactgctcatgcccacaaaacaaccagagtggacttttaagaaggtaaatcaggctaagcatggtggctcacacctgtgatcccagcaatttgagaggccgagataagcagattgcttgagctcaagagttcaaaaccaacctggacaacatagtgagacccccgtctctaaaacaaatacaaaaatcagccaggcatggtggctcacgcctgtggtcccagctactcagaagactgaggtaagaggatagcttaagcccaggaggcagaggttgtagtgagccgagatcaccccacggcactccagcctgggcaacagagtgagaccctatctaaaaaaaaagaagaaggtaaatcatgtcgcatcattccccttcttaaatcttcaagggcttcctatcatatttaattattaaaacccaaacatctgtcatgggctgtcaggccctatggtcactgtctgtatggcttcctgtatcctctttgaggtctgaagtcagagactgtaactatttaattcacactaagtgctcaataaagtggaggaaataattctccttttgtgagaagatgaatttagagtctaacttctttagtttctccttacttgctgaggaggatctatatgatgtggtcaaatcactttcagccaggacacaggagatgggaagggagacttccaaagaatgacttgatgatgctgtgaacctcagcacaatagggctctgtgggcaaacacagtagggtttgacctccaaggacaaaccctacaccccactccccacccagtccggaaaacgactttcactgtttatagtgagatatgggtggttgtggtcatgggagaggcaatgggagtgagtttggaatgaggaattatgcagggccatttgaatagccacttcctgtgggttgcccacccttggagtggttcataaggtcaataaaaacctctaagaatccataggccagaccatcaaccccattgtggcagcttttaaaactggcaacaaggtctttgatactcttcccattgaggagtgggctccatgtcctctgtccttgaatctgggggctatatgactttttttttttcttttctgagacagagtctcgctctgtcgcccaggctgaagtgcaatggtgccatcttggctcactgcaacctctgcctcccgggttcaagcgattctcctgcctcaccctcctgagtagctgagattacaggtgcgcatcaccatgcctggctaatttttgtatttttaatggagacggggtttcaccatgttgcccaggctggtcttgaactcctgacctcaagtaatccatgggcctcggcctcccaaagtgctgggattacaggcatgagccaccgcgcccggcaatggggctatataactgttacgtcaacagcatacagtggaagtgatgctacctgactactgagcccaggcaggaagtggcattgcagcttcttgtttgctgaaactctcacacttggagtcctgagccaacatgtaagaagttcatccaagccgagaccaccagaccatgaggaaaccaggccacacagagaagccgcagctaggcaccgcaatcagcacatctgatcttcaagtcctcctagcccaggtgccactcaggcaagtgcataggcttcagatgactgcaacccccggctatcaaggtacccctagacttagagtcttctcaactgacaccccaaacataatggggcagaatcaagtccccgctgtgcctgtccagctccctggcttaaacaatccattggcataataaaatggtagttgttttaaaccacctaagttgtggggtatttgcagcacatcagtaataaccagaataggtcataagtcaatcccctttggttccctagttctttccctccaagaaatcccaggccatttgagccctttcctgatgggaggaaagcagtcgaccagaaaatacaattcttttgaggaaaagatgggttttagcgtcttggaaccaagcttcacagagcgccttctgccagtgggcagccagccccttgcctaggctgatctggtcacctacttccagccccaccccagctctgtcctcccacccagctctgtcctccctgcaggccctgagcctctaggagactcaaagagacactgtgctgcccgctgaattcatctcccagtgagccatctctgaggaaaggaggtaaggctctgaatgcgatgtcaacctaagcattacataacactgataggttgtaaaatggcctcgctgcctagtgctcattctaactggccacaatccagtcctccctgttgcactgagtcagctccctccaaaggcggcgctttccaggcctcctggttgccctttcccagcagacctttcaagtgctcacccacactcacataaacatggcccaggcactgtttacagcagctctcctctgtgcattctcctggcttctcctgtctctcgccatttgtacccctcccctgcaacttgagtgacagtgattggtcctgagatgcaaatatttgatgcacatatgtttacaatgcagcctcagcttttttttttttttttgtaaagagacaaagagtgagacagggtcttggcctatagccctgtggcccaggctggagtgcagtggcacaattaaagctcactgcagcctctacctcctgggctcaagcaatcctcccatctcagcctccccagtagctgggactacaggactgtgccaccgttcccagcaattttttttattttttgtagaaatggggtctcactatgttgctcactctggtctcaaactcctgagctcaagcaatcttcctgccttggcctctgaaagtgctgggattacaggcctgagccactgcacctggctgtcaacattcttaaatctctttccttacatgcttcctaaacctctcacccaaaactaggagactagatgtcctattttccccagggcatgcctggtttacgcccatttcactttaaaagtgcccaatttgggtaataatttataagatccccctccctctaaatcctgtccttctatcacttcatccttcgctctcctttaaaatgagacagttgtcagcaggaatcctgcgcaagaacacaccaccctgtttcatagaagatatctcaggtaatgtgcaaacacgggtttttaaacggagcgcatttttctcatttgttaatatcaccacctaaatcatctcttgcctaaaacaaggagtagaaagtgaatgaaggaaggaacaggtgatggtcagtgtcctttctacgcctcaaaatttaagagtttatgtgaaaattcataaatattaatctcaatccaggttaagcaaaattttttgctctcctctttagaaatttctggttgccaaagttccagaaattgcttcctcattcctgagcctttcattttctcgatttctccattatgtaacggggagctggagctttgggccgaatttccaattaaagatgatttttacagtcaatgagccacgtcagggagcgatggcacccgcaggcggtatcaactgatgcaagtgttcaagcgaatctcaactcgttttttccggtgactcattcccggccctgcttggcagcgctgcaccctttaacttaaacctcggccggccgcccgccgggggcacagagtgtgcgccgggccgcgcggcaattggtccccgcgccgacctccgcccgcgagcgccgccgcttcccttccccgccccgcgtccctccccctcggccccgcgcgtcgcctgtcctccgagccagtcgctgacagccgcggcgccgcgagcttctcctctcctcacgaccgaggcaggtaaacgcccggggtgggaggaacgcgggcgggggcaggggagccgcgggggccgagtgaggaccccgggcctcgggtcccaggcgcaagggtgcccggccgggcggggtcgggaccccagtgaggaggggccgggggctgccccgcgggcgcgtgacgcgtctcgggcctgcccggctgcgctggtctccgctcgggtgaggcggcttggcttcgcttttcaggttaggaaagctccctttactgcgcgttggggggctgggggagctggcggagccccgttagggaggtcggtggcgccggggtgtctcagcgccccctgcaccccgcgcgggtccggcccagcgggcgatcgctggcgcccagggaactccgggagggccgccagcgggctccgcagggcgcggggcggggaggggcgcctgggggccgcggggctcgcgctccccgcccgttggccgcccctcggaggccgagatcggggcccagaacgccccttggcaaggcctggcgcttccgcgatgcccagagggtgcttggggggatggagagaggggcgcccgccgggggagttccgggagcctcggtgcctcccgccgcagctgcagcgttcctcccgggaggcggcccagcccttcatcctcgccgcctgagcttctccgaggggggctgcagccttgcggccgttgccaccgcctggagaagcggcccacgcggactgacgggcgggggcggggcctcgggcctcggcgggggcggggtccggggaggccccaccctctgttctccaggggcggggagagaggagctgcaggtctgcggcctggccccaggtgcgatggcggaccccagcttggccagtcacattcctcccagtccccctggagggagaacgctggccatggggggctccaaggaacaaccagcctcggatgacgacccttgggtcaccggtctccccacctgtgcggcaggcgccttcacgtttcattattaaacaatggggagaaatccat

SEQ ID NO: 8976 - DNA, 6000 bp, Homo sapiens; identical to SEQ ID NO: 2956

SEQ ID NO: 8977 - DNA, 6000 bp, Homo sapiens
catcattagttagattctcataaggaacgcacaacttagattcttcgcatgtgcagttcacagtagggttcaccctcccatgagaatcgaatgcgctgctgacctggcaggaagcagagctcaggtggtgatgctcgcttgcctgccgctcgcctcctgctgtgtggcctggttcctaacaggccatggattggtactggtccacagcccaggggttggggacccctgtaacaaaaggaaaacaagattcttaaatctttacaggaaggaggaatggaatggaaaataaagctagttgtacactaaatgatgttaacaatccctttatcacctttaaaatatgagcagagaggaaagaaatattaaaaccaaccctttttactttcttatttgtagataatgcctgccttacgagaatgttatttcttttaaaggttccaaaacaaccatataaaaacttagtaatgacttaattgttcacatattctagtgacatcagtacattttcaggaagaaatgtggaaaggttggcactagaagttgacataagaattagtttagccaggtgcagtggcacatgcctgtagtcccagctacacaggaggctgaggcaggaggattgcttgaagccaggaattctgggctattatagtgtgctatgctgactgggtgtccacactaagttcggcatcaacatgttgatctgggagtggtggaccaccaggtttcctaaggagggatgaacctgcccaggccagaaatggagcaggtcaaaattcccgtcctggtcagtagtgggatcgccccgtgaaaagccacggcattctagcctgggcaacatagtaagaccctgtctcttacataaaaaataaaataacaaaaatgaaaaggagaattagtttagatctcttgataatttaaacagtaatctaaattatagagtttaggtggagttaatctctgcaagtcctgaggagctatgcccaaggtgcttggccctaccagcaatgcactcttttgcttacatgtgtttcaaatcttaaatcccatcatttagttttttcctatttaggctgtgggacggtgcgtttattacaatgattgaaacctgtgccttatttggattactggttattcaaaacacatctttgggtttagtgcctggtaattacagcttactcctgtaagatttaactgtcattgattcctagagaattttttttgagacaaggcctcggtgggtcacccaggctggatggagtgcaggggcacaatctcggctcactgcaacttctgcctccctgggctcaagcgatcttcccacttcagcctcctgagtagctggtaccacaggcacccaccatcatgcccaggtttatttttgtatttttggtagagatggcgggcggggggagccggggggtacggtgtgcggggcaggggggtgggggggtggtcctcacagtgcccaggctggtttcgaactcctgagttcaagcagtccacccacctcggcctcccaaagtgctgggattacaggtatcagccaccatatccagctgttttaatttgatttaacttccaatcaatatttacataagactcatttgcaaaactgccttctttacattatcttcttctggttttaggaaacaaaaagtagcccaagtttattgtgtcctagactaaataacacaagtaacactacattacactgcatatctgatataagaacgcagtacacatatttctagactttgttcatttatccccaggcagaaaatattcataatagatttggaataagattttcttctcaaaaagcttaaacttcaaatagaagtgataagtgagaaagaatgattgggttgcagaattttcaaaagcctaaaaacagcctgggcatggtggctcacacctgtaatcccagcactttgggaggccgaggtgggcagattacttgaggttgggagttccagaccagcctgaccaacatggtgaaatcctgtctctactaaaaacataggagttagcagggcgtggtggcatgcgcttgtaatcccagctgcttgggaggctgaggcaggagaatcgcttgaacctgggaggcggaagttgcaatgagccgagatagcgccattgcactctagcctgggcaagaacagggcgaggattcatctcaaaacaaaacaaaacaaaacaaaaaaacaaaaacagaaagcctaaaaacaggttccaagaagttgtagcaaagaggtaatttgttccaatatacagcacagtcatacacagcactttgcaacttaaccaaggaaaacattaaaagtggcaagacaatactaccctctaggggccaaatttttatgttcacaactcagcaaaggatcaatgaaaggatgaactaaacagttaataacaggccagttattcaagattgaacaatcctttctcttttcacgttctcttggggtaagcactacatgattgactacagaagttgggataagacacctgaccagtacattttggttacttatgaaaataattctgatacaagggtggagagagaaaaatttgaaatgaacttcatgaaacgtagaatttatatatagatttttatttatatttttattacagacttactattctaattttttccccatttgggaaaaaagttcagtgacagatattcccagtcccttcagacatatgaggtgcctgtgtgtttaatctacttggatagaaattattacagaattcataaaacaggaaatgaacattataaaccagttactaactgtagaatattttggtttcctctgccccctgccctgctctaaactctacttcactgggtttctgcattttctccatcctttatcccagattaacctgttcatttattgacttctgtcaagttctagaaaatgagatcaaagactgatagctggatgttctcccgtcttaaaatgttagggaaacagtttgttaaaagcatgttactctttagtcataagtattgagcagtcattgtctttcaggccaaaatgccagccactttattttcctactttttaaagacaattagccatcagcagtttgtagtagagctggctttttaaatacaaaacagtttattatattttaattggcggactctattgtatcttggagtttttttctctaattttatattgaagtgaaaaataggaagaacataaaatttgctacatagataattttggggatgttctattttaaacattgataacagtataattccatattttgaaatatacaaaaaatatatacaactaaaatggtatctaaaacagaaacctatgaatgctagctccaaacaataaggcaaataagtgaagagctcaggtaatggtgttattcttgagggcacaaagcctggataaaactagattaccataaatagtagtacggaagttgaagaaatcaacacagtaactagaattaatttagaaaaaattaataaaaggttggacaaataccataagtaatagaaataaaacctatgagagcaacaaagggaaaaaacacaaaaacaagtttgtgtcctcagtgccaaggattagaggcagatgaagtacaggctgaatatagggaatagaaagaagtcccaagacacaatgagtgtcttaggaagcggagagtgaataaaggcaatctcatgaaaggaagggagagactggaatcctgcccactccctcttgccagggttatccagaattaatgtttacctatgagaactgtgtttttaaatagtttttaaattttttaaaatttttacattgctgttgcagaagtttccatttttctctcaatgtcaggatttcaatgtaagaaatagattttttttggataaatacccgctgcttcatctacaatgttgctcactttcagttggcctttccctttcctaactacccgaattaagactttaaactcaactgtaaggtagttcagccatcatagatggggttagtggggcgatagtggagaggcggcaataatcattcaaattcagttcaacactgaattcaacaagaaaaaattctgtaacattgcaaatattgatgtatcaatatgtttagtatactaatctgaatatattaatcagctaattaatggtgagctgattcataactgtctcggatattataggcaagtttcttaacctctctaaacctaagtttccttatctgtaaaagtaataatggaaccctcatcttgcagtcgttgggaggattaaacgggatgatgcactatagcctggttatatagtataattgaaacttttgtactagcaatgtaaaaatttaaaataaaaactatttaaaaagacaattctcataggtaaacattgattctggataatatagtattactgttttcagcaaaacaatcagccattgctattactaacatttactaatgcttatatttttagcatatgcatctttattcaatgctcaaagaggagagaattacagagccaatatttattaatcatttcttctgcactagatactgtaaaccacccacaagaaccgtagggcgccgcacgcaccttggagggggcccttctgccggccacccgcctcagagggtttcaggccagggcctgaggtggctccggccccctcgcggctacgtcggctgcgcggtcatcctatcttgttcgtttctcccctttccccgcccacccccgggccttggctcccggctgcgggccaggagaagagagcgccgcgtacccgctgcttcccaaaacccactgagcctgatgcgcgcgcctccgctgtgccaggggcgccgggaagcccgacgacgacggtgtcgtaaaagcgtcgcgaaggcgtccgcccttggcggcttcctgccacctgtataagtggagtgtgctggggtgtgtaaagtagtatggaggcagcggtagcccagtgtctgagtggttgccgggtctccatggagaagcggctcgccagtgtcccaggctgctgagctctcgccgcccgagaccccgcggcgcggccgcagggccatgctagccttgcgcgtggcgcgcggctcgtggggggccctgcgcggcgccgcttgggctccgggaacgcggccgagtaagcgacgcgcctgctgggccctgctgccgcccgtgccctgctgcttgggctgcctggccgaacgctggaggctgcgtccggccgctcttggcttgcggctgcccgggatcggccagcggaaccactgttcgggcgcggggaaggcggctcccaggccagcggccggagcgggcgccgctgccgaagccccgggcggccagtggggcccggcgagcacccccagcctggtacgtaccgatgaggcggcggcgggccggccctgggctggggtcgccgcccctgcactcaggtaacaagctctgggtggtgcagctcggacgcttccgtttcctaacttttagactcttccctgaaaagaagttactggcaggtcattcggtcgggatgaatttcagggtcaccagcggggtccacctacggtctctgtggtcaagttagaaatcctctcatcccccttctatctgcacccgttgctggaagggccgcctctgcatattgcattgataaaggtagccttcgcttgtcttactaaaagcctatttttaattcttttgaagtgaatccccagtgtttagggcaagtctttgggaatatttagaaaggtatacaggcccttctgtttgcttgtgcaagttccgttcaccatcatttgacctttggtaaccttacacattataggatgaaggtaattaaataatttaggtcgtaattaaaagatcttttaacctttaattatagaaaaagatttaaactattcttgaggtaacggagggaagtatttgtccacttacctgttgatatgctacccagacagaagacacccgagcatgagtgtgggagagctttt

SEQ ID NO: 8978 - DNA, 6000 bp, Homo sapiens
acaaaaaattagccgggcatggtggcaaatgcctgtagttccagctactcaggaggctgaggcaggagaatagcttgaatccaggaggcagatgttgcagtgagcgaagattgcaccgctgcactctagcctgggcgacagagtgagactctcaaaaaaaaacaaaacaaaacaaaacaaaaaaaaaacagagagagagagagagtagtaaccaagggaacaatggactcctgtgccatctcagagattttgagggtactgcattatcacagaattcaggtagcaaaatatgttaaatgagacacagctagtctaaccttaggcctattgtgacagatgtcatttcttggagaacagactcattaaagattttttaaaatcctcaaatgagttttaattcaaccttacagaaaggtgccctgcccagaagttaacaaggttttcctccctcccgagatagcagagtgagttgtgtatcactgaccaaaaatgtaagactgaccagaacagttaactaatcacggattcaaaagacaaaaatgatttatttgctactgaaattttgaggaatgattacctggcccctcaccatttacttatttagggtttgctataaggatgcagttctctatattgccccatgctgaaggcaattcttctaaatgaactcataaatggtatttttttcaggacttagtgtgaacatagccaataaaaaggccgttattctggtggtttgtttcctccactggttaccgttattgcagaaataaccattgtttcattagagtagatgcaggagacaccaaagaagcactaggatgaggaaaattacaccaagggcatgcagactgagtgcattggagcctaaactcaattttctgattctttccaaatattctagggcttagcaatgtatgtgcgaaatattcttgtgcatacattgctcatgcgcacacttatttttgtactctttgctctggatctaaacccttgtgggatagaaactgaaaaataattcttgtgcatacatttatttttcagtttctgtcccacaagagtttagatcctagaaagggttgcgaaggtctttgaaggcaatgactaaatgaattaattgttctatgataagctgaacacaagaaaagttttggtgagtagaaagtctggcttaacagctgcatgcatcttgtttgtttaaattatttctgcttctgttattcgggtgtgcgtccgttgtctgtgtgtgggttgcagagggatggcttggtggctgtgggaacaacagagcaaggagtacatttttacactttactgtaaagtgaactgaaacctcaataaaccaaatttcagctgcaacaaagcccagccttttccttttgaagctataaatacgcttttcttattagtattgttcactaattttcatagttttgtttcttgattctacaaatacaagtcaattgcttgcacaaccaagtatgaaaagatgcccctaacaacttaaaaagtttaattttatttagaataaattttgcataggccattcttttgcatatgccatatgtgggtaaattatcaaatacggaaatgaaataggggttctatagtacataaggcattgttgatttacggcctaatttgctttttattgcaaatggataaatatggatggatgaagagttacatctttgcattgattccctattcaatagatatttcttccatccgtatccttccttccaccctacatcagtttgtcaacttctttcaagactcaccttctccaagagaccttttttcatcaatttcaaccactctcccacctgggatgcctgtcttacttttttttccccctgaacatttatgcagacactgtgctaggctaactggaatctttatgtaaattcttctcatccaaattgaaagttctatgcaagggcctcttcttgcccttttataaaacagcaaccactcaatggcatgagattcataaaggctaattcagtaagtatccatatgaattgaaaaacagcctttgaaggacctagaagatctagaggagatcccaaatccagtgtgtttaggtcacactgcaccctaacagtttctactgaccaccagcagcaataataaaaattgacacagttaccacccacacaggtgtacatatttatgtcaatttctcctaccatcttttagacttgagaaatgaaaagtagagcaaattctggggaacattgttaatatattaaaatgcaatttaatggcaaattttgctccttgatcacttctttgcttattttagagaaccaaagagtttttttccagaatgattagaaagatatttaattaatgtaggtgaaagttgtaggtataatgacctaactcctattgcaatgtatcacagtggataagatgataaattaatgggcatttgttagccatgtttaagattaaatattaaaaaagtcattaaactgattgtgctttgaaaataatccccccagaaaaaaagagttaaaattgctttctttcttctttcaacccatttgagtactctagggtacactctccagtgtcaacaaagagatcatttatatcaggtataattttcaaaggaacaaccatctcatttgtaaatcaactactacattttaagatcaatgaccaatgctactactcacctaatcttttattattaaggcagataatcatgaattaattcagttgatcttttaacaacttatatagtgaagatatctgcaataacatactgcaagagaaattgtcaaaatcttttataggtgtctctcctacttgtgtaatgataaatatcttttggttttcaaagcatcaagcatactggaagtagtaagtattcggttaatgtttatggatctatttgtactttgtttatttatactcattggcccatttggtttaactagccatcccctgagttattttcccaatttttcagatgagaacaaataaaatcttcagaaggtcacaaaaataataagtagtgaatcctggactgaaatctactcatttctgtcctcataaaatactggagagagagagagagagagagaataaatactttattacatgtctcattgttttccagttttacagtactacaggaaaataagtgtttaataataattgctaacatgaaaaaatgtaacacatacaaatgttatctcttccactttcaactgatgagaactgacgttttatcaatcttctgtataaaatcatttctgttaagttctgtaaaatttgcatcaattcttctatatataatcatctttgtaaagttcttgagaaatgtttggatgaaatactgaactacaaacataaaagtcaagatgtcaaaatataatgtcaattttaatattactttatactttgaattgctagtgatctaatgattgatataggaatatgtttgaaagccaaaaacattatatagatactttgtggcagatatgtcagaatgtgattatacttaaaacagcattctataaatttgaagaatgtgaattaatgatagagatttcagatttcagattattatttgatattgaatatagatttttatggaagtcaaaatatggagtaaaaatattatataaggagaaatgaagataatctcacagagttaaagcatgtgatttttgtattttaattctaactgaccatgtgacatttgggaaggtcatttaatttatttgagcctcagttttggggtatgtaaaaccacagtaactcatatctttccttgcctaccctctaagattggggagaatcaaattagataatgcaggtgaaatactttgcaattttccctttaatatgacattgttttataacattatattactgatgcaacatttatttgcattatgaaatatcttctaaggaataaaatatttggacatcactacaattgatgaggactgcatgtgtatttttgaaagctgtattctgatttacagagcaaaaataaaaaataagcaagctaccaaatatgtaaatacaggaattagcccagtagtatttgttcttctgttccactacaggctttagagtaatatcagtgtgtgtttttcttacataactatgtgacattacttagggcataattctaaaatttctgtcctaggagacactagataactctcaaaaacttctgatttgcttgcatccctttttggcagagtggtcacagtataatgcgggagggtaggtgaccccagagttcagagtcctcatgcacccgggagcaaaattcacaggaaaataagcccacatggagctactgcattgtctgatggcctcgttcgaggaggcgtcaatttaactttaaacccatgagctcattgagagcaggggagagaaggggatgtctccaaattcaggaaactgttgccatagcattttcccttctctattcctgcatagccctcctcccccgaatcagcaacaatttttgctccaccgttttctttcgggaaccagatgcgttttcagaagacagtactccagtgataaggtatctacaccacttaataactgtacctggtaaggagatttaataaggctgagggtggtattaagtttctcagaacagactcatctttgcggatgcagttgcagaacaggaaacagacccagggagaagtttagtccccccagatctcattggccctccgcacaagccaagccacagccactcctgccacacaatcggattgctttcagcactcgcagccgtggaccgccgtgcggtcctttcctccgcagtgagccgatttgctctgccagcagctgtcggtgccgcgctcgacaccgagtcctagctaggcgctcacagaatacgcgctccctccctcccccttctctgtcccccgcctctcgctcaccccggcccactccagcggcgactttgagggattccctctctggcggcctctgcagcagcacagccggcctcattcggggcactgcgagtatggatctccaaggaagaggggtccccagcatcgacagacttcgagttctcctgatgttgttccgtgagtagcgatttggcgactgggagagaggacgggcactctttgcagagaacagagccggcaaagtaaagtcaattagcttgagataaaaaatatggcccttaatgttttgcggtgttttttctttttttcttttaggggaggagggagggccttcctcgccggtggcagggaattcccctgagagccatacacctctgtggcatattccagacagagcctagacaggccagcttcgtgaggtcagagcattggcaagaaatatttactttaaaatcccaagatgtagaaaacagccagctatattacaaacaaagtcaggatttttaatttttttaactgtattttcattataaattaacagcgaaggaatgaggcttgttagacccgggttagagaaacggctcgtagagcgcacagctgctggcagagaactttgtcactccaaagcctgcagagcactgtctccccaccctagcgcccgagacgcgtgggctgagccctgaactgatggaattgttttgtttgttccgcagatacaatggctcaaatcatggcagaacaagaagtggaaaatctctcaggcctttccactaaccctgaaaaagatatatttgtggtgcgggaaaatgggacgacgtgtctcatggcagagtttgcagccaaatttattgtaccttatgatgtgtgggccagcaactacgtagatgtaaggaatctttcccccccctcagcttgctcctagggctccagggcgaagggcacccttcctcaaggctcttcgaagacctgggttgcccgccttctttcccacaccccggcaggctgctcccgaatgctgcatggggattccagcttgtaatgccttctgttcccctgcctgctttgaaagtaaacccccttctctccgctt

SEQ ID NO: 8979 - DNA, 6000 bp, Homo sapiens
tttaattagtagtaataagtactgcagtaggcagagtaatgatcctccaaagatgtccacaccctatccctgcatcctgtgaacatgttaccttacatagcaaaagagactttgcaagatattggtcaaataatgaaaaatttctgttagaggggaggaacaacttcaagacatctattatacaacatgatgagtataattcataacaatatattgtatacttgaaaattgctaaaagggtgaattttaagtgttttcaccacacaaaaaataattatggagaggtaatgcatatgttaattagtgtgatttggccattccacaatgtatacacgtatcaaaacccatcatgctgcacaacattaatgtatacaatttttatttgtcaacttaaattaattacttttaaaagggactttatagatgtaattgaagttattccaagattatcctggatttcaggatggtcacaatctatcatatgatttcttaaaatcagagaacatttcctggccgtagtcccatatatatacagagatgtatgatggaagaaaggtcacaggcattcagcattgctgactttgaagatgggggaagggggcattaataaaggaatgtggacacctctagtatctggaaaagccaaggaaagaggttctcccctacagcctccaaagagaaatcagcactgctgacaccttgattttagcctagtgagacccacgtcagactcctgatctgcagaactctaatatgatacatttgtgttgtttcagccactaagtctgtgataatttcttacagtagcaatagaaaatgaataagaatgctaagcatttaatttccgtttatcatcccatgctagctagaaacataaaagtgttctttgcatcaaagcattaactaaagaataagctagttttaatttttctgcagataaagcacattctaaaagactttctagagcctgtttctcattcaaaatatgtggtgtttttatgatattataactcaaagttaatgacttttcttccccaactaaattgtagacaccctcttcttatataaattccacaaatcttccctatgggagacacaagagtacacattttctgtctgtctctagaatttatgaggttttacccaaatgaatgtattaagtttttctacatgatatctctctcaatcttcagaacagtctaatattgatcattcaaaagatccaatttgatctctgatcaataagatctgatgggctaatatggacttggttgccctaatttgggttcccacaaacagactctgagacaaggatttaggtgcaagtagtttattggggggtattttcaggaagcatggataagtaaaaccaggaagggaggaaaacttaataatgggtgtttttataagagggttactactgagggcaacagagccacagtcccattgggatctctccagaggctgtgaacatgcctcagaattgtcccataaagaagaaaataacatggggtgtttatgcaccaacttctgtcccttgttggctgagagttgctctcaaggatgtgaatttcccagcacacctggcccacactgcagaagcagagaataccccatggtcagagaacctgcttgggcatagaaacacagaaaacagctgacaccgtgtatcagggacctccaagctaagtcaaaaggatatgaatgagggactgactgtgtcagtatgatctatttcagggcaaagatatgtgatgttaaatatgtgctatgcatggattttccaatcacaacagtgtgcaaaacccaaaagtgtgaaaactaaaattaacttgatcttgattaagagttataatttccacctgatatcagataaattgacatgatcactttctgggttttctcagataattttcatgacttattggtcagttcaaatttaatattaactcacatgcggctggccttcttaggtcatcacgtttacaacctattcatggggaaatctatggaaatgaatggtctctacgatgagaatttttccagattgaactcttcgggaaatttaagtacttccacgtagacttattagtagatattgacatgtcattagtcatttgtaaaaaaatttaatatattgcaaatttttaaacatcaaaaagcaaataaagcatttttattcattatttggccaatccaatgaaatctcccaaataataacagattctgttatttcttttcttggtggttgatggttctcaagtcaacagctgaaggagaggtgtcatggtgtaaggaaaacggcactcacttagacccagacattcttgagttcatgacccacttctaccacatattattctgtggctttggaaaagtcacttaacctgttgaaaatttagttttgcatgagcatcactctccattacatgggtaaaacttgagtcactgagaatgaacagatttctgtacactgtacaattctgacagttcattctgctcatatcctcccatttttgccaactctctatccccaagttgttccaagagcgttttcacaacacattgccaagcctctgtccttccctttcttgcctatcctcattctgttatctccctttttggctgcttcattaagagaggagctgagaatctggcatctgggcaaaaccattactttggagaacaccacaaggccattgctaattttatcatctttgcctttaatgtactagtgggaagatttatttctacctttaatagtaagatatcctaagtagaaggcatgtgggtactgctgagtcttagttctgtgaaggtggagactgtgtatgttttattccttgtgagaaccaaggactcagcaaatacagagtacttattcaaacattttctgaggttactagttgatccaaaatgtatttagttgttcagagatgccaaatcttgctcaatatttagtctgtgttttagtattgctccaaaccttaaacctaaacctaccactgacttcaacagaactcttcgcttattttaactggagatggtatgaagcaatgagtcaccactgactatacataccagcagtgcctgatgccaaatggttggtgtgttaatataattttgtacacacaacaatgcacacattccaatacggtaagtaaaatagaaaagtttcaagagtgagagcacgtagtagatatttctcagaaatctatgtgtgattacctaaccttagcaattgcaattaggggaaggaaacggagaaagcagaattcagctgtgttttaagatttattttatatataccttttgtcccttgtaaaaagaaaatttgaaaaagaagaagaaaaagaagaggagggtgggggaggaaagggaaaaggacaaatgtgaaaagaggaaagagatggagaagaagaaaagaagaaagaaaagagacatctaatgttaaaaaagttttatttcaaaatctttattaaaaaaatgctttgcactgagcaatagagctcagggaaaataacgccctctcttcaacttgtctttctaagtaacgtgaggcagttgggccaacaatagtgctcccctctacctcttcatctctccatttcctaaatcttagaagaaaataaacctacaagagtttagcccccaaatctcagtgaaacagccatggaagggagagaccagtgaaaatctacttctactttgatgataaaggttgagagaaatgcgataaaatttttgaacttgagacacaaactgggctgaacacacttggtattaactccgtctttcaccttggcctcaggccttatcttattcctccagcattccttgggatggtaaaggcaggtaccctcatatgcaagtcatagttaggagaagcgttagcatgtccacctccaaaagctacattaatctggagtagaactgaaccctgtccaagggagctgagttacaggacatgaggctctggaaacaggggccatttctttctttttgtttgtgtgtgtgtgtttgattgtttgtttttgtctactgccccaataaattggtttcttttcttagagtctgatgctaaagaagtctcgactcaggaaaaccacaagggtggacttgggaagactcaacaggttgtaatgactctccagcaaatcatgtcaccatgccatttgatgatggtaggaagaaacaaagccttgaagattcatgcattgagagaataagagttagtgagtaaaccagatgtgtttcaggactgggaccctgcagtcatcaaccacctcacacctgcgtcagtaacaaacccaagctacagcatgatttttgttctacctcagcagatattttatagatggaaaaactgaggcataaagtgggtaaatacctcccccaaggtcacgagataaagataacgcagtcatcaaatattctgtctcctcaacatctgtcttactggaattcttgatggattggtacccccttattatagtactgattttaacataggttggttttgaatactgggtttttaaaaatcttttcaaatcatttgtaaattatggaaatgtatacatcacatgaaacttaccattttaatcatttttaagtgcacagtttagtttaagtacattcacattgttgtgcactgatccatcactatacctttttcatctgctccagctcaaactctgtacccattaaacaataacttccctttgcctcatccctccaggccctggcaaccacctctgaatgctattttatagcaaaaagaaatattaacttttgagcttggtttacaaccaaaaaccacaattacatgcaggagagagggggtgggaaaaagaggttaactcagaactcagttacttagaagactctgtgagtgtgctgtgtgtgtgtgtctttaaaagactctccacctcccagcccgcctcctcacactttgccactgggttgttcagtccccaggttccctcagtccccagaaggagccagcatggacaatctcctttacagtttcggaagcaggtttgttgccatggagttcacattttgacgggagttgagaagtataaaggtaaccatttgttttagtttcaacgatctgacaaaaagataggctgttgctcttcttctggaaaagcctgattggtaagattcctttaagggctcagccccaaagagctttatcccatcccctcgcagactgaaaactaaagcctgcagagacctctgaaggaaaacctgtcccgggctctgtcacttcacacccatggctaaccctggaggtggtgctgtttgcaacgggaaacttcacaatcacaagaaacagagcaatggctcacaaagcagaaactgcacaaagaatggaatagtgaaggaagcccaggtaagaggcactctcccctactcttctctgaattacctgaacgtttcaatatttctctgtgaagatatttgaggctgtcctaacttagagttcatcttatgaagggtttttacatgttttgactgttgactctgttaatagaaagtgcttggctaccaaaaagtttaggtgtggattaaggagaaaatgtcttctgtatgcaaaagaggatacacacagactcacacagcttcaggctccctaaaatacaaatgtacctactagacttttgtctcaagcattttgcggggagggaagaattaagaaagttccaactctttgcatatatttttgtccaagagacctgctacaaccgtcatgcttcagaagaaaaagaggaagtgaaagtacattttgctgacattatgtggtggagatggcattcttcccaggtccatgagaaatgcatcactgtttgaaaggcgagttattattggtgtgtagtggagcattgttttagctcactacttgatttgaggccacagtatttctttgaaatgtgacgtcacagacattcttttccaaaacacttcagaaagcagggctgattgtgacacactgct

SEQ ID NO: 8980 - DNA, 6000 bp, Homo sapiens
acttcatgtaacttgtgtatgtgagtgttctggctcaccagactcgggcaggtagtagaagtacagcccaagatgcagtgaactgaattggtaaccagtgcacagtaaacacactttgaagaacccagcaggttgctgaatatttgaatcggatgttaggtagaaaagtctgacccagaaatacagaatttaggctgagcgtggtggctcacacctgtaatcccagcactttgggaggccgaggtgggcagatcacctgaggtcaggagttcgacaccggcctggccaacatggcgaaacccctactaaaaacacaaaaattagccaggtgtggtggcctgcgcctgtaatcccagccactcacgagactgaggcaggagaatcgcttgaacccaggggcagaggttgcagtgagccaagatcgtgccactgcactccagcttgggcaacagagagagactccatctcaaaataataataataaaataaaataaataaaagaatttagactcaggctacagatgatgataatatgtcagaaaaattatgaaagattttgaaatagtcaaaagaggttactgggtgaactttctgtggagtgctgtgcatttttaaaagactctctgggggccgggagtggtggctcatgcctgtaatcccagcactttgggaggccgaggcgggcagatcatgaggtcaagagatcgagaccattctgggcaacatggtgaaaccctgtctctactaaaattacaaaaattagctaggcatggtcgtgtgcacctatagtcccagctactcgggaggctgaggcaggagaatcgcttgaagccgggatgtggaggttgcagtgaactgagatcgcgccactgcactccagcctggcgacagagcgagacttcgtttcaaaaacaaaaaatcccctgggtcatttgccgtaggagggatgtacctctgcctttgagtatgctattttacaactctgtagagatagaaattaacttatagaagatagtaatgcaaatgttccctgcccacaacaatgaaaactattcctgtccacagcaatgcaaatcaattttgtgtgatagagaatatgtcactataaatcaaattctccttagaaccagtctgaacatccctcctggtcgtagggattaattaaaatcaatgaatgagttaagtaagatctttggcacatgttcattttatatttgcatgaaggccataattttaccttttgaaacactttaacagttttgaagctttcaccaacatcccaatggattcacctgacagaaccaggtaaaccacattactgaagaacaccccatggggctaagcccaagcacattttttcctggctccgggagtgaataccaagtagcaatagtactacagcgttgctgactttctccctaggtttctttctcctccttactgattttgggttttgtttctgattcgcccacagctggcggatttttccccatgaatggcgacaccaattaggaactcgcgggaaaccccgttgctccctttcccctggctggcagcgcggaagccgcacgatgcctggagttcctgtaaaccacgtgaaccagcgggacttcgtcagagctctggcagcctttctcaaaaagtccgggaagctgaaagtccccgaatgggtggacaccgtcaagctggccaagcacaaagagcttcctccctacgttgagaactggttctacacacgagccggttccacagcgcggcacctgtacctccagggtggcgctggggttggctccatgaccaagatctatggggacgtcagagaaacggcgtcatgcccagccacttcggccgaggcttcaagagtgtcctccgccgggtcctccaagccctggaggggctgaaaatggtggaaaaggaccaagatgggggccgcaaactgacacctcagggacagagagatctgggcagaattgccggacaggtggcagctgccaacaagaagcattggaacaaaccatgctgggttaatacattgcctcattcagaaaaaaaaaaaaaaattaggaactaggttttacattctgaacatttggtgatctctttaagtgaattaatagtttttagagatctattctcttttggataagagatgatgaaaaatctggtttgttagtctttttgtttgtttgcctttttgtctacttatgagttcaaatcagttaagacttccatgcccattgggaaggagaacagctttttgttatctagtccactgaatttttatgtttctgaatttactttcgacctgtggccaaagttgcagaaccaaagctatatgctatgtgtctatgtgtcttcccggctgtaatcaacaaaggccttcccctcttgttgtgggagtaaaaaaatcttactacctttgtaaagttttaataagttatattatttcatgtcttaaaggagctctgttataattcacttatggaaacaaacacatgtaaatcaattatttctaaaattccagaaaataagtaaattaaacttatgcatgcaaaatttcttaaaaatgctgaaaccatcctgacagggttaacaagattacaagccagcctttaggcaggttagttaggcactgaccagggtgcattggtgcccttcaattcacttccctgcagctgctaactaaccaaaagccttgcagcacactgatcacctactccctgattgctcctatccacagaatctctgacactagctctttgtacccaggaattgcttaaggtatttttcagatcctgaattcccacaaaacagctgatgccaaactgtctagggatccccaccaggaagggcacagtggctcacgcctgtaatcttagcactttgggaggccaaggtgagaggatcgcctgaagcccggagtttgagactagcctgggcaacaaagtgagaccctgctttacaaaaaaaaaatttttttaaataaataaataaagacctccaccaagaaacaacactggaatgaagtttcttcatctccctgtcccatgacttcacctctcacttcctgaccaatcagaaatccccacactttagcccattgcccctccagacttcttaaaaatgccatctctaatctcttggggaggtggatttgaggattgctcttgtctcctcatttggctgccacttgattatggaactctttatctgctgcaactcctattctttctgttaccgcacaatggacaatcgaacctgatggtcctataacaatctttcttacagaaattgctagtacagaaagaatccaggttcaaataatcaaggcaaatctttggcgaataatattaagttttggttaaaaaaaatcccagctatgtcttttctcagtgttaagtattatacatgtgtacattttgagtttgtttccttaccgagaataattaatctgaacttcctaaatttataaaagtttactattgataagctaatattaacattacattgtttaagatcctgaaaaatgtgaatttgttcaacaaaactgaatcattctcacatttaacagtaattgtttctttgtgccttaaactattaataatttctatgatctgtagataacttaaaacttagtattaaattgagctaattaatggatacttcttggatgcctagatatgttcttgcataattttatgtttacatcgttttgcttatttttatatgctacagagactacaactctgagtcacagtaatgatgtgttcatgtttgccacttgtcagcgtgtgtaaaaatggttgtggtggctttatacagttgtgttctatcgcgccttttgcagcaacatggatgcatctggaggccatgatcctaaaagaattaacgcagaagcagaaaaccaaatacatgttctcacttgaaagtgggagctaagcattgggcacacatggacacaaaggtgacattaatagacgctggggactactagagtggggagggaggcagggaggggctgaaaaacttgggtactatgctcagtatctgggtgaccagctcattcgaattcgaaacctcatagccaggtaacaaatacgcagtgtaccccctaaatctaaacgttggaattattttttaaaagaaagttatgttccatgtatttctaagcttactctcctaaaatggttgaatattacagttctcaattatttatctccatgtagaaggatgacagggactgtgcgctagtgccagcctccgctgagagcgccaagacattacagcaagcgacggtaggagagcttgtaacgtgaagcaccaccacacctctgtacttcaaacttaaccacagagaccgactcccaaaccagcaagtgcgtaagcgccgccgcgctcaccacccgccccgccccttccgcatgctaatgccttcttccggcagccttagtttcttccaaccagtgcagctccctgttccgcgagcatacgtcatcgttctcgctttccggtagctaaggcgatcagcgggacttcccactgagacgagcggatgtcatattgtatcagggcgaacctctgaggagcgctggctgcgcttaggcaacggtgcggcaggcgccggggttttctgaaacagaaacgtttaggggtggggaaacgtgttccgaggaactctcgttttgaagtgcgacatacacctgtcttgccctgttccaagatggtggcagagcttctctgagtctctcgcttcctccagtccgtcggagaagcgctctttgattggccagtggacagcgccgtggcatgacgcgctggggcgctggccaatcggttgagagctgagctggacttggcggtgggagccggagcctgcttgttgcagctgtgggtgaggacggctctagctaggtgagcggctccggccaggtgagcggggcgcataggtgacggagggccgagggcacgggtatgagtttctgccgggggcgaggtgagcggcttctgggaggaggccttttcttgacagtttagggtagcgggggaatggatgatccgggagtcccctgcggatgtcgtcccgcaccaggccgggaccgatttctggctccagtttccccagaattgcggagtgcgcacacctggaaggacccaagtcccgttttatagttgagaaactcaagactcagacaagtgaaacgacttttgcttcatgacagctggaactggaacccaggtccttggactcccttcaaggattaaacctcacttattcttacatacacatggtcactgtgtcctgagaagttacgagttggcgcgataagggtggttcagattttttggcatattctcctgttatctttccaggcctttcattcattcactaattcatactttcagttatttacctcttcagataccttccccgatactttggtaaaagctatggacccatctccctagaaaaacggcatattccctcatgcgcataacttcagatgattagtggaccttctatagtccccttggattatgtgtccactgctaagaatccagaccctagaagggtgagggaaacaggcagtaggaaaaggagggagcaggtcttaggctgtacatgcttggaaaccattagatggaggcagtagcttctttttttttttttttttttttgagatggagtctcgctctgtcgcccaggctggagtgcagtggcgtgatctcggctcactgcaaccaatgcctcccaaggtcaagcagtcctccctgccgcagcctcccgagtagctgggattacaggcacctgccaccacgcccagctaatttttgtatttttagtagagacggggttttgccatgttggccaggctggtcttgaattcctgacctcaggtcatccaccggcctcggtcgcccaaagtgctgggattacaggcgtgagccaccgcgcccggccgccagtgccttttaataaagaacgttttgagagagagacgg

SEQ ID NO: 8981 - DNA, 6000 bp, Homo sapiens
catgagtttgtcatggcctgggtgtgactctttcctgatggaacctattctactttcctctcatttagagaaaaaggaaatgggttgtactgacttttgccattaaaagctgcctcaaggtctaacgcacattgcaggaatttttctgtgcttgtctttgacagcttggccccctgaagtttcccagtggacctgttgtcctgcagtttcccttgggctcctccttatgtagtgtagctggtttgagaagcagctgatgactgtttcaatttcaactgaagttccttacaaaactagccaatctgggaggtcatttgtctctgatccagatgtagtggtttgattattcttggcttatactaaagttggaagggaactgaagcatcaggtgaaaaccacctacaccttcacagtgtgaaaaagaacaaatcacagctatgcacaccacaatggacagacatcacaaaaacgaagatgggcaaaaggagcctccctttatctgaggttcaaggacaggcaacaatgatctagggtacagggttgggaagaggcactatctctggggaattattgcctggtgaggggctggcacagggagactttcagggagagcaggaaatgttccatgtcttggtctggaacctgtgaggatgtatacgtatatacagagtcattgagttaatgcttaagctgtgtgcgttttgcctcatgtatgttatacttcaacacattttcttttttttttttttttcttctgagacagagtctcgctctgccacccaggctggagtgcagtgtcgtgatctcggctcactgcaacctccaccttccgggttcaagagagtctcctgccttagcctcctgagtagctgggattacaggcatgcgccaccctgcctggctaatttttgtatttttagtagagacggagtttcaccatgttggccaggttggcctcgaacttctgacctcagatgatccacctgcttcagcctcctaaagtgttgggattacaggcgtgagccaccgtgcccagccaacaaattttttttaaaggcaattgtgaatctgaccatggtcaactaggaaaaaaaaatctatagtcatattcatgtggtgagttaaaaaccaaacaaatgcacacagttcagcaaaaagaatattcaaaattaaaaactcttataaaataagcagtctatttgaactccagtcataaactgatcaccaaaaataacgtgagcccaccttgcagacacaatgctctcaaaagagtaatttttttttttttgtccttcaaaatacagccggctcagaaagtgtctgaagaagcagttttcctggctttttgataaagacggtggacaagaatgggcgtgagaagaaatagttgttaggtcttccttagtaaggatgggcttttgtccaagtctatgtgactgtgcaggtgcaggggttttgtctggaggtgatcagtgctatcagtctaatgtcttcctgggctacatttgagtgaggcaatgacaggaagcctggcccttcaagtcctaggcaagaaggggatgctgcatacaaggcctgttctaggcatactccatgaatttctcccttttatcccccatctactaacatttggtctcactgtgcttaaaggttttccatgaacacccaggggtctttcccctctgagcttgggccaggtctccttgtgttatgaaacagccatggtgagaaagctgatgtctctttaccaagaaagtgccttttctggttttctcttcctctctcctcctctcttctaaatcaatggcttgcctgccacacctgggaatgtttggtgttgtggagacataaccttgctttgtcctggaaactactccatgaggtctgtgagctgtggtcagcaggaggctggagagctggaaatatcacaggagggcaccgagctgcacctagtttggccacagacgaggtccctttcactggctggtggatgatctggcctgggctgagagttagtgaatatagtcacgggaggctttctattctttgtcctaaaggtagaactgtgagaaagactaaccaactttattcaccacatcaggtccaaagtctctgcagggacctgaaaacagaatgtttatggaaggtcaaaacagggggagtagacagtgaccccagaacccagcccaaggtggggaggtgctctgtaaagacacctgtcttattcctgaaagggtgaagacccccacacatctaggagtgatgcctctctctccaggaaagaaatactctcagactgaagtatcagagcacattcttcatttcaactcttgctcctttcacagttcggtttctggagggagcttccaaagactgaaagggacaggtaggaaaaaaaatgactgttttctttggagaggagctcctgaggcctgtctcacttggccatcacctggggggctgaggaacctatcaggtctcagttgctgtcagcctagggaccaggatccccacctttcttccctaggtggtgcctggccgcccaaggaatcactctctgtgctttactttaacagtgcccttcactccaaaatctgtcaaaatgaatagaaacccaagaatcatttctgtgtgccacaggagtgctctcccccggcccccccgccccaccccgccacacacacacacatacactcctggtgctgagataatttccaagaaattaccagttcctggttattctccttcctcctggctcccttcctaactccccctccatcaccagattacacaattccttgagcctatggtattttcccctggagcttgtgttcatttcctaactcaattaattccagattccctctctcaccttctattttccctcgttttcactagaaaacactatttgagtgactttcctggttagttgaattcttctcagctcctaaactttcttttctgtgtctgcaaaagcttgatggagataacacaactagagaattctccccacacactccagcacggatgaactcgtatttttacaccctccttagtatctgcagccaaagcaaagggaaaaccactcaggcattgtgggggaggtactctgagtgtctggaagatgccaggctgagaacagcagtcataaatgatatacccacaaaggaaaagtctctggtctccctgggtgagatggcctttctctggaaaggaggccacctataaccacttcctttgccctttgctgtgaccttgctgtccccgggcgctgtcagggattgtctgggaggaggtcggggggggtaggtcagtcacaggtggggacacatttgaacagacctagacaggggagccttatacagaggttctctgcttccttcccacctccttagggtatgaagctagattccctgatctgaatggattccatggagacagtcacctagacagacacctggtttcaggtgatccctttctggacaaggtcttttgttttcagcgcccccccaccctccgccccaacaatggcatctcctcctcagcccagccagcagccccaggctagcatctgggaagagtccagggaagcccaatgagggagagtgggctgtgtctgggatggccagggatcccctccaaatgggcacctgcggcaggtcgtgagtccagccatctctagggcagcccacaccttcagcaaggaggggcaggagacctagaatgggggaaatgggaggactaagattctaacgttggaggtagggcaggctggtgttacctgcacaaggccagaagcctcttcaggccgcctctccagggaccgtgccagctgtccccacttcgatcagccacagtattggacttggtccagcacgaacagaaagcgaagtgtgagcccaagacagaggggggagccggacacccttatggaactaacagcctctggggaggcctgttccagatcccgagtcgggcgcacagggggatccccgcaagggggcagagggaaacccgggaggcccgcgagaagaggcgaggccagaggctgggcgcgggcagccaagcgcactcgcggcgccccgactccaggtagcacgtagagaggaggctgaagagcccctcggttttccgaaagtttccagcgaatccttcttggtgaagatcggcctctgggaggcagcgtgtgtgcttcccgagagggggccccctgcgccgtccctcttcccctggcacagaagggttgaaggactgcacacagggatccctccccagcccagtctcctcccagcgcgccccctccccgccatgccggccagcgccgggctgtgtcccaggcactgccccccgccaaccctggcccgaccagcctcgccgctgcaggctgccgggagctgcgctagctcatgctcccagctcgctcggtgctccctgttcgctccggcccggccccggcccccatcgcgccgaccatggaataggcgggcggccccgcgaggcgctcctgcagccggcgaggccagagccagtccggggtggctttgccaaccggcggagttggccagcggcgggccctcctaccgtcggtccttccccgctcctcctcctctgccccctccgcccccgcctcccggccgcccccgccgcccccgccgcgccgccgccccaggccgagcgcgggcgcggagcgtgggagccatggcgcgcgaggaggagcgggaccccgagcgccgggaggcggcggcgcgggcgagcggcgaggaggaggaggagggaggggaggagggactgggcgatagcgacgaggagggcgacgacgaggagacgggcagcggcgaggaggaggaagaggaggcggaggcggcggccgggtgggagcgcagcgaggacgcgcggctgctgcgcgcagggctgcctcctgccgctgtccccgccgcggccgcccgcgacaggagcggccgccgcccgccgaggccgccgcccggccgcccgaggatgcggccgtccggcgacgaggaccgcgcgcgtcgccgccgccgccgccgccgccggagggaccttctgctgagccagctctgcttcctggcctcggtggcgctgctgctctggtcgctgtcgagcctgcgagagcagaagggtgagtgcacgctgcctgccccgagtgggcgctgcggctccggcggctcggggctcccggggctgggcgcggggctccttcgggcggcccggccggagccccaggataagcgggctgggttggcggggggagtgggatgccaggcacgaggactccccctgccccacgcagaggcatggaggtggggaccctgagcgccagcagccagcaggcttaggcgtctggccgccctgggaacatttacctgtgcccgcctgtgcgctgcttactcgcgagctggaggtactgctggtggcggtggtggggagtcttactctccatcagcccccaaggccagggataaagttgtggtggtagacccggcacctgtgcaggtgaccacctgtatactccttggcttgctgaaggattcaaggggactgcttaacacacagttgtccgtatgttctccatccagagagcaggcgggatggcccgagtagagagctcttcaaccccctttcagaacaggtgccgggaacttcagggagagaaaaagtgttggccctccagctatgggctagtaggggacttgttctcctaaaatgaccactcactgggaagacagggaattcttcctcagaggtcccttttgcagagctgctgctgtggaagaaatggtttgcagtggaccacgcatcacactgtccgctcctctaccggtgctctgcgcaaagtctgccctttaacccacaacttttgtcttgtctttgtccttggcctttcttgagctgaaatagatcttgtgtgctcccaacagttgtctgctgaaacagcttcgatcctgggattcagctgtctataaaatgaaggaaaaacatggg

SEQ ID NO: 8982 - DNA, 6000 bp, Homo sapiens
ttctgctgttttccttgtcatcttcagtggatcagctatcacactggacaagcttctcacctcatagtcacagggtggctgcaagagcccaacctttcctagaagttgcctctgcagatttccccgcatgtctcatcagtcatggttgggccacgtgtccacccctgaagtgatcccaggttccagagaggaaaccaatgttgagcacacaaatacatttcaagtgctgtcctacacaaaatcagggatctgcccacgaggaagaagaggcggtggagcttggaaggtatgcaaccatggctgagactgtaagagccacggtggaactccaggttctgaacctcaaaagttccactttccattgtgatgaaagcatctcaggactgcactgcccagcttggcagccacagcctcacatgaccactgagcacttgaaatgtagttaatatgctaagaaagcccatttaaatttttattttcaacttacttaaattcaaagagccacaggggtctagtggctcctgtattgacagcacagggccaccttgttagtggcatcatttataaccctgggcagcattgctataggaatagccatatcctgtaggtctataatgctgtagaaatggaatgtgtggtgcgaatgaaatttaaaatttaagtagccacggtgaaaaaaaaagagaaacaagtaaaattcatttcataatatgctttatctctatttccaaaatattatcatctcaacatgtaagaaatataagaagtattcatgagatattttacattcctttgttcatcataagtgtttgagatcccatgtgtgtctgacacagcacctgactttgaactcaccacatttcgagtgccccatagcccatgtggccatggtttagagatttcagaaagcattcatggaaaattctctttcctgatcctcattcactatcctgggaagtggccagataaggaagcaaggcccagaagggcccagccagtggctctcagactccagagtcatcgagtccctcactcgagggcaggttaactcacagatggctggcccccaccctctgcatttgccatccagcaggtctgggtgggtaccaggatgcggattcgtaacaggagaggctgatgctgccagtctgggtccacattttgagaagcattcctccaagggtcccacccacgctcataccccagtaagtagatggctcagaattgaaatccttgctttccatcttacatctcattctctttatatgcacaaccatgaagccaggttgctaagacagtctgaaaacaactaccaaagaacagaggtgctgctcatggttaccccagtgtgctgcagcccctgtcctccagacagtgacagcagagtggacctaattttgatactttgtaaacattggaccaatgtgacctatcctagtcccgtgcctttctctggctgacttttcttttatctcatctgattgtgggatcaatttatttaaaggaaaccatttaatgaaatcttaaggaagccctcacctttatatttggtttaacagttgagtttttggggtacagctgaggtctctatcattgcaatgtctagggtgtccctgaagttcaggtgggaatctgaagacactttcctgatccacgcaggcgacttcagacaatgtcctacacttagccacgggtaaatcatgcttttaatatgctcaatggcagaactggtcaaagccactctgagctgctgagagcacttcagattattttccacaccagcaggcgatagaagtggcattcagggactgctgtcattgctgctgagatccaagactcctcttggtgcactgtgatttgcagggaaagctgtgtctctctgacttgcaggccagaggttctgaagattgcttgaggttgcaagtacctccaagcttgagcagcagttttgaagtgtggagatgggaggtgagttattcacatctctaacaaaggagctgctgcttctggcttcaggaggggctgagaggcccctgattcactatctcatcactgggctggaagctccacagggatcagttaggcctgtgggccatgctttcagcacttggaggagaagatcccttagactcagcctttggctccatgccactcttgacaatgtacagggaagccacttggacctgatgctggagtttaatcaacagacaaggaagaggccccagtgtgtactgggcaaaagaacgggacgggtgtgctgaaaagcgtctcataaacagactttgttttcctgtgttttaactcagcgtgaaagtttctctaggtctcctctcctgggggagaaaggtagcggctggtttcctgttccattgcttctttagtatcctgagagagaacagccatgggcacccagctgccccagcctcttcctgtcccagggccccgaggctgcccttcagcggtctccagcttcctgctcctgtaagcaggggcctctctttttggctttcctgacatttctcctgacctcttctgctagccctcctgaacgcacagtaatatctgtacattgcagttggtccccaggctgctgcctctctgtctctccatctaatgttgcatctgtgcactttagaagtacccgggagccttcaaaatatttggatgcctggacaccactccagataattcagtcagagtctctgaagacagggcccaggcatccctgtgtgaggccttcaggtaattccagcatacagcctgtattggaaagctctgtattgaggatgaggccctcatgctgcagagggggcctagagcacagggaagtaagttcctggaagcactagctgtttatcacatagggctaataaccaatggggacagtcgtgcatgcttctcttcttacatgctagcttactatgcttggaggcatacacatgtgtatggggagaggagggcagaatcggggagcattaggagaaaaacctaaagtaggcacaggaaagattccaggggctcacacatgaggcaggacaagaagaaatactttctcaggaaagggaaggggccgagtgttcaatgggcagagaggacagcagaagagaggagaccaggaagacaagatagcccccagcacttccacactaagccctggaaaggctatctgcagaggagccacctaagggtcttcccaagaccagggttaaagggaaaagcccctaaactcctcttccctcccaaatctgaggttgctcttgttcccttccaccaaaggatggcaccaagtagaatgacaaaggtgccatctccttcctctttctcagggaagggtctctctcttaaggacaaagatgtgaaaggtctctctcttagggacaaaaaggaaaggacagaccaacctacagagtggaggagtgctagaccaaatcctcccaatacatctatttgagtagcagagactggagacagtggttgaggtcaactatggggctgcactggtgctgatcatgcccgtgctcccatcccacacctggataaacagcagtgggcagcttcccccaccccccagtcttagaaaggcctcctccagttgcaacaggactccctcctccccatcgctgtcccagccacccagcggaaagctgagaccccaccccccaggtggccaattttagacccactaaaggcctttctgggctgtactgggggctaaagggggccaccatcccacagagaaggggccaaagacagccaggatcctaaaagtcagagctactttaagaataactttcccaggccaatccccagttcaggaacgttcctgtgccctgtgccagctagagggactagggctggagccggcggctgctcctgggtgtccagtccaggagccagtgaactcactatctctggagtttagcagaagaagggtaattccaggccggaacccctttctttcccgacctctcgaccacagtcctccccaggcacattttagtggccagggatggagacccgcggataatgactgaaccaggtcacagggtgaaggttctgagatgtccggctcccgtagcttctgccagttcccgagggagctagcacaggcttggccttctttggtggcatctctgcctccacctgtccgtctccattccttgtgcccatagcacctcagctgctcggacacagaagttaaaaggtccggcatctgcacttgtccagagtgggttggggagcagagaaaggagtggtgagctgtggggaaaactggacatcctgacagacctgaaattcaccaagccgccagtggaagcctcaggttccgcctctataaaagggactcagccatgtgcaaggatgggtcgtcgcgaggattaaagggcagggtgaggggatgtcaagtgcaaggcaagtggtccaagcttccaggtggtccctgaccagttccgggcacatctttacccaaagggaggactccgggacccccagccccgccgccgcagaccccctgtagcaaagcagggaactggacctcaaagggctgctggggaagacgggatctgaatagaggtctgaaggaaagaagccaggcgggggaccccgggagggccggacggggctgggggtgctgttgacactggagccggactggagacctgggaacctggggcagagtcggcagcggggagggggcgaccgaggtgggaaaacggggcggggccggagacgactccagggctgggtgaggcgctgacccccaggagctggggtgccgaggggcgcgggccacagcggtgcgagccagtcgggcgcccgcgcggtggggcgcgcggcgcggggattggcgggcgctccccggtgcccgcagctcttcagcgtagccgggaagagccgcgcgtctgcgcgccagcccccgccctgggcccgccgcccgagctctctggcgcagcgctagctccgccgcgctcagctgccctgcgccggcacccctggtcatgagcgccccctcgacgctgccccccgggggcgaggaagggctggggacggcctggccctctgcagccaatgccagtagcgctccggcggaggcggaggaggcggtggcggggcccggggacgcgcgggcggcgggcatggtcgctatccagtgcatctacgcgctggtgtgcctggtggggctggtgggcaacgccctggtcatcttcgtgatccttcgctacgccaagatgaagacggctaccaacatctacctgctcaacctggccgtagccgacgagctcttcatgctgagcgtgcccttcgtggcctcgtcggccgccctgcgccactggcccttcggctccgtgctgtgccgcgcggtgctcagcgtcgacggcctcaacatgttcaccagcgtcttctgtctcaccgtgctcagcgtggaccgctacgtggccgtggtgcaccctctgcgcgcggcgacctaccggcggcccagcgtggccaagctcatcaacctgggcgtgtggctggcatccctgttggtcactctccccatcgccatcttcgcagacaccagaccggctcgcggcggccaggccgtggcctgcaacctgcagtggccacacccggcctggtcggcagtcttcgtggtctacactttcctgctgggcttcctgctgcccgtgctggccattggcctgtgctacctgctcatcgtgggcaagatgcgcgccgtggccctgcgcgctggctggcagcagcgcaggcgctcggagaagaaaatcaccaggctggtgctgatggtcgtggtcgtctttgtgctctgctggatgcctttctacgtggtgcagctgctgaacctcttcgtgaccagccttgatgccaccgtcaaccacgtgtcccttatccttagctatgccaacagctgcgccaaccccattctctatggcttcctctccgacaacttccgccgattcttccagcgggttctctgcctgcgctgctgcctcctgg

SEQ ID NO: 8983 - DNA, 6000 bp, Homo sapiens
gcccacattttcatattctcagaagagaaactaaagctgtccaaggactgagcacaatactcaatacattgttggtgtgagccattgagcagcaaagtccataggagctaggggcagccagatggaatcagccactgatatctggggcatctgatccagacacaacagtgtctgctacactcagcctctgcccccttgaaacaagaaggtccccagctgagggagagacacagtcatggtcttaggttctgagggtcttcacaccagcatcggcttggtgccaaggatctagactttgccatttctctcaacgtctcagaaaaagcaccagcagctcttgtcttgccaactgtctttaagaacagtgaccagccagctccactcaggaaggcactgccagcactctgagcccgcccttgcctcctacaatgccaggcagcacatagaataagctcatttcagaagtgaggaaatccaggctcagttaatcaggatagagtgtgagagacagcagcagacacttgcctccaacccaggcttggctggctctgaggtgtgagattctaccctagcagggaagcattcagctgatgcctgacagacaccccctattaatgttggctactttggatcccaccccacttctcacaagtaatgtgaagacaggagagccactcagttctcaaaattcagcttcttcatcttcctgcgatcattctggctggccccacggaccttaagattcaatgaggttatatttataaagaacttatctcatttctagacatggtcaattgaaaaaaaaggccacagattcctcctgtcactcactgcaagcccatttccaatgtgactttatagccaaagagtacaggatatctccccaactcctgaatctggcctgggccatttgacctgctttggtcaatgagatgatgtgacgtcaccctgaagagccatgcacattgaggtttgccttcccttattgctgtcgggcaccctgaagccaccactgggtgaagaactctgagccagcctacaggaaaaggacagacatggcccacagccagtctactcccagaaatgtaaggtctttggctgccagctgaccgcagatgcctgagtgagcccagacagcagtgtgaggcagaggcaatccatcccagatggctcagcccaaatcatcaacccacagcattgtgagcaaatcagtgattatcattttaagccactgagtttcagagtagtttgttcagcagcaatagataactgatacaaccagcactatagaagttgcttaaaacatattatctttctctcttccttatttcttttcaaagagctgtaatgaatgcacgggcaagactgctgatgttggaactgagcagacccggacatgcccttgacccctctactcagcctcgctgtaaccatttcctcacctgtggaatcagagggctggactagatgactgccaaggtcccaaccgactctagccttctgaccttctcttgcatcttttctcttgtttaaactttcatgtcaacattgtctcagacatttttctaggttttgtatcactttccattcacttttgatagaaattcatgctttctttccagcccctcctatcatgtctagattgagcatctgaatggatgtctttctacacttctaagtcaacaagattcaactttagcaagacactgccgcttttcagttcctatatgtcatccacttaagtccctttaataacagattttgggggggaaagaaaaaccaggttaattgcatagctttaaaattgcgtatgtgatttgttacctttggtattgcaagcaatgtttgaggccgagcattttacatgggtaacctggagatgctttctagaagggcactgttgacccccagacagtgcatagcagggctgtttgtaaccccacagtcaaaagcttttgagttcaagacataaagaggaatatttcccatttgaaaaagtactgaatctgtgtttcccctcatcaaatcacctacctctaggcatgtaaagttggctggagccgggcttggtagctcacacctgtaatcccagcactttgggaggctgaggcaagaggatcacttgagcagtttgaaaccagcctgggtaacatgacaaaatccatgtctccacaaatacaaaaatttgccaggcttggtggtgtgtctgtagtcccaactactcaggaggctgaggtgaaaggatcacttgagtccaggaagttgaggctgcagtgaaccatgattgtgccagtgcactgcagcctgggccacaggacaacactctgtctcaaaaaacacatttacctatgtaacaaaactgcacatcctgcacacgtacccctgaacttaaaacaaaagttgaaagttaaaaaaaaatgttggctggaaggtgtggcagcttgctcggtgcctgagtgacagttcttcccagcacaggaggtggcccacagacctctcttagctctgaaagttctgtaacatcctctgagagataagcattgttgagaaggttaccccagtttccaagagacttggcaatttctactgtgccccattgcctaatatgtgacagctcctcactgactttcttgaaagtctttatttcaatgctatatcacagcataccagataatatttcaagccacaacaagggaatcacaggtaagagaaactgcccatcgtgtgctgggcaactgagcttcccaccaggagcccttaatgagctgctgcatctgccaggagtgggtgacatctgtttctttacatacacgtcctggccctgtgagtttcttttgaaatgaagtgtaaggcccctttgaattacagaaagatgtgtgtgtgtgtgtgtgtgtgtgtgtgtgtgtgtcatgggggaagagtccaccttctgtttctttcttttttttttttttttttgagacggagtctcactctgtcgcccaggctggaatgcagtggcgcgattaaattcaaacagcacccaggagacaaaggcgagtcctggctgcagcccaggcaggtgttctctcgtcaaaacaaaatctgcctcaaaagtcaatccagaggctgggcaagtgaaagagcagtgacttagaggcagggaacccgagcttcaggctactcctgcacattgggtggctacacaatctcaattaccctttttaaacttcaatttcttcatttgataaatgggatcaatgactctccacctcaaatgggtctaatagtatctgctcaacctaatggcttagatgggaaactgctttattcaggaaaggactccggaaaggtaagctgctttattaaagtgtggtggcatgttcttccaagttgagaagttctgctagatgggagaaatgaacagtgcccgtttctgagtgttccagaccacagccttgcagctctggggacctaaaggaagaaacatcaggtgtgtctcgcggggctgcagacatgaagacggggatggaattcaggtgatagtactggttccactcatccgcgcctccttcaaatgcctccttctggcactctgcatttcagcattctctttgggctgcggaggctccctagaagccacgtcccctgaaaggaatataggaaggacctcttgttcctggcaccacctttaactcctgcccctgcccaccaggacacctgggcaagacgcagcgcaatggtgggttaccaggcaggagggagggctctaggaaggttgggagccatggaactctggagcttaaccttctctgaccaccagtgtaccagcctgcgggtggcaggactggggcctctgcctagtgttgaaacgggggcgcacagatgcttttctaaataacttttgaccccctttctggtaaatctttttttcagagttgattctctatgaaatctacactgcaaacaccacctcctccgctcctagaacgcagactgtcttaccaccgccctagtttccttccaattccaactggggcgggcccgccatgggccaacaacaggctggctcagggctgagggggtctctggagtctgaactccgcgcccgcttgctcctccagggcttagctggtcaggacttgaacattcgccggatccataaattgggtcatttttaacctcaaaaccgaaccgcagcctggggaggcctttaggaccgaggggagccatcccttcctctagtcgggcagcaaattcctgtcctcctagtcccccgcagctatcccccgcccccagcctctgtggccctcacattgtcagacactggccgcgggccaccatctggacgcgatcccccgctagggcctccctggtctgggccaaagttggtggccaccttcgcgcgggctgcgccctccttctcttccctgccctcctcccccggggcccgcgcccgctgcctccagcacgcgcgtcggcaggctcggcaagcgaagaggagcggctcgccccagggcgcccctcgcccagcctgccggccaggcgagcgcgacgagagtctccccgcaccccttcctctcccgggggccgagagggttgggctccgccccggcgccgcagctcccgactccccgccgctcgggctgccgccgctgccccgcgcccggcgctcggggcagccgggggcgcaggcggagagcgcagggcggggagaggcgtggggagcagagcggcgctgaggggagggcagaggaggagagagcctggcagcggaggagcagaggcgggcgccgcaccgccccgcacgctcgctcgctcgggagagtcgcgggcggccgcttgggcgcacttgccgggtcaccttgtcccggaggtaagtccagacctcccggccgcgggggcgggcggaggggcccgcagtgggcggggtcgcggcaggggccgcgagctggcggcgggagctggaggctgccctgcgctggcgggtgtcctagtcctggctccgcctcggagcgcgcagacccggcggcggcgtggcgcccgcggtaagtccgggtggtcgccgcgacgagacttgggagacacggggtcgcagggcgggagggggagctgagccggcagagaaaatgcccaggaaggggtcgatgctggcctgggctgcaccttggtgccttgccaccccgggagacgcgaaggggctgctgtgcgaattcgatgggagctggtgagaccgagaactgagagcgtagcggagccaggctgcccagcagggccatgagggcgcgcggcgggccaaggctctgcgggttcgggctgcccctcggagtgacccgaaggagaccagccagggctggtgagccgggcggccacggagctggggacctaggtctgtttgggagtaggaagggaaacagactaattctccgagcggagcggcaggcaaggtgcaagcgcgcttgggatggggaatcccgacgggcgaccgtggcggaagcagagactcctggagcctctttcctctagccaggacaagacctgccttcaaaagctgtctggcccctggcagccgcgacagcctgcagccctgggagccacagccctggcgccgagatgggagcgagcacatacgcttttttggttccaatttgaatctcgctttttcctagtcgtgatttctgcctcttcatgtgcactctctgggcagtgaggaggaaggaatggctcactggatgagttgggcacttttcttagggaaggggctttgtccctatgcgctttttgcaagaccctactagagtggctctggcagccgagctttgaggaggcggccagaggggccgcttggcgtttctgaaagacgagaggaaggggtcttctggtagtcctgttttcctttgggggtttcgttgcacgcagaggcttgggcgcttggcacccagacttcaggtgcgcacagtcctcctgcgacgtcagatgcgctggcgccgcggcgctcctggctcggaccgatgcctgcgc

SEQ ID NO: 8984 - DNA, 6000 bp, Homo sapiens
agtggaaagggagccagggtctttgcacctgacatgggctgaaactgctctcagaagcattacctcctggcacttcctctgccaaaagaaggccctgctgtggagagtcacgggagcacacagtgggacagacacaggcaggaggcctggcagcctctgctacagagacactgcacagtccatgttctgttccttcactgagcagacagctttgcagctgtcctcctggacttttgtgagtaggtggacacatgtgagcaagccacacacaatagagggcttcctccactattactcaagttaggtaaattgaggcagcttggtaactcaccaacctcttctaaaacattctcacccccaaaaagcagggccaggcactcccccctgctgtcagaacacttgcatacatgttctgctggagcccatgtctcagttatctgctcctgcattcctagggcgggtgccaattggcttccttcaccttctgcctgcagggctgagctgcttctggctgacaagtgaaaacattagaagcaccctcatcaatccatccatttcttcaagaaatattttatatgttgacttcatttgagtttacccaaaggcagtttgagtcaagagcttagatgcaggtagttgacctgggaggtgattcccagaagcaggagagagagagagagagagaaccgagaaagatcggaggaccaacccaagggggcattactgagctgatcaccactaagggtcactgaggctcacttctactgaggactcagaattggtcctctggggacagaaggctgaggtatatatccccagttaattaagggttgctgtgaaggaggttcactgtgcattggttaccaacatgtctgtgtccagtgagagagaacgcattcatactcaataagttatatgaagcaaatttattacttacagacaggcagcaagggacaagaggagcattcattgcaagctggttgcctgaggctcaggaaatctgctcagggcaaatggagtctcaactgggcatgccccacttgcaccacagacgaggaatgccagagagcagcctgccctgggtttaacatcccagggtaatgtgatttgctgggcagtgttgaaggacatcctattttcagcaggagactggaactgaccttgggctgttcagccagttctcccttatctcaagatgctgcaatcctagcacattctgcagttattcctgagaactacatggtaaaaaggggactgggtctgtccaaggccacccaaactgccctgcagttgccccggggatgttaaatttccctgaattccaggctgcgcctgctcccaaggcttccggagaaagtcgtaagataagccctaaagaggacagcaacgagatgcttgaggtggcagcattcaggggaactctccacaacaatcagagagctgacggcagaggcaggcaagggacattagcaccaataatgtatgctacaggcacctaccatgttctagacagagtgccagacatgcagcagtgagcaggacagaccaacttatttgttctcatggagcttcatttcagtagtggaacaaagaatttaccaataaacaagtcagcaaacaagtaatgacgggtgttgtgtctttgcaaaaattatgacaataagaaaaatatgacataggaaaattacaacagtgaaagaaagctggcctaaccgactccatcttctaacctccaatctgcctttgcacattcctgggcataggccaaacaaatctgtggagaaacttagtttataatttcactttaaaccaaatataacagcccccccctgaaacaaacctccttcttgcttggggaccagaccacctttgtgaaactaacaaattagccacaagattaaaatttatgggccgggcgcgatggctcacacctgtaatcccagcactttgggaggccagggtgggcagatcacctgaggtcagtagttcaagaccagcctggccaacatggtgaaaccctgtctctactaaaaatataaaaattagccgggcgtggtggcaggtgcctgtaatcccagctactcaggaggctgaggcaggataattgcttgaacccgggaggcagaggttgcagcgagccgagatcacaccattgcactccagcctgggggacaagagcaagacttcatctcaaaaaaaaaaaaaaaaaaaaattatggcttaggagtcatgcagcccgaagccacaagattcctaacctccataattgctccaatagataatattactattatataacataagattggtgttcaaggtatttttcagaccccacattgtgatggactagccacccagactggtaaactggctatctcgtcttgtgaccccaacccaggaactaacccagagcaagacgaaagcttcatctcttcaggatttcatccctaacccaaccaatcagcactcaccattccctagccccctgactgctaaactatcttttaaaaaccctagcctccagactggcacaatcccagcactttgggaggccaaggagggcaaatcacttgagagcaggagttcgagaccagcctggccaacacggtgaaaccccgtctctactaaaaatacaaataattagctgggcatggtggtgtgcgcttgtaatcccagctacttgtaaggctgaggcatgagaatcgcttgaacaggaggtggaggttgcagtaagcctagactgcaccactgcactccagcctggacaacaaagcaagacactgtctcaaaaacaaaccccccccaaaaaattccttagactccgaatttgaggagaggctgatttgaggagtaataagcctctgctctcctggttagccagctctatgtgtatcgaactctttattgcaattcccatcttgaaaaattggctctatctgggcgacaggcaagaagaagctgttgggtggttacagtgtgatgagtgctatgaaggaaataacataaaaggtgacagagaataactagaggaggccattctagataaaatggtctgaggaggtgacatttgagctgagtattaaacattgagaaacaatctacgaagggaagatgtggtgcaagacctttccaagcagtgtataatacacacaaaagcccatgccagcaaaaagattttactttcacaaattctagaaactctaagagtaaaaagtggtgaaaagaaaggaagtgataacacatgttgccaagtgcagcaggcagaaacagggccatcaccacttcacgacaggatctcaaaatactaggaagtgtaaattaaaaccatgagatatagttttgtcattattggattgggaaagatccaaaagtttggaaagaccccactggtgaagatgtgtggaaacccacagtcttacacattatttgccagagtgtaaattagtacagtgtctaaggggggcaatttagccacgtttggctaatatattattttaaaggacatatcccaccatagccaattccacctctaagaatatttctgacagatatacccacatgcatgcacaaagacaatccacgggatccagtcacattattcctaacccaaagcaactgggaaacacttcaaggtccatcagtgaaggcccgcataggctaacctctgtaataaccaaatctcagtggcagtgtccaaccaggtgcttgtgggcgaccttccaacaggcaccgcattgcccggctgccaggccgggcctgtgtactgtccccgcatcccatacagctagcacttattcaccctcaaaagcgtcccatcctgaaaataaactcttgcccacttggtgcttcaggaacctgggcttcttccactaatagctctcccagatgccccagtgcgcaggtggggccgtcctctaggaccaggcctggctggggcgcacccacacctccttggccagacgccatgggccgggaaggggctctggcccttgcgggaatgagggcgcctagcataggtgtgcaagtgggcagcccccaccgtggggtccttaagtaagctggagcctgtgagccaggacagtcaggagttgcaaccttggtgatttctaggaagacagaaaatggggtcaagggccgggtgtggtggcttatgcctatagacccagcactttgggaggccgaggcaggcggatcaccttaggtcaggagttcgagaccagcctgaccaacagggcgaaacctcgtcactactaaaggtacaaaaattagccaggcgtggtggcgcacacctgtaatcccagctactcaggaagctgaggcaacagaatcgcttgaacccgggaggcagaggttgcagtgagctgagaccacatcactgcactccagcctgggtgagaacctgttaaaaaaaaaaataagaaaatggggtcaagaaacggtgggaggagggcagatttcatgaacctgcctgctatgatgtggctgcatttccatcatgcattgtcctaaaaaaagaaaaagaaaaaaataaaatgtagacgtggagggatgggggaaattgcacaggccggtccaggctgtgaggctgccccctaccagggacgacgagggccagctccgccgcgccgtaaggaaactggccaagggaaccccttgaatctggcgagggcccgccatgagacgctcggggaaccagactgccgagcccccctctctgggccgacgccagcccggctgtggactggagaaaaccgcaaggccacctgcagaaagaaaagaaggccatcgcgcctacgcagctgagcacccatactccgcccgcgcctgcgcaactgggtcccccgacccccacctcctctcccgcctgcgcatgcgcggctgggtgcgcccccccgcccagcctgtgacgccacgtgcatggggcggagcccaggccctagggaatcgtggggtcgtatcccgcgggtggaggccggggtggcgccggccggggcgggggagcccaaaagaccggctgccgcctgctccccggaaaagggcactcgtctccgtgggtgtggcggagcgcgcggtgcatggtaagcggcgggccggggcgctggcgggggcggccggggatcaccgactgtaggcgggcctcccccacgcgggcgcgctgcgctccggaggacggcctcggggtcactcgcaccccgggtcccacctcctgctgccttcctgtccaggctccattagggctccctggatgtctgggctccgctgaccggtggggggcaagtccagtgttttgggccacagggcgggccaaatagcaggggcctgtagccccagggggccccagccctgctgcgttcattcattcagcccgcttttgcggacccgcccccagtctgcgtcagggacagacccctccgccctggatgagcccggcggggaagcttcgcgtagcagtttctgggaaacaggtaggatcaggccgctcggacaggactgagggtgtaaggacgattcaccctggcattggggtggtgtcccgaggagctcataggtggtcagggcggttctgcccgagctgacctgtgagccgcgaatgccctggaccgagggagggagagccccctaggtggacagactagactccttcagtggaaaacattcaacagccaggagagcgtggaagaggaaggagagatgggagggcccaggggagcgtggaagggagggtgtttttattataagtgcacctgtaagtgcaaagtgcaaaggaagcagccgccgggaagtgcctgggcagctctgggtgtccctccaggcacctgtattccagccttacctgcgcgaagccacacatcccacgtcacacaggatacggggaagtcagccatagcctgcaggcggggaatctgaaacctcgcgcaggagttccttgggagaggtggattacaaggactcttcctcccacccgctgtgcaagagccatgggcggccggtagtcatttt

SEQ ID NO: 8985 - DNA, 6000 bp, Homo sapiens
tgaggcaggagaatcacttgaaccagggagtcggaggttgcagtgagccgagattgtgccactgcactccagcctggcaacagagctagactccatctcaaaacaaaaaaaaaaaaaaaaaaaagtgaaactatctcaaaaaaaagactcaggccaagacaggtctacactttcccatcttctaaattcaattcaaaggtcatctagaaggccagtatggcaaggaaaaaacaagtcttcatcaaatctagtagatctagataaaataagatacaggccaggcgtggtggctcacacctgtaatcccagcactttgggaggccgaggcgggtggatcatgaggtcaggagatcaagaccatcctggctaacacggtgaaaccccgtctctactaaaaatacaaaaaaaaaaaaaaattagccgggcacggtggcgggtgcctgtagtcccagctacttgggaggctgaggcaggagaatggcatgaacccgggaggcggaacttgcagtgagctgagatcatgccactgcactccagcctgggcgaaagaacgagactccatctcaaaataaaatataagatccacatcttggttgggcgtggtggctcacgcctgtaatcccagcactttggaaggccgagacgggcagatcacgaggtcaggagtttgagaccagcctgaccaacatggtgaaaccccatctctactaaaaacacaaaaattagccgggcgtgatggcgggtgcctgttgtcccagctactcaggaggctgaggcaggaaaattgcttgagcccgggacacagaggttgcagtgagccaagatcacactactgcactccagcctgggtgacagaacaaaacgccatctcaaaaaaaaagataagatccacatctaattttattgacacagaaaatgtcaagaaccccaaatttggttggtttgaagaacatgtgaagggtttgactagatgatgaatgtcaatattaaatcagctgaagtttcatatacaaaatgaagaggaacagcattcaaacttagttaagacacaatttccttgagtggccaggcatggtagtcatgcctgtaatcccagcactttgggaggccaaggtgagcagatcgcttgagcccaggaattcaagaccagcctgggcaacatggtgaaaccccatctctataaaaaatggaaaaattagctgggcatggtggtatatgcctatagtcccagctactcgggaggctgaagtgggagggtcgcttgagcccaggaggtcaaggctgcagtgagctgtgatcatgccattgtgttccagcctgggtgacagagtgaaaatgtgccttgaaataaaattttcctttgaatacggcttaagaaatatggccacttaaaactctaccttgaaaataaatatagattttatcttatctagaggtagagtgggaagttttcatttggtacattaaatctataaggccataaacaggtaatataaaaagctttcataattcaatttatatataacatgagaaggaacttccaggtgttactatgaatcttctatgtatagttacagtcaatatactttatataagagataattttaataccaatataatctagataacattttactttgttatgttatcattgttctcttggggaataaattttttcctctgaggctctggatttgacattgaattttgtgtgtactaattgacatgtgccagggcaatgatggactggaatccacccccaaatcaaagcatcatggtaaatcttgcttatccttataaagtcaaatgatagacatttcccatcacctatttctattcaacaagagcaccagattcagttagctaatctgcttccaaagagtagaactgcattgagctcaaataatttcaaaatactgacttttttttatttatttatttattttttagatgtggtcttgctatgttgcccgggctggtctctaactcctgggctcacacgatccacccacctcggcctcccagcatgctgggattacaggcgtgaaccaccatacccagcctatttctgcgtatgttaaacatgctttacaattttaaaaatgaactgttttgaaggtaaaattacaaatcttgaaattaaaaaagcaaatatgtaaaggagcaaaaactataaatcaaacatttgagaagagaaaattggaggctaacttgtattaaattcacaaaaacttctatactttctgtaaatacttttttaaaaaactatagatcagaggctaggcgcagtggttcacgcctgtaatcctagcactttgggaggccgaggcgagtggatcactgaggtcaggcgttcgagaccagcctgaccaacatggagaaaccccatctctactgaaaatacaaaattaactgggcgtggtgacgcatgcctgtaatcccagctactcgggaggctgaggcaggagaatcgcttgaaccagggaggcagaggttgtggtgagccgagattgcgccattgcactccagcctgagcaaaaagagcaaaactcagtctcacaacaaacaaaaaaactatagatcagaataaccacctttagaacactttcggttatcagtcaatatttttagatagaagctggtagtaagcctaaagtgggcttaattctgcagtaaacaactgcctcaacacatagaaatcttttttaaaataggcactcttggccgggcgcggtggctcatgcctgtaatcccagcactttgggaggccgaggcgggcggatcacgaggtcaggagatcgagaccatcctggctaacacggtgaaaccctgactctactaaaaataccaaaaattagccgagcgtggtggcgggtgcgtgtagtcctagctactcgggaggctgaggcaggagaatggcgtgaacccggaagctggaggttgcagtgagccgaaatcgtgccactgcactccagcctgggtgacatagcaagactccatctcaaaaaaaaaaataaaaaataaataaaataaaataaaataggcactcttgcgggaggtggcagctcatgcctataattgcagaactttgggaggccgaagtgggcagattgcttgagcccaggagtttgagaccagcctgggcaacatgccgaaaccccatctctactaaaaacacaaaaagttagccgggcgtggtggcacacacctgtggtcccagctactggggaggctgaggtgggagaatcacccaagcccagaaggtagaggctgcagtgagctgtgatcatgccactgcactccagcctgggtgacagagtgagaccctgtctcaaaataataataataataataataataataggccctccttgaagttttttgtttgcacagtcacacagtgatgcttagatgttccagtatctaatatagccacagtaggctgcaagcagtggctcatacctgtaatcccaacactttaggaggctgaggcaggaggatcacttgaacctaggagtttgagaccagcctggccaacatggcaaaaccccatgtctaagaaaatatatatttttaacttttttaacaatatcaaaaataagaatcacataaataaacagattcttcaaattctgaaaagagccacaaagctttataaattgtacaggggcatgaactcgtaaggtattataattgcctggcacatagtaggctctcaatacatttgcaaactccacacacaccttactttcttttgctttatttttctctatttatctgcattaacatgctatgtaacacataactatacattaacgttttacaaattacaaatttttcttgttttttttttttttttttttgagacagagtctcactctgtcgcccaggctggagtgcagtgggctcactgcaacctccgcctcccaggttcaagccagtctcctgcctcagcctcccaagtagctgggattgtaggcgcccgccaccacgcccggctaattttttatatttttagtacagacggggtttcaccgtgttagccaggatggtctcgatctcctgacctcgcaatctgcccacctcggcctcccaaagtgctgggattacaggcgtgagccaccgcgcctggcctttttttttttttttttttttttttttttcagacggagtttcgctcttgttgcccaggctggagtgcaatggctcagtcttggctcactgcaacctccgcctcccgggttcaggcgattctcctgcctcagcctcccgagtagctgggattacaggtgcgtgccaccacgcccggctaattgtttgtatttttagtgcagacggggtttcaccatattggtcaggctggtctcgaactcgtgacgtcaggtgatccacccgcctcggcctcctagagtgctgggattacaggcgtgagccactgcgcccagcccattttacagacttttattttgttcagtttctttattgtcttcccaacgtccccccacacacactgcactaaaatgcaaacttcacgaaggcaaggaggaacttttgcctgtattgttcacctcagtgtccccagagcctaggtcagttgttggcatattgagggacattcaataaatatttaaggagtgaataaacaattggatacccaataaatgcatgtatgaataaacacattcttagttattcggaatatgaggatttgcggagagtggacagcaggggattgaggagaccggctgggactgggaaatgggcattcgggtcgcatgcccaccgcagtggcccagagcccctgtccggaccgctaacaagttgcttagcaacccgccgcccggccctcggccaccgctagagggcgagcgggcggggagacgtgcacgcgcgcgcgcgtgcgtgcaagcgtgtgtgcgcgcgtgcgcggcgcgggcttgggagggagcacgtcacttcctgttgccttaggggaacgtggctttccctgcagagccggtgtctccgcctgcgtccctgctgcagcaaccggagctggagtcggatcccgaacgcaccctcgccatggactcggccctcagcgatccgcataacggcagtgccgaggcaggcggccccaccaacagcactacgcggccgccttccacgcccgagggcatcgcgctggcctacggcagcctcctgctcatggcgctgctgcccatcttcttcggcgccctgcgctccgtacgctgcgcccgcggcaaggtagggtcagcgggaaaaccgggcactttccacccccataccgaacacggccgacatggacccttcctaggcgggacagacacctctccccggacactgactcttcccagccctgatcaccaccgttccctctgtctcgggcccacattccggggctggcatttcctaccccgggatctgggcaccgacccccgaccagggtatgataccttccccaataggaacttgcttctgctcccgacccggaccctgacacttccctccctgtgcatcatgccgcggctgggaacgctgtcagcccgtcccccactgcgactcgggcactgattgttctgagcctgttgggcccaggcagatcagccccatcatgtatacctgatggatactggtcctcacaacttactgaatggtacaatttcgtgtcattccctgttaggaaccctgcctcagcccaccgcagggccctttctaccatccagacccatccctagactctgactcctgtctcactggaatctatggcaccttatgtgctcacctagatcccccacacctggcccttgcccctgcctcaaaaacaatgatctcttagagcccagtttttcacatcactttctggaaccatcccagtcagctggctcctcagaagctggcatcttggtgcctctactttccaactaggcatggacgtcttattttcctggtttcctctcttaactaccatccaaccttggacatggcctagtcaaaacc

SEQ ID NO: 8986 - DNA, 6000 bp, Homo sapiens
gacctcctccctgggttcaaggggctcccgggcctcctgaagggctgggggtctgggtctgtgacgctttgtccagctcctcttcctattttcaccttagggtcctgcgtgaggcctagctcttccacagtatcccctctgggctggcaggccggaggtgggtcctgtgtgatacctagagcctggctggtggggggatgctgaggccatggctcaggtctttgcatctgggcagaatctgggggctccctggagctgatcaagtgagcgtgagctgccatccctcctgctggcaggtctcagcctatcccagagctctcagcatgtcgggcctgtcacgacaagtggcctgaatgccgtgtccggagtcccttccacccttggaccccccgcggttccaggagaagacccttattcctcggctctgggaccccgagtggcctgccttaagggacagtccgtctcttcccaggttcaggaccttgaaaggaggctccgcagttgtcctgcaggctatattcaccgtgagctactcagggccggcctccaccccatggccctcagtccggggctgggcttcccccacagatgttccttatcacagcatcactcaacttctggagcctgatgttcccacagaggcgggggcggaagagggcagggaagaacagaggatcgcctttcccaaatgccttcccttggaagaccctgtgaaactgaggagatgggggaaactgaggcccagaaatggtgccgcttggccagagtggctgtagtagagccatgcatagacacaggccactcactccagtgcagccaccgccctcccagccaccctgaaaaaggtctggcaagactcatgaccttccgcctggcgcagtggttcacgcctataatcccagctctttgggagaccaaggcaggaggatcccttgagctcaggagttcaagactaacctgggcaacataacaagaccctgtctctacaaagcttaaaaaaaaaaaaaaaaaaagacaaggcatgctctcctccaggttcttaaagaaggagtgtcttcccctgtcctctgtccatagggctgttctgtagaacatcctgctcagtgaccgaggtaaggggtggtcctttttttttttttttttttttggaaagggagtctcactctgtggcccaggctgcagtgcagtggtgcgacttcggctcactgcaacctccgcctcgcgggttcaagcgattctcctgcctcagcctcccaagtagctgagattacaagtgccccccccaccacgcccagctaatttttgtctttttactagagacggggtttcgccatgttggccaggctggtctcgagctcctgacgtcagatgatccacccgccttggtctcccaaagttctgggagtacaggcatgaaccacggtgcctggccaaggtgatccttttgggggtctctcacgtttggaattaccttggttggggaaggggaggagcagctcccagagtgaccagcagagggcgctgggcccaacatggtcagttctgggagctggactcttggaactcgggaagactcccaagctgccttctcaaagttttgtctctggcagcgtctagaatggaggtgatgtgcactctagggtccctctaacaccttcccttgagcccctcgccttctaggctcatctgcccccaggactaagccccctccctttatttatttatttatttatttatttattgagacagagtctcgctgtgtcgcccaggctggagtgcagtggtgcgatctcgggtcactgcaacctccgcctcagcctccctagtagctggtactacaggtatgtgccacgacacttggctaatttttgtatttttagtagagacaggttttcttcatgttggccaggctaatctcgaacttctgacctccagtgatctgcccaccttggccccccaaagtgctgagattacaggcatgagccaccatgcctggccagcctttagaaactgtctttagcaggcccctgtggactcactagggtataggaaccctgatggaaggcatgggggctgggcataccccatggacctagagccaggagacctggaaagctctggtctccaggccaccgaggggacccccagccctctcccattcatccaccatccgtatactaacagtcccgggacacatttactgaacttgtgctctgcttcatttgaacacatcactcctcttcttaactttggttgcctcccaccttcattttattttatttatttatttatttattgagacagggtctcattctgttgcccaggttggagtgcagtggtgcaatctcagtttactgcaacctccacctcctgcctcagcctcctgagcacctgggactacaggggtgtgccaccatgccagcttaatcaccttctttaaataaaatccaagctcctcactaccgcctacaggtccttctcggtggtccagcccacctctccctccatccagcctcccctttaaccatgacactctggccaagatgacctctcttcttttgttattgtttttgttgttgctttgagatggagtttcgctcttgttgcccaggctggagtgcaacggtgggatcttggctcactgcaacctccgcctcccagattcaagcgattctcctgcctcagcctcccgagtagctgggattacagatgtgcaccaccacacctggccaatttttttatttttagtagagacggggtttcaccatgttggccaggctggtctcaaactcccgacctcaggtgatccattcgcctcggcctcccaaagtgctgggattataggcatgagccaccgcacctggctgtctcttctgttcagttgtttttttttttttttttgagacggagtctcgttctgtcgcccaggctggagtgcaatggtgcaatcttggctcactgcaacctccacctcccgggttcaagcgattctcctgcctcagcctcccaagtagctgggactacaggtgcatgccaccacgcctggctaattttttgtatttttggtagagatggggtttcaccgtgttagccaggctggtctcgatctcctgatcttgtgatccacctgccttgacctcccaaagtgctgggattacagcgtgagccactgcacctggcctgtctcttctgttttttgaacatgctgtgttttcctgcctctgggtctttgcacaggccttttcctctgcctagaacagaattgtaagccctgtgggggcaggaactatgtctggttttttttggctctatagcccccaacatttatcctggtaaacaagtatgcaataaatgccagctgaaacaggtctttataagttttttttaagtttttttttttttttttttttttttgaggagtctcactctaccacccaggctggagtgcagtggtgcgatcttggctcactgcaacgtctgcctcccaggttcaagcgattatctagcctcagcctcccgagtagctggaattataggtgtcccctgccacactcggctaatttttgtatttttagtagagacgggatttcaccacgttggccagggtggtctcaaactcttgacgttaggtgatctgctcgcctccgcctcccagagtgctgggattgcaggcatgagccaccacgcccagttttataagtaattcttgaataaatgtgcctgagccttgtctattttttttttttttttttttgagatggagtctcgctctgtcactaggctcgagtgcagtggcatgatcttggctcaccgcaacctctgccttgcgggttcaagccattctcctgcctcagcctcctgagtagctgggaccacaggcgcctgccaccatgcctggctaattttgtttgcatttttagtagagacggggtttcgctgtgttagccaggatggtctccatctcctgacctcatgatctgccccccttggcctcccaaagtgctgggaattttttttttctttttctttttctttttttctgagacagagtcttgttctgttgcccaggctggagtgcagtggcccgatctcggctcactgcaacagccgcttcccaggttcaagtgattctcctgcctcagccctctgtgaagctgggactataggtgcgcgccaccacgccctgctaactttttttttttttttttttttttttgagatggagtctagctctgctgcccaggctagagtgcagtagccggatctcgactcaccgcaacctccgcctcccgggttcaagcgattctcctgcctcagcctcctgagtagctgggattacaggtgcgtgccaccacgcccagctaatttttgtattcttagtaaagatggggtttcaccatgttggctaagctgtctcaaactcctgacctcgtgatttgcctgccttggcctcccaaagcgctgagattacaggcatgagccaccgcgcccgcccaatttttctatttttaatagagaaggtgtttcgccatgctgggcaggctggtctcaaactcctgacctcaggtgatcctcccgcctcggcctcccaaagtgctaggattacaggcgtgagccactgctggcctaaaagatgcttctggagtaggaggcattgggcctggctggaaggtttgcgtctgcaaaggcctgaagagaacatcccaggtgggagaaacagcaaggaggggaggtgtggaggaggcagggagaccctgttcttgggactactgtctgcagagggtctccagaggcaggaccccggtagggacactgatgcaggaggcgctctgcagtgcctccccccaatctgtgggccggggtgcccccagggacgcaggctgtgcgctcccacgccctgccgaagcaggacgttcccacgctggggcggccccgagaaaggctgtggggcgggccgggggcgggcgcccgcactcaggtccctccgcagcgggttctcagttgctcgctgggcagacccaggtcgcgctcccactgccgagcccgcgaggtgagtgagttgggggaggaccccgccacccaagcccgcgcgggtcaggggcgcggctcggtctcctgccttcgccgctgggtcacgccccagtggtccctgtcttagagggttggggggcttcttgtaggttagagttgaagactcctggggagtctgcatatgtgtgccatctctttccccaaatatagattacatcctccctctcttgatatgtggagctctcccacccactaatcataatcactggccggagcccctcttttccagaagtgtgggccgccccctcccacttatcacctgtagtgtgccccctccctcactctatttgttgggtgcccctctctctccctagatgtgggactccccttcttttccccagatgtgtgtctccctccctctgacccagttaagtccccatcctctaaagcccctccccaccaccatggatgccaaaccctgagtcttccctgggggtgggagactgggctcagccagactggctaagcccagtccccaccccaaccagatccagcagagcaggcctgtgtgcacgtaggcagccaattaggggggaaggggtgggggccagaccgtctgtctgttctgccggtgcaggggcctctggcccctgcagggaagagagactcaagaactgctccctctccacctggaccccacccagcttcctctggggagcaaacaagtgagcggggttctccaatctggccagactgagctggggctggcaccagaacccaagccctcagcctcaaactcttcagaccctggcccaagacttaggcctcctcccacttctcagatggtgaattgaggtcccaaaaaggggcttcaaaggtctaggacccccattggccccccgctggggatatcagacaaaattagaagggtcaagggcatgagggtgaccttgaaacactgggacaccc

SEQ ID NO: 8987 - DNA, 6000 bp, Homo sapiens
gcttaaaaatcaaggaactttacagtaaaatccagatttctgacttctcttgaataattaaaaaatctgaccagactgaccacccattcccaattacaacaccccacaggagctgagtagcagctgtccctattattattttattttattaataagtaaatacatgcacatgattccaaaaagaaatcataaattggcatgtatcatgaagtctccctcccatccttgtctgcccttctccccagttccccattcagtaatctctttattttctcatgtaaatttccaaagtttctttatgcatatataaacacataaaaatatagattattattccccttttcacctagcttcattccctattctctgccttgcttttccctgaggaggtctttctgtattaggacatagggagcttgctgctacacgccatcgcattgtcagaagtctcatgatttatttagctggtctcccactgatgggcatttgggtcattcccactatttgcttttataaacaatgctgtatcagtgttctcatgcatagtttgcacaggtgcaaatattttagtcggaactaaaggaagattattaggagctggttcaagcagagggtgcagtaggcaagagctgaaccctcagcaggatcccaaagcaaggctaagcaaggaaacgtgatgaggtctgtttgtaaaagtgattcctggcaaggcacagtggttcacgcttgtaatcccagcactttgggaggccaaggcaggaggattgcttgagctcaggagtttgagaccagaccgggcaacaaagcgaaattcgtctttacaaaaaaatgttaaagactagctggacatggtggtatgtgcctatagtcccagctactcaggaggctgaggtgggagtccaagagtttgaggctacagtgagctatgattgcgccactgcactccagcctaggcaacaataaagagtgattcccaacaaaggtcagggatgtgggggactagggaaaggctcccagattggctcctgccgcttgcaaaaatatgggacttctttctgggcctcagagtccctgcctgtaaaatgagagaggggcttggagagctggatgaaatcccaaaggacttttccagttctgaccagctgtggccaccttctgtctccacaccagacagactcagcctcttctcagcccttgaacttgcctcgctccatcctattgcagagtgcttgcccaaactgatcccaccctggcccccaccactggaacatcacctctgtgcactcctattggtttttgtctgaattgctgaactggcaggccactcggaacacaccagcccaaaccccttcagggtagagtcccctgtacaataccccagacaggtgggtcaccctcatacctgatccacacttcaaatccttctccttgtcactcccctaagtcacctgaacttttagcatagagttcttgaatgccaactctgctacttcctaacaaatggccttgtgacagtacctccctgaatttcaatttctacctgaaaaatggctggtttgaggataacatgtgatggtattagtaaagttcttagcacagctcctgacacacagaaaggcttaataattccataagtcactgcccttgtctgaataagttaccttgtttataaaatggagagaacttatagaacctattctttttttttttttttttttgcgatggtatctcactctgtcacccatgctggaatgcagaaacatgatcatggctcactacagcctcaacttcctgggctccagtgatcctcccatctcagcctctctgatagctgggactacaggtgcatgccaccacactcggctaatttttgtatattttgtaaagatggggccatattgcccaggctgttctcaaactcctgggcttgaacaatccatccacctccgcttcgtaaagtgctgggctacaggcatgagccaccatgtccagcctcagaatttataggggtgatcactcactcacttattcattcattcattcattcacttaatgatttttgtagaatacctactgagtgcccagcatagcactgggcacaaggagatttggtggtgaagaaaatagatgaattgttccaaccctcatggagctcccaggcaattccgaacaggcaaacatacaaagataaattgccagtgtgctgatatgaagaaggaaaaaacaaagatattatggaagctcataacagggttgtgtcagggaaacttctctgtgagataaggatcagggcatggctgggtgggaaagccaggagggtttcctgaaggagacatcaccctagtctaataattagctttaattatcctcaccacagccctagaaggaaggcactggttatctctcattttacttttctctgaagttaagagaaattaagtgacttgcccaaggtgatggagctaggaagggatgaatgggtttttgttttgttttgttttgtttttgtttttgttttttgagatggagtatcactctgttgcccaggctggagtgcagtggtctgatctcggctcactgcaacctccgcttcccaggttcaagcaattctcctgcctcagcctcccaagtatctgggactacaggtgtgcacaaccatgaccggctaatttttgtatttttagtagagacggggtttcactatgttggccaggctggtctcgaactcctgacctcgtgatccacccgcctcggcctcccaaagtgctgggattacaggtgtgagccaccgtgcctggctgatgcatgggttttaaacccagatttcctggctgtggagtctccgacctaaaaacctgtcttctgctgcctctttgaataggcaaatcctgggatatagagcatcatgggaagtagagaggctgccttcacttggatggggcccagaagtgggactctaactttgccgtatcctatccagacaccagtgaaaaggaagagatccagacacatccaagaactgactgaggaccctcagggtggctggggccagagtttctctcctgcccgctaccatccagggctctgtgcacttcattagtctccctgcctagggttgtgggagagaaagaaaaatcagagatattcctttctaaattacactgggattcagaccttccagcccgacccacaaacacccttgctcactaaacatgcctgtcaataggcaactgtcagccttgaatccatcctggaaaactcccttaatccctaactctttcccctctgttttcagccttgggcaacagctggtaccccaacctcctaagcatgctgagaccaaaacagtccctgggcatgaaaaggatgccaggctgcaggactgcagttggcttctccttcctgacccagggcagctctctcctttcatcctctcttccctgccactctgaggcaggttggttctcccacttcccttcctcagctcctctttcttcaacccctaccctttgcccctcctctctccctccccttgaagggtagcaaagcctattctggagccagatgatgggcatgaatttggctgtagctactaattgtgtcaccctgaacaaattaatttctctgtgacttagtttctgcatctgtaaaatgggaggaaaaaaggagctacctcacaaattgtgagggtagaatgagttagtaattgtagtgttttggacagtgccaggcaaagagacactactatatggatgtttgtataataaatgcctggatacatccaatctgatcaaaggcagagatgggaaatgagcttggggtatccaggatgtgtgggaactccaccccctctcataggttactgctataatctccttctggtctcaccagccccaggctgcttccttgtgatcgcttctctactctggctgctgggtcttctttctaaatcctgatgtgaccacataactcccctgctcaaatactgcagtggttccccattgcctgctggataaaggccaccttctggccccttaggatctcatcctcagaactctgcagccctatcttccccatctttctcctcccctggatctgagatccagacttgcttgaagatatgccctccagtctcaggcctccaggcctttgcacttgctctttcctccacccggtgtttcctcccatccctttcctcttgatgttggatgttgtccccttccctccccctactctactagggctgtagccagatgaaggcagtccccgagagagggaaagcggagagtaaggaagagacagcaactcagagctgcagctttctcagcttcaaaacgaagacaataagaaaaggggacccctcaagatcaaaggaggggatggaacaatatgtgagcactcaggaaactggaaatgagcgttagcatggagtgactgctaaagggttactggggggcccgcccaagtcccccagctcctttcttccaagtcccccacccacccccccgtcagacccaggccactggaggtgaacacaggagaaaaacgaagtggagagaatgggaagggggaggcgataaacaaaaaagaaggaagtgcagtccgaggggagatgagagacagaaagcatggggttggagccccgcgcctccgaggaaggagggagagggtgacctggggtgcgccccgcctcccctgcttccgcattcccgggggctgcccccccttcggccgcagctcaggcgggtgggggcggggcggggcggcgccgaggagaatgaataattgaagtggaggggaggaggaagaagaggagaaggaggaagaggagccgcccgcgcagggtcctccccacgccgcacccccctccgccgcccggaagtcgctccccgcctccctctccgccaacatggccgcgaagtcggatggagcggcggcctcggccagcccggacccggagggggctgccggtggagcccggggcagtgccggcgggcgcggggaggcggcggcggcggccgggcccccgggggtcgtcggggcgggcggcccggggccgcgctacgagctgcgggactgctgctgggtgctgtgcgcgctgctcgtgttcttctccgacggtgccacggacctgtggctggcggcctcctactacctgcagaatcaacacacctacttcagcctcaccttgctgttcgtgctcctgccctcgctggtcgtgcagttactgagcttccgctggttcgtctacgactactcggagcccgcagggtccccgggacccgccgtcagcaccaaggacagcgtagccggcggagccgccatcagcaccaaggacagcgccggcgccttccggaccaaagaaggcagccccgagccgggtccccagcctgcgccctcctcggccagcgcctaccgccgccgctgctgccgcctctgcatctggctgctgcagaccctcgtccacctcctgcagctcggccaggtctggaggtaggagaagcgcaggtggagggacctgagcccgaggagtgggggtggcgaagggctacctgacgtcccagccctgatctgacctttccgggctaccctcctgtcctgacctccccccctccccaccccattgcagctctaatttcttctcagtcggcttctccctgacctctgcccccaagccctgaccaaccccagtgccatccggtctgacctggccttcgagaggggaggggatggttcaagaaaggagagaaagagatcctcaggggtgtgcgtgagtggggaggacccggggctcatgaagataaatgtgaagcttaaaacaggaccacagggccctattctgccataacccactcctctctgcctgagtgccaagcctgggctcaggaaagatctcagaagtcctttcctgctcgcaaagatcctcagttcagaattgcagctcattcacaacctgcaaggagagtcacagaatttgagacagctaaatgaatatcccgc

SEQ ID NO: 8988 - DNA, 6000 bp, Homo sapiens
taaaacccaacaattaaaaaaaaccgtatctgctaaaatagctgagattcaaaacactgatgacaccagatgctgaggaggatgtggagcaacaggaactctcattcattgctggtgggaatgcacaacggtacagccactttggaaggcatctggcagtttattaccaaactaagcataacctactacacaatccagcaattgtgctcccatatgagttgaaaacttacgtctacacacactcacaaaaatggcacatggatatttacagcagctttattcataaatgccaaaacttggaaacaattaagatgtccttcaataggtgaatggataaacaacttgtggtatattcacataatgggatattattcagcactaagaaaaaagagttgaccaggtgcaggtgcagtggctcacacctataatcccagcactttgggaggctaaggtgggaggattgtttgagcccagaagtttgagaccagcttgggcaacaagtgggacccccccccccaccatatctacaaagagttaaacatttagctggttgtggtggcatgcaactgtggtcccagctacacaggaggctgaggcaggagaaacacttgagcccaggagattgaggttgcagtgagccgtgattgtaccactgcactccagcctgggcaagagagtgagaccctgtctcaaaaaataaataaataaataatattggccaggcacggtggttcacgtctgcaatcccaacactctgggaggccaaggcaggtggatcacttgagcccaagagtttgagaccagcctgggcaagatggtgaaaccccatctctacaaaaaatacaaatattggccgggcatggtggcaggtgcctgcagtcctagctactcaggaggctgaggtaggagacctacccaggaggtctaggctgcagtgagccgtgattgtgccactgcactccagcctgggtgatagaatgagaccctgtctcaaaataaataaatagcggggcacagtggctcacgcttataatcccagcacttttggaggctgagatgggtggctcacttgaggccaggaatttgataacagcctggccatcatggcgaaaccctttctctactaaaaatacaaaaagattagccgggcttggtggcaaacacctgtagccccagctactggggaggctgaggcaaaagaatcacttgaacctgggaggcagaggttgcagtgagctgagattgcaccactgcgctccagcctgggcgacagagtgaaactctgtctcaaaaagaaaattcaaaaataaataaataggccgggagtggtggctcacgcccgtaatcccagcacttcgggaagccgaagcgggtggatcacctgaggtcaacagttgcagaccagcctggccaacatggtgaaaccccgtctctactaaaaacacaaaaattagcctggcttggtggcgggcacctgtaatcccagctactcgggagactgagacaggagaatcgcttgaacctggaaggcggaggttgctgtgagccaagatcatgccactgcactccagcctggacaacaaaaagcaaaactccatctcaaataaataataaatagataaataaaccttttaaaaagttatatataatattatatatattttatatttataaatatatagttatatacttatattaaacatagattatagtttacagctgctgtgtttctatatcttagctattatgaatagtgctgcaataaatacgggggtgcagacattgatttcatttccttttggatatatactcagaagtgggattgctgcattatatggtagttccatttttaattttaattttgatgaacattcatactgttttccatagtgaccgtaccaatttatgcaagagttcccttttctccacatccttgccaatacttattatgtgtcgttttgataataatggttctaagaggtgtgaaatgattgctcattgtggtttcgatttacatttccctgatgattaaggatgttgagcacctttccatttacctgctggccatttgtctgtttcctgagaaatgtctgcttagatctcttgcccatttttaaaccaggttatttgggattttttgctattgagttatttaagctccttatatattttggatattaaccccttatcagatcgtttttgatttgtaaatattttcctcagctctggaggtcacctttttactctgttgtttcttttgctgtgcagagctttttagtttgatgcaatcccacctgtctatttttgctttcgtttcctgtgcttttggtgtcatatccaaaaaatcattgcccaagccaatgtcaagttttccctatgtcttcatctagtagctttacagtttctggccctataagtctttaatccattttgaattgattttgtatatagtgtgagataaaggtccaatttcattcttttgcatgtggatattcatttttagggatgacgaaaatgttctggagacggatgacggtaatgattgacaactttgtgaatgtagttgatttcactgatttgtgcacttaaaaatgattaaaatagtcaatatttagttatgcatattttacaacaatgaaaaatatttaggccgggtccagtggctcacacctgtaatcccagccctttgggaggccaaggcaggcagatcactcgaggtcaggagttctagaccaacctggccaacatggcgaaaccccatctctactaaaaatacaaaaactcagccgggcttggtggcatgcacctgtaatcccagctactcaggaggctgaggcaagataattgttcgaatccgggagtcagaggttacagtgaactgagattgcgccactgcactccagcctcggcaacagagtgagactccatctcaaaaaaaatttttttcagaaaaaaaagagaaacttgcccatgttatggagctaatgagtggtggaaatgcgttctgaacccaggcagtctagttctaggattctggcatatgtcaccaaaagagattgggatatgaaaggcctttagggaaaaatacaaagcatgagaaaaaaaatggaaatactaaaaaataataggccatttatggagctttgctccttatcagttatctttcttcaggcagctagaaatggtgggaaacactcaggatcgaagctctaggaaaactggttccaagtctggaaactatgagactgcagcaaattccccctagtctctcaagcttcctcctccttggggttaatagccaatctgccaatcttcaggatggttgtgcaggtcacaagagttaatgggtgtgtgtttcaatgatctattactgaaatgatctataataaaccaccccactctaaagctgggcttagctgggcagttcttttggtccacatggtgttcatgaggttattcatgtagctgcattcagctagtagctcagtgggggttggaatgtccaagatgacttcagttacatattatagtgcttagctgtagtttctagaatgtcttgaggagttggctgggcctccctctctctccaggtgcctttccagcagagtagctacacttctttataaccaagaaggtagaatcagacgttttcaatcctcttaaggcctaggctcagtactggcagaatcacttgtagcacatcctattggtcaaagcaaccaacatgaccagccagattcaacaggaggtaaaacagagtctatctcttgaggagagaaaccgtatgctcatcatgcaaggacggacagaactacgtggcagccatctttgcagaaaatccaccacagtggtgcccataggtggggatcagagttcaactgtcccttgccccctagaattagataaaaagagtctaatgaactgttagcataatgctaagtgctgcagcacacaaaatgctcggcaagtgctgatgattattattaatcattattattcttttaatagcttttttaaaacagtctaagatagcactggtactgtattcagtttaaagtgatatacatgggtcaaatgaactttgagttctttcccaaccttaataccatgattctttgagtctctttttcacagatttggaaactgaggcttaggaagattgcgtgacttgtctggagtcacacactaagctagtgcatgacgtccacattcagagatatctccctccactgaatatgctggttttcactcgttcatttaaaaaataatgtattgggcatctaccacaagcccaaaggagtatacataaacatatactgacaattatttattgaatacatcctatgtaatactgtgtcactgaatcctcatcacaagcctatgatgaaccaacccccttcccatttcacagatgggaatgaggaagagcaaggtaaaaaacgaacaaacaaaaaaacagggtccaccctcatggggattacagtctactaaagaggatataggatagtcaaacaaatacttaaaatcaaacaaatacttaaatatataattacaaattattcttggagtcgtactgctcttggagccccagtgcccaccctttccctcaaatcaaggtctcaggtaaccctggcaatgggtcttcctgccagtagtaaagatggcgctgagagcacgagcgcactttcgcacacccccattacccacaatgcagcgggaataagggaggctcagtttctgccaggagctaatatggcttccttagttacaccgttctctctcttcacctaatcagcgaccttactttcccagaccagactgtcgagcaggagctaagactccttttcccctctgctgaccgccactacaggagcggttgaagccagacgaccaccttgtggagttaaactccgtaaccagggagcaccacttccgctgacgtcattacggcgacacgtggatccaagatggcgacggcgatggtgagtgaaggagactccgggagcgggagctggagcggggccctccggggtatcccaggatcttccagcaccccatgcctggccctgagccacctccgggacccctgactcaggcctgagggctacctctgactgggcttgtcttccccgaaatccacctccctggccctgcccctgcactcaggcttgtgaaggccccgagttttgggggaggcgccgtttcggaggaagacctcggctgctgccttcgccggttcccattctacttttggtctccgcccactgtgagccccattttccatttctcacctccctgtcctgacccctctgaagaccccctcccgttattctcatccttgctcctccccgtcacgtccagaccctgctctccccgcctccccaccatcataaccagtccgcagatgtgacctctcctctgaccaccctcccagcccaagcgctgcctcagatccttttcagagccctgtcctcacttacactcatagctgtccccatcgcgcacccccttgactgccgctaccccagagcttgccttcacctaccccacccccatctttcatccctagaggcttccctgcccttcctgtcttctctcagtcaactccctgcccctctcttagggaccttttaccctgttggttctcaaactttactgtgcataagaatctcgaggtgtgtagggggaggcatgctaaaaatgcagtttcctgagcagccccactcccagagattctaattccatagggctaggtgatgcccaggaatctgcccttttataagcactctagtgattatatagtggaggtggtctgtgaactacgttttgaaaaacactaatagccccacctcactgctctccttcccattccccaacatggccacacagctcgttagggatgaaggctctttattatgaagctatatgttgggatgaagtctgtgtgtggatgagggtggaggtaaaatagccatgcttggaagttgggtcagagcttgc

SEQ ID NO: 8989 - DNA, 6000 bp, Homo sapiens
accaggactagaactggtcccatcctgaccaccaccacttctctgggtcactgtgtctcagggcccagaccatccctctttagcaaagcctgtccaacacccctaggtgctgagaggcccctcctacagggcctcagagtacatatgcacatctcctttagaagacggtagcgagctcgcattggaatttactcctctccaccagcctgattgtctgagggcttgcatcatctctctttcatctctatatacctaatatctagaaaaggaaccctaactttatttcagataggtaaactagtcactgaatgcaggttgattctcagggaccaacctaggcccaggtagttctggtttaaactgggttcgcagccattcccaagtggggagccgaaatcttaaagtctgattctttctcttgttgaatagaaggggagatgtgcaagaacgacacaactccattccagatactaatccagaggaagaggatgggagttaccacactgactctcaaaaggggacaagagacccacattcatactcccaagcttaccacagattaccaaccacgatgcaacctgctacaacagggggattccctttgaagagatggtgccaaaatttgatcatgaggcttttccatgtgaagagagaaaagggggtgtctggggattatccacgagaatctggggagggctccaactgcacaaactagctgtgggccacagaatgcttgctcagctcattagcacctgctgcttacagtgaccattcatccaacagactggccgtgaacaagatgatgggatcagcgggttcatgccccagagagctttgctcatcattaacatgagctacgtcctgttcaggaaccattcctcttgttgaagaaacactgcgatgtaatatgataaacacgtccccatcacgagtgtagatttgtctagaaagatctgcattaaggtggctgcattttgcatgaatcacatgctggggaggggtaggtagcactaaaaactagtcccacttgagccttcaagtcattatggcatatgtgcctgcttcactataaacctcaaaggcctgtgacgtctggctttcattgtttaagtcccctcctcctttgcaagggtggaattacctgtttgtaataccagcaattactatgcaccttggaattgagcagagagtgtgctcgagtgtgcatgtttagattggagggaattacccctaccttcaaagtcaaattctactcccccttcaatttgaaatcatgcacctcagcctctggaaagttgggaatggcagccagaaggaaacaagtcacatcaatttggctgatgtgagagaggagcctagccctggaaactccacacaaactcagaaagagaacattacgtccccacctcccacacgtccacctcatctgttctcctgaacaagcacaaacaagacacaatagtttagtaggctgctactgaaagagtgagtaatgggcttctaggaaagaggctggtggtggctaaggagcttgtactgatagaaccaaaggaggaaagcagcagccatgtgctcaccttgatctgcttttaatggggctatgtcttcacaaagaaaagagccaacaccctgatcctactctcctacacttttcaaaaggcacaggaagtccctacctacagtcaccagcagcctcttggataaccaaagctgctagtgttacctaggaacccttttggggatctagtctctctctgccctttgtctgaaaactcctctgatccagaaagattcctgggtttgtcttacataagcagaaggcctgttccttcagacttgtccttcctcagcaaaactgtgaaagaattctacttctctttcaaagctgctcttctggtctcacattttaatcttaacaactatagactatagagaagctgacagaacctgtttccataaaacaaacacaatccttcccagttactggcacaactcagtatattttcagcctaagattctttctagtgcctgatctgaaaggggaaagaaccttggacttgctatcagaagagctgccacttactggctgggaaaccataggcaggttactttatttctctgaacctcagtttcctcaatttctaaaatacggatttattttccttacctgtaagattcgtatagaggattaaatgaaataatactcttgaaagtggctgatacaaaatgtgtgctctgaatacatgcagtgccttctctgaggtctcggctgtgtctgcctctttttccgcatgaggcctgaatagtacttctttttttcctctttaatgttacttctcaggcctcagagtgagtttccttcctttcccaacatctcccccagaatgcagtcttccccttttccctcacaactaaccctcggcacatcccctttaaagagccccttactttacctccctccaggcaccatctcctgggccagagttctctcttaagcagagagccactttcctatactctcttgtattattagggctccatatcccaaacaggaatgcttgctaaaaactctgtatggtcctctttgaaagctgaaactgagacatatttctccccagtctgtccgtcccctgttatgggccatgatgcctgctgctctctgatgaaactatagtttttatggtgttacatcatctctatagaaactgcgttctttctccattattagcctgtttcctcatctgtaaagctaaaaatacttacctcacaggcttgctgtaaggattattttagtgaggtatgcaaagggctcagcacagagcttggcctgctagaagtacccaacaaaagagagctattatctttgtctttgtattgagttgcatgtttccaccttctgctgccacactcaaattctcctcactcccccctaaaaaacagttgagagataacacccctgcacaaggaaagggttaatctttgagtgttcttaactaaagagacccacagaggattaacagctccacttcagtgactaccctaaaatagcttttatcctcctgcccaagagttacttggggatctgaagaactcaattcaacacctgccggaggaaatagacccagaacgttccttgggatagaatcttcccttaagcagaacccaaaatagcaactgggaaattataaatagacttagaggaaagaaaaaacaaaacaaaacaaaacaaaaaacagatcctgatctcagaaccagaaacaaatcctaaaacacactggttggctggaaaacagtgagaagaggggaaatgggaatgctgtcgcccccttcccccccgcccactccagagtggtgggagaattaaattacagggaggctggagagtctcaatgacttgcaccattccaagaaacatcaaacaggattaacaggggttggatttactctcaggctgctaattcttctgtcagtgtagatgggccctctttggagtctctttgattcactatttcctcagattcctgctgcctcccactcctggggaggccttgaacaaatggctgcaactcatcacaaccccattttcatggggagaaaacgtgattcgacacccccgctcccaatctggtggcctcaccttaggagagaaaggttagaaacccaagaccagactctacacacagtcccatggctgacaggtggaaaaacacacaagccaggagacaggctaagcttgcaggtgaaagcaccgattcccccacacaggtgtccccatatcctccacctaacaggcccctttctccccaccaaggtgggccacagcctggtcccaggccaacttttagatcaccccactgtggtgtgggaaaggttcaattccccgagcctgggagagatgggagtggatgagggctggagaagcaaaggaaatccagggagaagtctggagggagtctctgggatgggaaggaagagcgaggatgggaaggaatcatgagcaactttcctgggtctctaagggatccccacaagaatgaaatgggggattataagggctggaaggctggggggatggggatagtcagaagtgtatcctctgaatttcaagagggtctcaaaatgggtaacgggatggaagatgtcgaaagcctgggagtatggccactgaggagggaactacaggtggggcttattcgacttctccagacccagatatttgagggaagcctcaaagggagttatgtaagtctggaaaatgaaacagggtacagagcgggctatctggagcaggaaagggggttatgtgggtctgggtaggcgtgtcggagggagggagcaggtgcagcttatctgcgtcccccagacccgggtccctggtaaggtcagcagcgccttatctgggtctccagggagcctaggggtcgggaatgggggaccctcaggactgcgtctccaggtctcggaagggaggggaccggtggcttcctcgggtcccccagacacaggtatggggtccagggagagttttcgtcaccccagggcctatctggggccgggttggcgcagaccgggccccgggtcgggggtgtgggcgaccgcgctgaggggcccgagatgaggcgcgccgccgctccgggtacagggcgcgcggacgcagcgagacggcctcccgcccctctccccgccgtcccctggggccctcgccggcactcaccgcgctcggggccccacgctgcgggccgggccgcgctcgggctccgccaggccccctcaggccccggtagtggcggcggtcgggccattgtgcggtgcattgtgggagccgcgcgagcgggcgctcgggtcgtggagggggcggtgccgcgggatctctatggtcccgcccgcccgcgggctagagcggccggggcggtgcgcgggcggcgcgcagggaccgctgggagcggggcgggcgctcgcgtccctccttccctccccgactgtgcgccgcggctggctcgggttcccgggccgacatgggcgccgccgcgtgggcacggccgctgagcgtgtctttcctgctgctgcttctgccgctcccggggatgcctgcgggctcctgggacccggccggttacctgctctactgcccctgcatgggtaaggcctcccaagccctctgctcagatggagaaactgaggccgggagaggaaaagccactcctcagatgcgcccagagacaccttcacaggtccaggagagaacctcagagcgggacggggcatgctcttctcctctctgccttagttgcaagggcacagaggggccaacgtgtccaactttccatttgacagatgagaaaactgaggctgggagaggttacgtgacttgcttgaggtctaagccagtccagggtccagtaaatggagttagtggggcaggacttgatgtcactgacccacgctggctcctggtgatttttcattgattcagcaaatatttatggggcacctattctgtgccgggccctgttctctgtactgggaataccgcagtgaataagataaactccgtgtccttgtagagccttcattttagttggggaagacaaacaattgagaataagtaggccaggcgcggtggctcacttctgtaatcccaccactttgagagaccgaggcaggatcacttgaagccaggagctcgagatcagcctaggcaacatagtgaaaatccaatctcaaaaaaaaaaaaaaaaaaaaaaagcagagcgtggtatcgtgtgcttgtagtcccttgggagttatctgggcggctacttgggaggctgaggtgggaggatctcttgagccgaggaattcgaggctgcagtgagctctgatcgtgccaccgcactgccagcctgggtgacagagtgagaccctgtctcgaaacaagcaaacccaaaaaggggtaaacataaaacaataaatacatagtttcatagaggatgatgaatactaagggaaaataaagagagc

SEQ ID NO: 8990 - DNA, 6000 bp, Homo sapiens
ttactgtctggccctttaagggaaacatttgccgactcctctccatctttcattaaacagggtgtggttctgttataggaacacacagcaagctattgaataagacatttaggtggttcccaactttttgctattatgaaaatgttacaataaacattcttacccttgtttccctgggctcctgggcacacacagtggaattcctggtgtgtaggaaagacatgggcatcttcagtttgggtcaattttgccaaattgctctccagtgtagctgaggtcagttacactcccagcagcagtggaaagagcccatctttccacgttcctctaaacttattacctatcaggtgtcctcagccttcagtagttaccagtctttcactgtgtgtagattctcttggatttcctggctgtgagtgacaggtttgctctttttttgtcttggtgctctggacccctgtacaatactgaattgtctttactagccatttgttcctggcttttaagagaatatttcatgttttaccacatagtatagtgttttacctttaagtacatgtttactatacgttgggtttttttttttttttttttttttttttttttttttttttagacaaactctcgctctgtcaccaggctggagtgcggtggcgcgatctcggttcactgcaacctccgcctcccaggttcaagtgattctcctgcctcagcctcccaagtagctgggactacaggcatgcaccaccacgcccagctaatttttgtatttttagtagagacggggtttcaccatgttggccaggatggtctcaatctcttaacctcatgatccgcctgccttggccgcccaaagtgctgggattacaggcatgagacaccgcgcccggcctgtttttgttttttgagatggggtctctcgctctgtcgccaggctggagtgtagtgacacaatcttggctcactacaacctccacctccctggttcaagcaattctcatgcctcagcctcccacgtagctggactacagacacgtgccaccatacccagctaatttttttgtattttgtaatttttgtattttgtattttttgtattttttttttttgtagagatggggtttcaccatattgcccaggctggtctacaactcctggactcaagtgatctgcctgccttggcctccccaagtgctgtgattacaggtgtgggccaccacacctggcctattttttgttgttgttgttttttgtttgttttcagcattttttgttgtttttctgagaaagggcctctgtcactcaaacgatccttcctgagtagttgggactataggtgtgtgccaccaaagccagcgaattttcttatttttttttttttttgagacagagtctcactcttgtcacgcaggctggagtgcagtggcatgatcttggctcactgaaacctctgcctcccggattcaagcaattcttgtgcctcagcctcccaagtagctgagattacagaatgcaccaccacacccagctaacttctgtatttttagtagagacagggttttgccatgttggccaggctggtctcgaactcctggcctcaagtgatctgcccacctcagcctcccaaagtgttgggattacaggcgtgagccactgtgcctggcctaattttctcatttttgtagagacggggtctcactatgtggcccaggctggtctcaaacttctgggctcaaatgattttccaacctgggcctcccaaagtgctaggattacactattactccttcttaaatttctttgaaactctgctcatggattttctgtatttattatctaagtaatacatctatgtaataaggctataaatctgattttttttttttttaaagaaatggatcttattttgtcaccgaggctggaatgcagagctgcaatcacagctcactgcagccttgaactcttgggctcaagcaattctccagtctgggccccccaaagtgctgggattacaggtatgaaccaccacacctggcctgccatggcccccctcccaagttttctttcttttttttttttttttgatggagtctcgctctgtcgcccaggctggagtgcagtggcgcgatctccatttactgcaagctccgcctcccaggttcgagccattctcctgcctcagcctcccgagtagctggaactacaggcgcccgccaccacgcccagctaattttttgtatttttagtagagacggggtttcaccatgttagccaggatggtctcgatctcctgacctcgtgatccgcctgccttggcctcccaaagtgctgggattacaggcgtgagccactgcgcccggccaccaagttttcttagcatatgtatcctcattttttgtttgaactaaataatttttatttatatatgacttcatatttagaataggtttaaatttccacacagctggagcttacgcggcttttgtctgtggccaaagaatatggttgaaactgatttgatatctgttgagatttgtcgtgcaccctagtagttgggtcatttttgtaaatgttccttgtgtgattgaaaataatgtgttggtctcacacaggtctgaaatttaaattttaaaagttaaaaaactaactgtcaggttttctattggggttcattgatcttgattagtaactgtattaacatcctctatgtccttttttttttggttgtttggtttattagttactcaaagaggtcttatgtctccctatgatggaggacctggcaatttctccttgtgttcttaatatattttcagcctcttttttttttttttcgagacagagtctcactctgttgcccaggctggagggcagtggcgcaatctcagctcactgcaacctccgcctagcaggttcaagcaattcttgtgcctcagccacctgagtagttgggatgacaggcgtgcaccaccacgcccagctagctaatctttgtatttttagtagagacagagttttgccatgttggccaggctggtcttgaattcccagcctctagtgatccacccacctcggcctcccaaagtgctgggattactggcatgagccactgcgcctggcctattttcagccttaaaaacaaaaaccctggaacatagaagttcagaactttcctctcttcacagagttcctcctcgcatcatttcatgttgatcctcttatccccagtgtcttctgcctgaaggcctattttgtctgagttttctataggtacatcttttggttagtttttctctagtacaccttttcccatcgttttactttttggtgcccttaggttttaaatttcctcttgtaaatagcatagagctgcatcttattttttcttggccaatctggtcatctgtgttttaagaggtgaatgtaaaccacattttctacctctggttttgtactatatatttaccatcccttttactttgcttcctttttctccctttctgccttccattatagttttaatacccatcactacccttttctctgcattggcagttatagttccgtttgtattcttttggtgatcctcttaaatatctgaaatacacacctgactttacaaagccagacaatgctcagtctctttaaccccctctcaaattgccctctcagtcttccatgttcttgtgtctcatgcatcttgtttctgtggcccacaaattaatcattattattcatattgcatattaaatgcttgtttagattcacatgtttaccaatttgctcaccatttttccatctaatttcttccttttgggttccatgtccttgttactaaactacattctttaaaaattatttcggcggccaggcgtggtggctcacacctgtaatcccagcactttgggaggccgaggcgagtggatcacgaggtcaggagatcgagaccatcctggccaacatggtgaaactccatctctactaaaaatacaataattagctgggggtggtggcaggcgcctgtaatcccagctactgaggaggctgactgaggcaggagaatcgcttgaacccgggaggcagaggttgcagtgagctgagatcgcaccactgcaccccagcctggcgacagaacgagacttcgtccccctcccccctcccccaaaaaaatgttgatcttcagtctgcgcattctgctctggattttaagcatcatttctggcagctctttttcaggaactgtctctgcaggtctttcagtgttcgcctctggagctctgctcgggcccgcgagttctcctggcgttgccatctgtgcccttttccttattccccatcacctgtctctctggtgagctgcttccgatcagcctccaggtccacgatttctcttctgttgtccttttctgccttctcacctcatcctctgagacctgaatttcgatggctctacttttcaattatattattctttttcaaacctgggcgttcatttctagcatcctgttctatcctgtgtctgactgtgcctcccgcaccttctcccttctctcgccctaagccccgtgaaggcgccgggcctttggctccggctgtttcccacggcgcccagaaccgcgtcagtcctgacacagactcggtgagggcgggaagtggtgccgtggggctgcagcctggcccgcccgctccatcggcctagggcggccccaccgccctccgggccttaccttgagttcgggctgcgggagaagctcccgcgctgcccatgacgtcacgggactgtgacgcgcccagaagccccgcccctcgcgtcccggtccgcggacccaggctctctgcgccgtgacgtcacgggtccgggcgggcgggttgtgcgtcggcccaatgggagcggcgcactggcctcccctttaaggaatgttgtgacctgacgtcaccgggcgagttacctcccgcagccgcagccgccgtgctcagcgcgagccccggagcccttgagcgcgaggcgcggagcccccggagcccccaaaccgcagacacatccccgcgccccagagccccggcctgcgcgcccagccgggcccgcgcgatgccctcagaccggcctttcaagcagcggcggagcttcggtgaggcccggcaggcgagctgcgagctctggggcaggggtgccggccgaccccgactgccgcaggtgacgtcagccccgtgacgtcaggctctggctggaccctcgggctgggaccagctccggcctgggcgggggctgcccgcttccccaccgcgataggtgccaggggctgtggggcctgatggccccgggggtgggggctggagctggggcgtggccgggggccgcccctccgggacaggcggggcggacctgggccggcccgacccggcctcacggtctggccgctgtccgcagccgaccgctgtaaggaggtacagcagatccgcgaccagcaccccagcaaaatcccggtgagtcccgcacccccagccctgccccgcccccgcctcgcgcgttcccgacacgaccccctgcccgcccgccctgctcccaggtgatcatcgagcgctacaagggtgagaagcagctgcccgtcctggacaagaccaagtttttggtcccggaccatgtcaacatgagcgagttggtcaagatcatccggtgcgtgggcagccgccgccaggaggtggctagggtcgggaggggagccgggttcccgccgagaaggggtgggagtggggtcaggggtgatgggaccgggcggtgggcccctgttctggggtggctggaaaggtcaaggtcggggctgcagtcggtgttgggtcagaggtgacagctggggtgagaatgggtgtgaaaggctgggaatcattctgggggtcagggctatgtccgtcccgcagccaagcccctcacagctgcatactctcccgccggctgcaggcgccgcctgcagctgaaccccacgcaggccttcttcctgctgg

SEQ ID NO: 8991 - DNA, 6000 bp, Homo sapiens
tgggattacaggcatgcccagtcccatactttctgagttcaaatcctcgctctgcacttccaagctgtgtgaccttgggcaagttacttaactatttttctgggctttgattttttttttttttttttgtacagaggagcagaggaggattcatcaggttgcccaggttggtccaaactcctgggctcaagggatccttctgcctgggcctcccaaaatgctgggattacaggcatgagccaccatgcccagtttttttggttgttgtttgttttgttttgttttgtttgagacagggtctctttctgtcacccaggctggggtgcagaggcacagacatagctcactgcagccttgaccttttgacatcctgggctcaagccatactcctgcctcagcctcccaagtagatgggaccacaggtgtgtactaccatgcctggctaatttaaaaaaaatttttttgtagagatggagtctcatatgttgccatgctggtcactaatttacaggcatgagccactacacccaggcagctttattttatttatttttttgtctgtagcatggaaacaatgagcatggtctgccccagagaaagtgattaaaggcctagcacatagtatgaatttaaagaatgttttataacatatatattaaacattcaagcatgttggaggtatgtgttaaaaaaatgtattgatggaaagtgatcaaaataatttttgagtcactgtgtgggagttaaattcacaaactttggcaccagagagagagagaaactttcaaattatagcttttgctgtgtgaccttaggtaagtcacttaacctctctgagcctcagtttcttagtaaaatggtgatgctagtgaaacccatttcacagggctagcataagaataaagtaagattatttaagtaaagagccgaacactgtttctggcctacaataagtgttacctataataatgctatcattgtctcactgttcaattttcagggctctagtatatgagaggggtgcttgggaaatagctgttgctgctgctatctgtccatgatggatcttaacctgattagaaaggcctccatgtggctgggcgtgggggctcgtgcctgtaatcccagcactttgggaggccaaggcagatggatcacttgaggtcaggaattcgagaccagcctggccaacatgatgaaaccctatctctactaaaaatgcaaaaattagccaggcatggtggcacctgcctgtaatcccagctacttgggaggctgaggcaggagaattgcttgaatccaggaggtggaggttgcagtgagcagagatcataccattgcactccagtctgggcaacagagcgagactccatctcaaaaaaaaaaaaaaaaaaagaaagaaagaaaaggaaagaaagcccttgatgtaatgagctctgtgtaagataatgtggatgaaagtggacccagaccctacccgcttagatggaaggctcacagcattcaattccaaattggttcaatcgtacactcttttgccctctcttatccatcccaaagtacccttcaagccttcaagggagaaaaaaggcaaagcaaaaatatgcacaacctcactaagaaccagaaaaatgcaaactaaaaccaaagagaaatgccattttacacccaaccatctgataatgccaagggctggcaaggatgtgaagcgagggaattctcatacactgctgggaacgtaaattggcacaacctttctgtaaaacagtttggcaatatctagtaaaactgaagatgcatatactttattactcagaaattccactgtcaagtttgcacctacaaaaactcccacatatgcacaaggactcgagtatgagaatgttcataccagcactgtttgtaatagcaaaaaactggaaaaaacttaagtgttcagcaacaagagaatggatacataaataatgatctattcccaaaattgatttttttttttgagacagggtcttgctctgttgcccaggctagagtgcagtggcatgatcatggctcactgcagtctcaacctcctgggctcaagcaatcctcctacctcagcctcctgagtagctgagaccacaggcacaacccatcacacccagctaattttattttttttgtagagatgggggtctcactatgttgcccaggctggtcttgaactcctgggctcaaatgatccacccacctcggcctcccaaagtgctgggataatacctccccagccggaatattttaaagcagtgaaaatgaatggtctacacatagccacatgaatgaatcttattaatacattaagtgaaaaaagcaaaaggtacagaggaatacatacattttaataccatttatataaagctcaaaatatgtgaaataccactatctattgtttagggatatatacataagtagtgtaagtatacagaaatataaggaaatgaaaaatatcaaatcttcattttcatctgaagtggttacttcaggggctgtggcagggagagagagatgcagctgaggaagagtccatagggggcttcaactatattagcaatattgtatttcttatgcttggtggtggggataggtatgtttgaaatgtaatcctttaagcatgaaataactcttcaaaaatgaaatatttcaggctgtgcacagtggctcaggcttgtaatcccagcatgttgggaggctgaagtgggcggatcacctgaggtcaggagtttgagaccaacctggccaacatggtgaaatcccatctctactaaaaatacaaaaattagccaggtgtggtggcaggtgactgtaatcccagctacttgggaggctgaggcaggagaatcgcttgaatctgggaggtggaggttgcagtgagccgagatcacgccactgcattacagcaagactccatctcaaaaaaaagaaaaaaaaaaagaaaaaagaaatgtttcataatttttaataaaaggcaagacaatataaattggtagttatttaagtcattctacttttcctgaggcccagtgcaggaaaacaaagttcctatccttgttccaactagaccattttgataagctgcaaaaagaaaagactttgatgctatttcttagccagtttgcaacagctgagaggtgagcatggaagctcttgcatatattcagttcagagaatgggtgcttagtttatgtccagagtttgtcccagatttcactatgacgtcagctctccggggagaagtatataaaataaaaagttaaaatccctctcagtcctttacccaatcctattccccagaggtaatctctattgacagtacccctccagatattttccctatgtatatacaaatacacagatacacactgaaagttaattttggccaggtgcagtggctcctgcctataccagaggattgcttgagtgcaggagttcaagaccagcctgggcaacatagcgagaccacatctctagtaaaaataaaaaaaaatagctaggcgtggtggcacagtggcacgtacctttagtctcagctactcgggtggttgaggtgggagaatcacttgagcccgggaggtcaagcctacaattagctgtgattgcttcactgcactatagcctgggcaacagagctagaccctgtctcaaaaaaataataataaattttatatatatatatgaggatgaaattacatatgtattatttgaacagaagtgaaatcttttctttttttttttcagacagaatcttgccgcatgacccaggctagaatgcagtggtgtgatctcggccctctgcaacctccacctcccaggttcaagcgattctcatgcctcggtctcccaagtagctgggattacaggcatgcaccaccatgcccagctaatttttgtatttttcgtagagacgttcgccatattggccaggctggtctcaaactcctggcctcaagtgatctgcccacctcggcctcccaaagtgccagcagcatgctcggaggagtgactttaaagcttttctacttgcttcctagagtaagggacgcattttacactgctatccaaaactcatcatagaaacatacacacacaaaaccaaagcacacatatacaactgagcaaatatttcatgacataacactttctcttactaagggtgacgcgctgaaattttgtattctgtcctatttcattttttaaaaatggtaaccatgacctgctaaattgatttcattgtccactaataaattatgacctcagtttcaaaaagattgctttaggtaaccaatcatcttctgagatttatacagattgctcataattctctcctattttttaaaaacatgctgcagtgaactgctttacactcattttatgactacttctgagaccaagatcccggattatgtaattgttatttacttaaaattctggtaaaatgtagccattatactggaaaactaaattttaatcttggatctgtcaccaccatgatatataaactttgggcaagtccctgcacctctctggacctcaatctccccatcagcaacctgctgatcctactcccaggagtgtgctctaagttgaaagtagatgccccaccccctgagtcagcgccggcaggacttctcaccaagcccttctcccccttttccgctccctgttcctggttcctaggaagcagcccaaggagaagggaaaaggcaggtctgggcaggagggagcaatgaagggcggggcagagggagggcaggagggaggccggccccctagtaggaaatgagacacagtagaaataacactttataagcctcttcctcctcccatctcctggcctccttccatcctcctctgcccagactccgcccctcccagacggtcctcacttctcttttccctagactgcagccagcggagcccgcagccggcccgagccaggaacccaggtccggagcctcaacttcaggatgttgacaacattgctgccgatactgctgctgtctggctgggccttttgtagccaagacgcctcagatggtgagtcgggggcacatctcctgcctcaggatggttctggagaatctcagtctatctgggcacatggcaagaccacaggagagcttatctcacagcatctgtgtctgcagctggctagatctctctacagggcaggcagagtcttggggactggttcgtgtcccaaagccaaggtgagttagtacatttaagcccctgaaaagggggagatgaaagaggctaggggaaacaggatgactggaaacatgagaaagaaaccagcagagagggtaggagaatcagccccagggagaggggagaaaggggaactgagggtgatggtagataggggtacatctaggggagacgggaagaggctcagaagagaagagaaatggagggaatgggaagaccctgggaaaactgatggaagaagtgggggaagagtggggcagagagaggttaggggaggctagggaaaatggaaggagactggtcgcagctggtggaactggggagaaagagatgctgtgcctaatagaacttatgggcgatcaggctactgaagtggccctgtttaagcagaaaagggagttattaccctccattataattgcacaggggcctcctttcccctctctcacaatccccgtaacttcagtctccccctcagagaggcagcaaataataaccagtattcaatgagtgctcactatggttaatacatgtattgacccatttaacttgcacaaacccctaaaggtgggtaatattattactatctccattttatgaggaggaaactgggtcacagagtagttaaggaccatgtctagggttatccataaatatacttattcacatctgcagatacaaagcacaacttctcaaatgcaaacacagacaggacccactcacacacacagatttacaaccccggactcatccaaa

SEQ ID NO: 8992 - DNA, 6000 bp, Homo sapiens
tattttattaagggatatattaatatccataattaggactgtaactttctttctttctttttttttttttgattcggagtctcgctctgttgcccaggctggagtgcaatggcacaatcttcggctcactgcaacctctgcctcccgggttcgagcaattctcctgcctcagcctcctgagtagctgggattacaggcgcccaccaccatgcccagctaatttttgtatttttagtagagacggggtttcaccatattggccaggctggtcttctggcctggctggtctcaaacttctgacctggtgatccaccctcctcggcctcccaaagtgctgggattacaggcgtgagctaccgtgcccagccaggactgtaacattcttgaaggcaagaactgttctaattcaactctctcttcccaggactcaacacagggcagggacacagtgtgtgtgtgtgtatatttgagtgttgcttgcatacatggatattacattttaaaatctgaatttagtgcaatttttaatttttattttttaataatttttattttattttatttattttatttaattttcagacaaagtttcactcttgtcctccaggctggagtgcaatggcatgatcttggctcactgcaacctccacctcctgggttcaagcgattctcctgtcttagcctcccaagtagctaggattacaggcatgcgccaccacgcccggctaattttttgtatttttagtagagatggggtttcaccatgttggccaggctggtcttgaactcttgacctcaggtaatctggcctcctcggcctcccctagtgttgggattacaggcgtgagccaccacccctggccttttttttaaagtatttttgatacagggtctcactctgtcacccaggctggaatgcagtggcatggtctcgggtcactgcaacctctgccccccacccctgggttcaagcgattctcccacctcagcctcccgaatagctgggattagaggcacccgccaccacacccagctaagtttttgtattttttggtagagatgggattttgctatgttggccaggttggtctgaaactcctgacctcaagtgatccacctgccttggcctcccaaagtgctgagattacaggcatgggccaccgcgcctgggcttagtgcaatatttgaggcactcagattttttttttcctgtgctgctggttttggtcctatgtgggcaataaaacaaggaacctttcaggaaagtacttctcacactttaatgtgcatgctaattatctggagagtcttgttagaatgcagattctgattctgcaggtttggggtggggactgggattctgcatttctaacaggttcccagataaggccaatgtttctggttcaaggatcccacttagggtagcagagctttagacttaattccatcagcagattccttattacctatttctgatagaattcttggtgctctcaggaatctgaagcccagataatagagggagatcccaggtgtcctctgccaccctgttagctgagggagacccaaaaactttggcttccgtgaaaagtcctcctccagttgtccccaaagttgtagcatgagtccttccaaatcttttctcatgattatacaaatacatattcccccatataagattaagatttttatatatagatagattttttttttatttaggtttttttttttgttttttttttgagacggagtgtggctctgtcacccaggctggagtgcagtggggcaatctcggctcactgcaagctccacctcccaggttcacgccattctcctgcctcagcctcccgagtagctgggactacaggcgcccgctactacgcccggctaattttttgtatttttagtagagacagggtttcaccatgttagccaggatggtcttgatctcctgacctcgtgatccgcccgcctcggcctcccaaagtgctgggattacaggcgtgagccacagcgcccggcctatgttttacatatataacaatttatatataactacatatataatatatataacagtttatatatatatataacagtttatatatataatatatataacagtttatatatatatataacagtttatatatataatatatataagtttatatattatatataacagtttatatataacagtttatatataatatatataagtttatatataacagtttatatatataatatatataagtttatatataatatatataagtttatatatatgtttatatataatatatataacagtttatatatataatatatataacagtttatatatataatatatataacagtttatatatataatatatataacagtttatatatataatatatataagtttatatatataatatatataacagtttatatatattatatatatatatatgcacacacacaaagagagagagagagactcgctctgtcgcccaggctgtagtgcagtggtgtaatcacagctcactatgaggcaggagaacagggaatcagggtaaccgggggttaagacataagcaaatgaaggggtgcagccagttctaggcagcatacaggccacatcttcaatcctatgataacgagacagaagtttccacttccgcctccgattgaccgtggggccaaatctccacttcagcctctgattggctgtgggccaagtctccacttcagcctctgatttggtcgcaggccaatccttcataggtgtagccaactggaggcttctaaagggcacctaggggtgttgccaggtccctttagcttaatacaaaccctgattgaggaggctcttgagcagcttgctctaaccagctgccgctatgaatcgtcttcaataaatctatgcttttgttattccgttcttctgttgctgtttgtctttcgttgcccttctgttactttatgtgttttgttcaacacgccaagaacctggacaactctatgctggtaacaactgcaggtaacctggtaacaactgcagtttcaaactctcctgggctcaaccccagcctcccaggtagctgagactatagacgcatgccaccacacctggctaatttttttatttttatttttatttttggagacagaatctcactctgtcgcccaggctggaatgcaatggcatgatctcggctcactgcaacctccgcctcccaggttcaagcgattctcctgcctcggactcacaagtagctgggtttacaggagcacactaccacgcctggctaatttttgtatttttagtagagatggggtttcaccatgttgaccaggctggtctcaaactcctgaactcaagtgatgcttcctggctcggcctcctgaagtgctagggttacagatgtagtttttaaagtttttgtagagtggggtcttgctgtgttgcccaggctggtcttagactcctggcctcatgtgatcctcctcggtctcccaaagtgctgtgattacaggtgtgagccattgtgcccagcccaatttttaattaaaaaatggaatgatggaatgcacattactttgcatcttttcccccttaaaaatacattcttagtatacctaaaggagtaaatctacctcattcttttgaaaagtggcctaatattccatagaatgggtgtatcgtgatttattcaatttatttaatgtatcagtgggcattctggctggttccagatttttgccattgaacaatctcatgcatacatctttatgatgtggtgcacttaaaatctttaagagacagattcaatatcttaaggtgtaacaaccacccagatcatggtacttttatccttatattaaaatttttttctgttaaccttggatagctgcttacatattttttcttttttaaaatttttctattaaccttgacatggtgcttttacttcctaaagtggaattcctgtatgaaagcctatgagcttttatatcttactcattgcagctgcattactgtgggagctgtccctctagagacactgggctgcaatgggaagtgtcagggagagcttaagctccatatcacttgagtctaaacctggagggatagagcgtgtccgtgaggatcccagggcctggagagcaatttagggtaatattcagaaagcagcgctcaggagaagcactgggacgctgtttaggtaaaatcaacccaaaagaccctgattcccagagtactttgaggtccagaagaactgggctggaagcaggtcctgctattaattggctgtgatcttgggcaagttatttaacttctccaggtcacagtttgctctttggaaaacggagataagtcacacctgctttcagggcggacacccttactttacatcagaatcatccgatgccattcctagcgtttcggcttcagtaggtgggaatcaattatttgcatttctaataggtaatcagttgataatgatgcggccggtccggtacactcgaaaaaccactgttccaggatattccaagatgttccaagagtcttaaacacctggtgcagttccgagcacaaggcacacgaacggtgctattagcgtttctaaccccgcagagaactcctcgcaccccagtcctcaaaatcccgccccggacagcggaggcccgggcagtagcttccagacccaattgcccgcgcaagggggcgtggcagcatcgttgggcggggccgcctgtaagagaacgcggctaaaggtggggccaagcgtgcggtttgctgcgcctgcgtgaggaaaaagaggggggcgtggctccaggccggaagagggagtctgtaggggcgggccggctggcgtcccctttccggccggtccccatggaggcgctggggaagctgaagcagttcgatgcctaccccaagactttggaggacttccgggtcaagacctgcgggggcgccaccggtaggccgcagcggggccggggtcgcgtggaggggggcgtcctagagcttagcccgggctcctggactctgactggcctgccggtgtctgagggagcggattcgaggccattctgaccctcgccccttgtcctgcagtgaccattgtcagtggccttctcatgctgctactgttcctgtccgagctgcagtattacctcaccacggaggtaaggggcggggcttagtgcgtgggcggggcttggcattctaggagtaggacctttaggggtgggagtggggaaggagaggtttggggctaagtcttactgaggtagcgctgccccaggtgcatcctgagctctacgtggacaagtcgcggggagataaactgaagatcaacatcgatgtactttttccgcacatgccttgtgcctgtgagtacctcaccatgggtgggactggagagacccagggttctcatgtgggctgccagattcacacctccacccttaggttctggactggaccccaggacaacctccttctcctcatcccgttctgccccaagacaggcccagtatccccttcccctccaaaacccacatccccttgtccctagggtcccagtaccttagcctgattttcctgcttccagatctgagtattgatgccatggatgtggccggagaacagcagctggatgtggaacacaacctgttcaagcaacgactagataaagatggcatccccgtgagctcagaggctgagcggcatggtaaccaggggagggggccgggtctcagatcccaaagctggatgtacccaagcctatctgctagcaagtgaactgtggcaggcatagtgatacattaaacaactaagagctagagaagtcaagtgacttgcctagggtcccccagctagtaagagtcagagtgagctaaaatcctctatacatatcgagtcaggtaatctacctggctattattctcagaggtcctcaatacctgcagatggtagtttgaataccagaggt

SEQ ID NO: 8993 - DNA, 6000 bp, Homo sapiens
aaataaaataaaagcagaatattaaaccatataggacaaaattataactatgtaaaaatggtctgttcatgaggacaaagaacataaatgagaaacatttataattgatttatactctattttatcctaaaaagtatttacatcagtaagtaaaaatggttgtggggcactttgggaggccgaggagggcggatcacgaggtcaggagatcgagaccattctggctaacacagtgaaaccctgtctctactaaaaatacaaaaaattagccgggtgtggtggagggcgcctgtagtcccagctactcaggaggctgaggcaggagaatggcgtgaacccaggaggcggagcttgcagtgagtcaagatcgtgccactgcactccagcctggatgacagagtgagactcagtctaaaaaaaaaaaaagaaaaaatggttgtgggatggtgatgatagttcaaaatgttacagttgtttataaaaatttcatttaaatgacatttcaccacccacccaccttattttatctcagttacccatgatgtagatttctttaacaatttatagattattttactctaccaatcatggagattaaaagaaacatcatcacaggtactcttagcgatccttgacctgttggtttggaatctgtggagacttccaaagaaaatattttcgaagttttgaaaatgctctccatttcagaaaccatctccacctttggaggaaccttcaccccgactctctggtctctgcagtcccaaggaaggatgccttcctgttaacatgatcaggcagagtgctgatgaccctgaagcccgtcctaggcctcctatattcaggccaaggtcaaagaaaccaacactggcagcacagttcaaagacaaagatgagagcaagtggagccagagttcaaagtacagcaagccacaatttctcagagccttggcatttactcacataatcctggcaaccaggcccagtgaaatctgactatgttctatgaaacaccaacgtgactactaaaagtaccttttccttgcattagcaccaaagatcttctatgtacccaggacaaaatgactgatcccagaatgggtgaccatgtgaatgcctgcagagggcaccacaaagacaagcacttcaaaatggagatatctaaagaaacaggaggaacttgttgcaaatagatctgatcagaaagaaaaaggaaggctgagaggaggacagccctgaaatcacatatataacttgttgttactagataaaaagaatggagaaaggccgggtacggtggctcacacctgtaatcccagcactttgggaggtcgagatgggaggatcatcaggtcaagagattgagatcatcctggccaatatggtgaaaccccatctctactaaaaatataaaaattagttgggcatggtggcgggcacctgtactcccagctactctggaggctgaggcaggagaatcacttgaacctgggaggtggagtttgcagtgagctgagattgcgccactgcactccagcctggcgacagagtgagactatgtatcaaaaaaaaaaagaagaatggagaaaaggttcaatcaccattatccactctctgaagtaactgccagacaaaaaaaaaacaagtggttaatggcctgagggccacctcctttgctatccaactgcctcactcaactcagaccaacagcagcaaagacttaagaaagagtagactgcaaagggttaaaggaagcaacaaatcagaaagactgcaagccttctcttcacaatggggtggggatggatggctgcgaaatacatatacgagtccaaatgatggagggacactatctcctaggtcaggaaagcccacatacaccctctggttcccttctcttaccttaattgctatgttgttggattcagtagcaccactagtaaaaatgatctcacgaggatcagctccaatcagagatgctacttgctgcaagccaagaaacagagatatataacatcagttccccaggcagaaatagagctgcagacacaggtgggacagccctggagcaagaagagctccactgcattccaccaaattgccctggatgaaggtctgcacctacaagaatcagattctagttatatcccagatcccaggctcttttccagcccaatgcaaaataataactttttttttttaatgaactattggccaggtgtggtgggtcactcctgtaaccccagcactttgggaggccgaggtggaaagatcacctgaggtcaggagttcgagaccaacctggccaacatggtgaaactccatttctactaagaatacaaaaatattaggccgggcatggtggctcaagcctgtaatcccagcactttgggaggctgaggcaggtggatcacctgaggtcgggaattcaagaccagcctgaccaacatggagaaaccccgtctctactaaaaatacaaatttacccgggtgtggtggcgcatgcctgtaatcccagctacttgggaggctgaggtaggagaactgcttgaacccgggaggcagaggttgcagtgagccgagatcgtgccactgcactgcagcctgggtaacaagagcaaaactctgtctcaaataatagtaaataaataaataaataaaaatacaaaaatattagctaggcatggtggcgtgtgcctgtaatcccaattacttgggaggctgaggcagcagaatcacttgaacccgggaggcagaggttgcagtgagccaagatcgtgcgccactgcactccagtctgggcaacaaatgtgaaaactccatctcataaaaaaaaaaaaaaagaactattgagctcttactatttatagtacttcttacttacagatgttgtggtaataaacactttatcagcattgtcttatttaatccacccagtaaccctacagagtagaaactaccacaatctctgttttaaatgaggaaaataaggctcaaagaaattagataacttgcccaagtcatttagccaggaaatatgggaaccaatcaaatgcctgcagtcaaactccaaggctgctctttgaatctcttccagaaagaatccaaaaccatttctacctccatgcacacctaccaagaaagaaatgcctcccacaggccactgcccctctttgaccttagaacctcctagactcctgtgtactaacctgacgagcacgttccatggctgcctcactctcccagccataagcatgtgtccgggagtgtgggttcccatagtagttgattaggtaagggagcatggcatcaagcacccgggggtcctgaacacaacagaacagatcattttccttgagcgcatcgtcaattcaggtcccactccacccctcagacctggccaccctgccttaagacactctcaacccctcaggcactgcctagaggaggcctcaaacattcttttgttcccacaaaactacccaccaaatatcaacctaatacactcccactcacaacccatcccaactcggattgttctgcctcccctcaggtagtctacaaacactgccttgttccgacatctgtttctgctggtgtttccattcctgccaggtaatgtgatctataaggggctgggacaggacagggcctaggcaaacacccctggtcacacattggtgaaaacttgcattagtcttttaacccgtttaatacttgtccaagttcacacagttactaagtggccgttctgctcattccagagcccatgcttttaactaatactatagagcctgcgctgaagtgatctgaccaaggtcaattgctagtgagtagtaaagccaatgccagtggcctcgaatttaagcctcccgactcctcgctcagtgctttttccagcacaccttcacggctctcacttctccagggattcagccatttctttgcgtgatcacgcccatcatttacttcctataagcagccttgggaaaagcttcatccttaccagaggagttgtagcttgcacatccatatagagaggtcgcagcactggccccacctccggggcagcggctgtatctgcgggaaccgcagactgaggagcacggtctccaactgataaaaaatggaacggagtagccaagtaagaccgaaggcaactatgaacgcatggcatccaaagggcagaaggaaaaatctggctggaggtgagataagtgtaagggatgctagggtcgaatctcaatggaaagaaaacaacaccagatacctgacacgctgtaaaaggaggtaagggagagggagagagggttcctggagggggtgttgagttgatattcaaatggtatcgtaggaaggaaggctctaaagggcaaagacgtttagaaggaacgtggagccagagtaggtgcagtcccttctgaccgaaggtaacggtctgcacgggagcccggagcagcatctgtaacttggccaggagcggtctgaaggacgcgcctccacggctctgggggcctgtcgcgcagggtgcgaggggtggtgcgccggggtcaaccgttcggggacccgcctaagaaagtttgagggatgtgtcatttgagagaagggtcagagggtctgggcagcagggtggacaggaaggctccggaatattcagttgcgtcgccgcgcggaggggacaggtccgcgcctcccggagagcgggacccgagcgtaccgcgcaggcgcagcccccgagtgggcgccgcgggcttcggccctggagccgctgtcaccgccactgccgcccgcctccaagcggctcggagcagcatggtcccgctggcagagcccaccttccgaagccgctgcagtcctgggccccaggctcccggaagtgctgcccggcgctccggaagcgattcatcgggccgcgagcgccctccccgtcgttttccgtgagagacgtagagctgagcgacccagcccgcgagcgaggtgaggtaggcgccgggcgacgcggggccggaacgcgaagagggtggtggagtcgggctacccactgattttccttcccttacttcccctgagcccttgggcccacttcccagcctaccgcttccgtccccgcccgactcttgggccagcgcctgggcccacactttcctatcccccgcagatgccggtggccgtgggtccctacggacagtcccagccaagctgcttcgaccgtgtcaaaatgggcttcgtgatgggttgcgccgtgggcatggcggccggggcgctcttcggcaccttttcctgtctcaggtgaggggcgcgggcggtgatctctgggcaggacaaccagaccttccggccctgccccattcggcctggagcctgaacacagcctccttctttcgacttccctctctgtcccctcgcgagccagactcattccaaaccaccttcaatctgtaaagtcaggttggaagcgtcagtgcttaagaatttgagctttagagtcaaaatgctttctggcccttttcttactggttcggtgactttaggcaagttggagactgggtttccttaagtgtagaatgaagacagtagcatctaacttatagagttgtaaaaattcgatcagcacactttgcacagcatctggcacatattaagtgctcagtaactagttactactgttgcttttatttttttttccaattgcgcataaggaaagaaactcgttcagcggttttactattctggatacaggatacagagataaagcagttaaactttacactctaaaggtcattttcacatttagaggctgttattgccatatccctagattgtaaattatcatttacagagcacttactctatgttaagcactgtgctaaatactgtagttttcaaaatcctgtaaataatgttgagatgcccattttacacttgacactatgtgtaaattgtagagctgactcttgaacccccaccttactccaaaatcattaacaccaagaaactaaa

SEQ ID NO: 8994 - DNA, 6000 bp, Homo sapiens
aaggaagagagatgaaggtgtttaaatagaaccttggaggccctacggcatggtggttaagcacctgagccttgcaatcaggcatctttcactgatagatgtttattgatcaagtgctctgggccaggctgtgttgtaggtaccatcagtgagcaaaatggaaatccttgccttcatggagattgtattctactgggaaggggaagggcagacaaaacaataaacataaataagtgtgtggtttgttggtagttggcacagcataaggggtcctgggagtggtggcagagtgcagggaggggtgccgaggtataaacagggtggctagggtacagctcattgagagggagattttgagtgaagacttttttttttttaagacggagtctcactctgttacccaggctggcgtgcagtagcgagatcttggctcactgcaacctccgcttcccgggttcatgtcattctcctgcctcagcctcctgagtagctgggactacaggcgctcgccaccacgcccggctaatttttttttttttttttttttgagacaaagtctcactcttgtcccccaggctggagtgcaatggctgcaatgtccgcctccctggttctggttcaagcgattctcctgcttcagcctcctgagtagctgggattataggcacctgccaccacacctggctaatttttgtatttttagtagagacggggtttcactatgttggccaggctggtcttgaactcctgacctcaggtaatccgcctgccttggcctcccaaaatgctgggattacaggcatgagccaccacgcccggccaattttctgtatttttagtagagatggggtttcaccgtggtagccaggatggtcctgatctcctgacctcatgatccgcacaccttggcctcccaaagtgctgagattacaggcacacccagctaatttttgtatttttagtaaaggggatttcaccatgttggccaggctggtctcgaactcctgacctcaagctatccaccccacctcccaaagtgctgggattacaggcatgagccaccacacccggattgagtgaagacttgaaggaagtgtgggaataagcagtgctgggaagcgctccaggcggggggtgagtggtacaaaggccctgaggcaggaggtgcctgacaggctggtggggggcagagcactgaggagagagccatggtaagaggtgaggttcgaggacagggaggggagggttgggtctggccaccgactgtggaaacaactttgtcttttggctctgagtacaagggggaaccactggggcactggagcacaagagtgacatgacctggtgtgtgtcttaaaagaaacactcagaccgggtgcggtggctcacgcctgtaatcccagcactttggtaggccgaggcaggcagatcacctgaggtcgggagtttgagaccagcctggccaacgtggtgaaaccccatatcttttttttttttttttttttttttgagatgaagtcttgcttctgttgcccaggcttggagtgccatggcgaggggtttcaccatgttggtcaggctggtcttgaactcctgacctcaggtgatccacccgcctcagcctcccaaagtgctgggattacaggcatgaaccaccgtgcctggcaaaacccctctctactaaaaatacaaagccaggtgtgatggcacagatctgtaatcccagctactcgggaggctgaggcatgagaatcgcttgagcctgggaggcagaggttgcagtgagccgagattgcgccactgcactccagcctggcaacagaatgagactccgtctcaaaataaaaaaaagaaaagaaaaagaaaaaaagactactcagggggctgcatggagccacgtttgaggggcgagaagtgggtgatatgggaataccagggtgatgatggtggcttaggcagggtggcagtgagggaggtggtgacaactcactggatcctggaagggctctgaaagtggagtcaacaggattctttggtggattggatgtgggtgagagtgaaggagaacagctaaggggtgatgagaaggaatggttacacagccaggtcgcgtggggacagccctcactcctctaactgccagttctggcacctgagacaggacagtgactatctgggaagttgggagaggagcatcttcaccccccggatggggagccttggggtccaggctggggattagggagggggagcatgtgagtcctgtctgtgccccatctcaggctgtggtccagccaactctgccttgtagggattccagccagactggggagctcttaggggaaggacccagtactggagtacagtagatgttccataaatatcttctgggaccctaaagcatcaccatcagaagggactgttaaaatctcctagcccaagggtctcaaatttggtaaaatacaaacactgtttgacactgcctgagttctgtcccaggaatctgcttttcttttttgttatttttttattttggagacagtgtctcactctgtcacccaaattggagtgccgtggcaggatcacagctcactacagctttgacctcctgggcccaagcaatcctcccatctcagcttcctgagtagctgaggagccacaggcacatgccaccacacccagctaattttttaatttttgtggaggcagggtctccctatgttgcccaggctggtctttttttaattaattaattaattttttttgaaacggagtttcgctcttgttgcccaggctggagtgcaatggcgcaatcttggctcaccgcaacctccgcttcccaggttcaagcgattcacctgcctcagcctctcaagtagctgagattacagacatgtgcctccatgcccggctaattttgtatttttagtagagacgggatttctccatattggtcaggctggtcttgaactcctgacctcaggtgatcctcccgccttggcctcccaaagtgctgggattacaggcgtgagccaccacactcggcccagaatctgcttttcagttggtgcccccagtgatctctcttcagggtgtcaatcacggtccacagtttgaaaaatcttgccttggtccagtttctctccaggaaacagatagggctggtgagtcccagagagggaaagggacttgttcaaggtcacacagggagtgtgttattaaatttgggagggtggaagtggaataatgatatttcatcttatgctgtgtgtgctgccttgggttgtcagggcccataacaaatgtaccttgtttttttcctaagtaaatcaaccttggctcacgcctgtaatctcaacactttgggaggccgaggtgggaggatcgcttgagcccaggagttcaagaccagcctgagcaacagagaccttgtcgctacaaaaaataaaaataaccaacttaaagtgaatagtacaggcgtagcataagtgactgagataggatgaccttcaaagtgcttagcacagtgcctggattcaaaacggttggctaaccctcaattccgtttattatttttacaccttaatgcaaaaaccatgacagtggtattggaaacactatcatcttcgccagtgctcaaaatattttgatatgtcaaaaattcttttctccattttttggaaaacagatgcgagaaaggaaaggacttgcctaggtcacccagcaaggcaggtcatgaacaagagttgggtctgcgtctggcagacctaccacaggtgcggcctggagagatgaggcccacaaggcagcgacaggacctggattcagtgaggagaggggactcgcggggtagaagccaggaactgggaaggcgaggaggcgtgaaggcaccacctactgccaacccggctcgagctggtcactttgccctccatgagatcgtaggtgtgcttgttgttttattttacgggggaggaatggaaggctcagggaagttgaatgcggatgttgttcaagatcacacaggcctccagaggcggagccgggattggaacccaatctctaggactctgggttagcaaagcaaagggaggatgcagtggcgaggacagctagatacacctagggcgcagagcagccaggaccagagggccaatctgactatgcaggggtgagagggccacctcgggcagcttcctcggagcctcggttccccccttacagcgaggtgtcgctggggtgaactggtgggaactcccgcctcggtccacctcccgcacagagcatgcgtcgcgttccagctggaaccggtttggcgaggcggttcgaggggcggcgaccccacccccacccccccatgctcgggcatgcgcgtgccgacgtgggcgcgcgctcctttcctgggccggccggctgggcgtgggccggacgcggcggcccgcgcgcctgccgaccagcccggctgcgcgcgccgggccacatgccaagcgggctgcgcgcgcccctgcccggcccgggagtccctgacgacgcgcgcgcggctgacgcggggggcggggaggggcggggcaggtgcgggactttaacccggagccccgcccctcgggcgtacaaaaccggagcctcgggccgggctgcgtgagggaggagggtgagtgcccgccgctggccgccgccgccgccgccagtccgtccgtctgtccggtccacgtcgtcgctgccgcctcctcagcccggacgcccggggcccgcccagcgccgcccggagcagccgcggccccgcgaggagacgggggccgccccgcccggcccggcccggccctgccccgcccccgccctcgccctcctcctcctcctcctcctccccgtctgtccgtccgtccgtccgtccgcccgcccgcccgcccgcccgcgcttccgtcctgtccagccgccagtcctccagcccgtgtccccgctccgcccgctttgtctctccccggctcgctgtctctttgtctctgccctcgcgctcctccgcagcccctccctcgctccccatctcgggtccccttctcagagcgctcttcagccctcagagccgccctttctgggcgaccccactcttcgggactccccctcagagcgcccccagatcttttggggttccccttgagaacaccttccactctccccaagggctccccgtgagtttcttgcacatcctttgggggttctgcaccccaagtcgctggggtctcgcctcctctgaacccccattgcccctgggctttccctcttctgggtgttccccatatccactgggagctcctaggtcccaagttggggtctttctccttgggaccccccaatatgtcctcagctccctgacttcaggagctcctctctgctttcccctggtttgtcccctgtcgctgtctctccttgttctctctcaggtctccgagcacccccacttctcgggatcggggtcccctgctttgctctccctgcccctctgtgcccccacatctgtctcggtggtctcgccactctgtgcctcttgcgctgaaggcccccctttgagcctgcttctttgcctggggcccttggcccccccttgctttttcagccctagccccctgtctccccttctctctgctccttgtctccctctccctttttctgtctttgccgggtctctgggtctctgacccccatccggccctcatggctttgtgtctggagctcttgaagcaatgtgagtggtggggtgtccgggtcgggccggagttggcccgcaggctggccgcggccgaggctccatggggttggcgctggggcaagggctggcgctagggcaagggggctctgaggcctcccacaaagggggaaaggagggaggggccaggctgtctggcggaggagggagtggggggccttcctgctctgaggcttctgctttagttgcttgagtgtgtggagggcaccacgggctgggcatccctgcccacttggccc

SEQ ID NO: 8995 - DNA, 6000 bp, Homo sapiens
taaactccattagagagaaccctcgtctacatggtcacatttgtatccccaatacctacctagcatgttgtcagtctcattaggagtgaatggataggtaagaaatactatgctgctgttaaaaacaatgctgggtgcaggtggctcacgcctgtaatctcagcactttgggaggctgaggcgggcagatcacctgagatcaggagttcaagaccagcctggccaacatggcaaaacctggtctctactaaaaatacaaaaaatagccgggcatggtggcacatgcctgtaatcccagctactcgggacactaaggcaggagaatcacttcaactgggaggtggaggttgtagtgagccgagattgtgccactgcactccagcctgggtgacatagcaagactccatctcaaaaaacaaacaaacccatcaaaaaaaccagattgaggtagaacacctcaccaaactccctctatcttccttaccctttcctactttttctttttaccatagcacgtaacaccttccaatatatctttcacttgtttatgatgttcattgtcatttatttcctcctgctaaaatgtaagcttcatgagggcaagaatctttggctgctttgttcatgaatgtatcccaggagtctagaacagtgacatacagaagtgctcaacaattattggcagagtaaatgattgagcaggtctctatttactgaatgtttagcatagattcatgaaagaaaaagcaagctgtcaaacaatggatatgacatttttcattaaaacaaaactattttcacaaaagtataagtatatgtgtatacacacagaaacacacacacacaaatgttggcatacatgaaaaaaaacttatggaggctgggtatggtggctcactctgtaatctcagcattttgggaggttgaagtgggaggactgcttgagctcaggacttcgagactagcctgggcaacacggtgagacctcatctctacaaaaaagtaaaaaattggccaggagcggtggctcatacctgtaatcccagcactttgggaggctgaggagggcggatcatgagttcaggagattgagaccatcctggctaacagggtgaaaccccatctctactaaaaaaaaaaaaaacaaaaaaattagccgggcacggtggcgggcgcctgtagtcccagctactcgggaggctgaggcaggagaatggcgtgaacccgggaggtggagcttgcagtaagccgaggttgcaccactgtactccagcccaggcgacagagcgagactccatctcaaaaaaaagaaaaaaaaagtaaaaaattagctaggtgtggtggcatgtgcctgtagtcctagctactcaggaggctgaggcaagatgatcccttaagcccaggagtttaagactgcagagtttaagctatgatggcaccactgcactccagcttgactgacagagagaacttgtctctagaagaaacaaaaacacaacttacggaattcattttttaaaattatttattatttttaatttttattttttttgacacagagtctcactttgtcgctcaggctgaagtgcagtggtgcaatctcagctcactgcaacctctctgcctcctgggttcacgtgattctcatgcctcagccttctgagtagctgggattacaggtgcctgccaccacgcccggctaatttttatatttttagtagagacagggtttcgtcatgttggccaggctggtctcaaactcctgacctcaggtgatctgcccactttggcctcccgaagtgtggggatcacaggcatgagccacggcgcccagccaataaaacaattttggaaggacaccccaaaccaataaagtttgaactctgtcctgtatgcatatatttctttaataaaaaatgagttcattaaaaacaaagaaaccctctaggagcagaatggttgggttgtgtggtagattgtgtaactgacttcttaagatgctgcctggccacgtgttgtgtctcacgcctgtattcccattgcctttgggaggctaaggcgaaaggattgcctgataccaagagtttgagacaagcctgggtaacatagcaaaatccgatctctacaaaaaattagctgggggtggtggcatgtgcctgtagtcccagttactcaggaagccaaggcaagagggtcctagagtccaggaggtgaaggcggcagtgagctatgattccatcactgtattccagcctgagcgacagatggagaccttgcctcgtaaaaaacaaccaccgccagtggctcacgcctgtaatcccagcactttgggaggctgaggtgagtggatcacttgaggtcaggagtttgagaccagcctggccaacatggtgaaaccccgtctctactaaaaatacaaaaaaattcagccaggcagtgtggcgcgcgcctgtaatcccagctactcgggaggctgagacacgagaatcgcttgaacccaggagatggaagttgcagtgaactgagattgtgccattgcactccagcctgggtgacagagggagactttgtctcaaaacaaacaaacaaacaacgaagaagctgtcaatctgtttccaaaatggtcgtaccactttacatttccatcagcaggatatgagagatcctgttgctccacatccttgccaacatttgctattgttggtctttttctttttcattagtcaggtgtggtggctcccatctgtggtccacagctagtcactaggaccacagatgcgagccaccacacctggctaatcaaaattttttttttgtagaggcaggtcttgctgtgttgcccaggtgggtctcgaattcctggactcaagtgatcctcctacctcagcctcccaaaagctctgggattacagactgagccaccattcctggctgcatatgctaagtctgtggtgtaaatactcccatcatggccaaaatcaagctaccaatactaccttgggaagagatgttcaatggcatactgtcatatatttccaccacacagttacaacagatataagcaaccacaaaagcacacaaaacgtaaaatgtagtgaaataattagaaaataatgagttttgttttcaatatactttatttcatcctaaattgatataattttctaaatggctgtatttaaccaatttgcaaaattactgcaaatttaacaatggactctcaagatagtatgagacagctccagcacaccactggttggttgtcttattcttgagctgggagaattctttatatattctacatcagcactgcccaatggaactttctgcaataatgaagatgtcctataattttgagtggtccaatctgatatccactagttatctgtggctactgagcacttgaaatgtggctagtacaaatgagagactgaattttaaattttacttaattttaatccatttaaattcaaatttaaatatccacataaggctagtggctatcataacagacacagaaagaactgactctctcccatgcgggataacatttgggacaataataacgttaataagagttatattgtgcatactttatatgttcataaaactgtagttaaaagcacagattctggagtcagctgcctaggttcaaatctgtttccttctctttaaaatgggattagcctgtaatctcagcactttgggaggctaaggccgaaggatcctttgagcccgagttccagaccagcctgggcaacaaagcgagacgcggtatctaccaaaaataattttaaagattagctgggcgtggtgtcgcaaggcagcagtcccagctactccggaggctgaggcgggagggaagattgcttgagcccaggatgtcgaggctgcagtaagctgtgatcgcaccactgcactccagcctgggcgacagagcaagatcccgtatcaataaaaaaggaaagaaaagaaataatgcttgtagagcgttcggcacagtgtcgggttatactgtaaacattcagtagttggcgctagttattagagcggtgttcctggatgagccacctccatgttgagcctgtaaaactggcctaatatgttctctatgagtcactgcattgctctgcaaatcagataaaacgtcactcgtaggtcagttattaacaaccccactgataatctttggaaaaaactgacataattttctttttcttttttttttggtgagacggagatttactcgttgcccaggctggagtgcaatggcgcgatcttggctcaccgcatcctccgcctcccaggtccaagcgattctcctgcctcaggctcccgagtagctgggattacaggcatgtgtgaccacgcccggctaattttgtatttttagtagagacggggtttcaccgtgttgcccaggctgatctcgaactcctcacctcaggtaatccgcccgcctcggcctcccaaagttctgggattacaggcgtgagccactgcgcccggccagaaactgccacaattttctaaagaggaaaaaaaaatcccttctaagctatcccctcccgacgagacccttcctgttcctttaaaatgggccgggcagcagaaagacgagtgagtgacagcagacaggccaatcagaagcggccccgtctcgggcccaccccgaggcctggcccaaccgcgtcccggtagctcccggaataggagcgttgcgagacggtcggttccaagtgggcctgggcgcgggggagaggcgggtctgtcctcgggaactgcaaggccctgtgagcgggaggactgggatcccggccgcggctgctggaagcgtcgaagctcagcggggccgcggacactgacctgtgcttagaactcatcctggcccgcagagcctgccgcgagtccctggcgtcccctgtggcgggctcttggagccactttcccgagcggaagtcagcccgcggctcggactccggcgggacctgctcggaggaatggcgccgccgggtgaggagttgcgcgtggctttggggagagggctgtcgcccgcgggaggttactagtcgccgctcgagagccggccaggcgggatccccttcccctgcgggacaggggcatgggcacaagctctggctggggcgctctcggatcgagggtccgaaggagggctgcgagctggtgggagtgcccgcgacctggcggggttggtgcctgggggaggggtgcagcgcggagctacgggtcgccccgaggctcagccgtggggaccgcggacgcgcttagcctaggtctggcctcattcatttcactcgcgcgggcttctgggccaggcggcctaaggttctggtcccggcgctgccccttactccgtgtgaggttttgggcagattgtccttctttgtgctgtagtttcccattcagtgaaaggggcaaagaaaaccctcacttctctctgggagcctggagcataagttctcaagtgacactctaggtgcaaacttgcagtcggccacgtattcattgtgtaacccaaagcaggttacttaacccctctacacctcagtttctcatctgtaaaataagttagtcaaattagtcacgttatctgcctcgttgagttgctttattaagtgaaataatcttcgtgcttagtttagaacagtgcatggccctaggtaagaactaagttaactgcattggaagttactgagtagacgctgtgcagggtggaatttcatgtagcctcatcgtaactttggaagcatgtactcttgttactaccatttgacagatgagaagttggaatcccacggaagggaacttacttgcccagggtgacacatgaatgagtcagtggctcaccgtttcattatttgagaagttcaggatagtaaagtggttaaaagcagactttggattcaaattgcctgaagtttgattttcagtgatgtgtcctagggcaggtaactacttctgagccttactttcctggtc

SEQ ID NO: 8996 - DNA, 6000 bp, Homo sapiens
gccttggctttccaaagtgctgggattacaggcgtgagccactgtgcctggcccaaaattttaaaacgaaaaattaaaacatacaaaaaagccaaaagaattgttcaaaaaatgctatacccatcatctattaggttggaacaaaagtaattgcggtttttgccattccttaacctaacagattctatgcttaactttcattctgccacatttactttaacacacatgcatccatctctccaccgctctgaggtagcttcttcactcttgggtctgatgcctgatgctccctgcactctttctccctatgtggcctgagcttctcacagctcggtggtctcgggatagttgttctttctgcatggtggctgatttccaggccagttcaacaccatgcttgaaactgacacagcatctcttccacaattgtctattgctcaaagcagtcactgggtagaagagcatgtgggatggggaataccagccacttaggataaacagtcagctgcaaagggtggtcagtggagccttgaaaaggtgatattggggctcggtgcggtggcttatgcctgtaattccagaactttgcgaggccaaggcaggtggatcgcttgagctcaggagttagagaccagcctagctaacgtgacaaaaccccatctctaccaaaaatatgaaaattagctgggtgtggtggcacatgcctgtggtgccagctactcaggaggctgaggtggaaggattgcttgagctggggaggtgaaggttgcagtgagctgagatcatgccactgcactccagcctgggagacagaatgagaccttgtctcaaaaaaaaccaaaaaccaaaaaacaaaaacaaaaaaaaaaaaaaaagagagaaagaaagaaagaaggaagggagggagggagggaggcaggatgggtggtattggggctgagccctatggaaagagaatgaacctgtcttgtggagagccagaagacagcattctagacagagagaccgacaaaggcaatggtttgaaggtggaaaagcaaatgtcgtacctctactttcccttttccacatccaaatccagcccatcattcgggacccacattgagctgcctccctcacgaggccttcctagatacttcggcgcgtgctgatcctgcccctcttcctagagctttcatgtgtgtacactcatctgacatgcacaggtcagctgggtagtgcaaaggttatgcatgcagactctgcgaggccttagggaagctgcttaacttttccagccttaggtttcttcacctgtaatgcctactttatagggtgctgggggagaatattgatacgtgtaaagtgcttggcacctttacacatatgaatatgcaataaacagcagctacaattaatacaaaactggctcactcagtcaagtgtgactccaagaaaatatttttcagagaagaggctacggcttttttggctttttcttcttcattgtgcaatcactgtgccttgcatagatattaggcatagaaataagcctgccacaaagctctcctccgtgctgtggtgctcatggagccatgcagggcacagagacagcaaaactcagctggaggcctctaagagcttctagagagtgagcaagtagctgtgcctgtcattgtgcctgcagcagtcacttgggcgatcttttacatttggatacagagagtaacaggtttcaaagcacctgcacacctggattagtatgctggggctgctctaacaaaggaccacaaactgaatggtttaaacaacagatatttactttttcccagttctagggactaggaatctgaaatcaaagcgtcagtggcaccttctgagggctgtgaggagcctgtcccatgcctcttgactagcttctggtggcctgctggcaatctgtggtgttccttggctgtagaggcatcgtcccgatatctgccttcatcttcacatgacgttctctctatgtgtgcatctgtgtccatgttccccctcatttaaaataaactatttccttttttagagacagggtcttgctctaccacccaggctggagtgcagaggtgcgatcataactcacttcagcctccaactcctgagctcaagcgatcctctcatctcagcctcctaaagtgctgggactacaggcaagagccatcgcgccctgtcaaaatttcccctttttataagtacagcagtcatactggattagggactaccctaacactctcattttaacttgattacctttgtaaagctcctatctccaaataagatcccattgtgaggtactgggggttacggctcaaacacagctttttggagggacacaattcaacccagaaaacactctcctcactcacaccctgcagtgtgtctctccagggcaagtagtaagtcctgtcctaaacatctgcaccctgcaggcctcagtgtcaccccctcagctattcttaggctccaagccgtttctcactacccagcctttccaccacccatcgtgctttttcctccttctctttgcctggcaaagtcctcctcattcttcatttctttttttgagatggagtattgctttgttgcccaggctggaatgcagtggtgcgacctcggctcactgcaacctctgcctcctaggttcaagcaattgtcctgcctcagcctctcaagtagctgagactacaggtgcacaccaccatgcctggctaattttttgggtattttttgtagagacggggtttcgccatgttgcccaggctgatctcaaactcctgggctcaagcaatctgtccaccttagcttcccaaagtgctgggattatagacgtgagccaccactcttcatttcttaccagaaatgtgatctcatggacgtcttccctcatcacctctcttttgattgtatctcccatgttattgcttctctcatggctcccccttcttccttcccaacacatctcatggtttttaagtgtacatttatctgtgtgattgattagtgggggtgacagacattgacccctagtctataagcacagtcagggtaggatcccacctactcaccattgtcttcccagtttcatagtgcatgatccagagtagaaactccataaatattttttaaatgaataaattatgcattttgggtcccccatgccacctcacatagtatgggattagtgaatgttgagtgtattatttgtcttctaagagactgaattcctttagggcaagataggtctctctctctctcttttttttttttggagtctctggtatctaacctctgttccttgatcctctatgtatgttatctaggctgcataaccaattatcctaaaacttaggagcttaaaacaataacatttagtatttcacaatttctgtgaggcaggcattcaagtggcattgcaaggtatttctggctcaaggttgctcttgagtttacactgaagattttggccaggccacagtcatttgaaagcttgactaggactgctggagccacttggctcatacacatggctggcaagttggagctggttgttggcaggcagctcagttactccccatgcgagcctctccataggactgcttgagtgtcttcacaacatggattccccatgagcaatcaagacagaggaaagaggaagttgcaatgtcttttatgactttatcttggaactcgtgctccaagatttccgcaatatcctatgggttatacaggtcagtcttattcttggtgggaggtgactacagaggggtatggatatcaggagccaagaatcgtcagggtttatggtggaggctggttatcacactctcatctaggtttctttttctcctactacttgccccccaccccttcttaatcatggaacactgttctttgccttcaaaaaacttatcctgttatatgattacacattcatttaattagtctgtctccctccaacggactgtaagcaccacaagggcagagactgtatgtgtctgctttagcactgtgtcctcagttacaaggacaaagcatagagtacgcgctcagtgaatgctttttgaatgaattataatgatttgcttctgtctgaattacaagaggtgtttctgtttgtctcctctctgcattgtaggctcctagctcaggacctggcataaaattaaggaaatgaacgtgagaaacacttttgaaatagtgacaacacatccagatgaacattttgcaggacagctacacacccgttttagctcaccagctaccagttgtgactgtgctctgctctgggagatggcttagctttgcataggacaaaattctaatctagtttcgcgcagttcttacgaatttgttacaatgagacgggccaagctatacagcccattgcgatgaataagtaacttttttttttttttttttttttttttgaggaagagtctcattctgtcgcccaggctggagtgcagtggcgcgatctcggctcactgcaacttctgcctcccgggattcaagagattctcttgcctcagcctcccaagcagctgggattacaggcgcccgccaccacgcccggctaatttttgtatttttggtagagacggggtttcaccatgttgaccaggctggtctcgaactcctgacctcaagtgatccgtccgcctcggcctcccaaagtgctgggattacaggcgtgagccaccgtgcccagccccgagaagtaatttcttttgttttctttttaattaaacaaaaatgttgctgaaacgagctgagtgatataggagcttaaagaattgacaagctctagatttcatttccccaaacctctttgtccagctcgaacccacagaacagggacaaaagtcgacaaaacccagcggtgcctcacccagaaacctggcaacgcgggcggaacagagccggttggttgctcagtgcgcgtcacttccgggactcagggtcgcagggaactacttccgggggagcggcgcggcggcgcgggaggtgagtgccgcagctttgcggtggggtgggaaccgagagagagccgtcctcggtgcggtggcctggctttcccggccggcctgtctccagcggcgccgcttggtgggcccggctgtcgctccgctcagggcctgaatacgttccctcggcggttgttcgaaagttacttccggaggggaatttgagccccccgggaggcggagggcctcgcctggggcagccctgcgctttcgtgcggaggctgggccagaacccagggctcctcatggcctggtccgggcctttcctcccacgggtggagcagtaggagaaccctgagctccagagtgaatctggccagggttcgaatccgtatggctctcttaccgtgggcaagtcacggttcctctctggccctcagtttcgtcttctaaaatggacatacacgcttgtactgcggggtaaaccgaggtggtgaatgtaaagcccttagtaggtgcacagtccatgtttgttgtacgaattctaagagaagcgagaaatgaatatgagaaacatttttaaaatggtgacaacacatttagattaataattatattttgcagggcatctgcacaccagtttcagcccaccggctaccagtgtgactttgcccagagaggtggcttagctttgcattctaatctagttttgcgtggttcttaggaatttgttttaatgggacgggccaggctgtacaacccattgccataaagcggtaacttctttttctttcctttttttttttttaaagccattctatttatttatttagagacggagtctctctctcgtccacgctgaagggcagtggcgggatcttggctcactgcaacctccgcttcttgggttcaagcgattctcctgcctcagctttccgaatagctgggattacagacgtgtgccaccacgcccggctaatttttgtatctttagtaaagacagggtttcaccatgttg

SEQ ID NO: 8997 - DNA, 6000 bp, Homo sapiens; identical to SEQ ID NO: 3350

SEQ ID NO: 8998 - DNA, 6000 bp, Homo sapiens
atgcctccccccggaagcgttgggggtttgccaggccagactgagcttgtccttagtctccaagcacttagggtctagaactatgctctgactcttcttttaatttattcactattgagtaaatcttgtgtcccactctgggattgctgtgataataataattaatattagtattaataataatgaggaagctcagcccctaccctgtgccccttggaggctcatatctttctgaccagattactcaaaggagcccttttatgagacgtgaagctgggaaggagacagacagtgttttttagcataacaaagcaggggagacaccctcttaagagtttatgccataatacaaaattaatacaaattgtacaaaatgtctgattctcttttttttttttttttttttttgagacagagtctcgctctgtcacccaggctggagtgcagatcacagctcactgcaaactccgcctcccaggctcaagtgatgctcccacctcaacctcccaagcagctgggactacaggcgtgggctaccatgctggctaatttttgtattttttgtagagacggggtttcgccatgttgcccaggctggtctcaaactcctggactcaagcgatctgcccacctcggcctcccaccatgctggcctgattgtcttttccacactgcaccttgaggctggatctccaggtgggcctgcttctctcctccccttcaccctccagcatctaccacaagctcctccttcacctgcaaccccctctcaggatgaaagaatggctggcagcatagcctggaagccggacacacagaggaagggggaccctggtgggtgagggagggaaagggctagaaaatcagagctgaggggagggagagtacagggcctcaggtgaccacagaggtgacctcatgttaaacccaggcaagacctgtgcctgaggatggagcgtggggacaaacgaggaaacaggttcagcaagtttaagcagcaagctcacagtcacagagcgaggaagtggcagagctgggatctgggcccaggtttgtcaggttccaaaccatgcccttaacagccttgctgtgctgcgggggctcacataaggcagggagtggctgcttctcctccaagcccctggcggagtggaaggctcacagaggcaatgtaagccacagattcctctatctttgcccctatccagtccaaacccagaggccagagggccaagagctcagtttccagtgcccctggcttgttttcctgggggctctgaggctctccagccagctagtgatgaaggttgacttacgattatttactgagcaccttctctgtgcaaatcgattcacacctattatctcatttcatcctcaggaacaactgccatgatgagcactgtttcctcatctttaaatgaggaaccccaatttcagaaaggtggaggaacttggccaggctcacagaatagggtagcatggctgggactatgaacccaggactgcctggctctaaacccaattcactttcttctggaaaaagtcgtcagcctaaggacggaagagcaggaaaatagacagatccagcccttgaactgaccaactcttgatccaccccatctgtgaatttctactgagaagaatatattttccctatgatttaagctgcatcaaattgaaatagcaggagaagagttttgggggatgacaggattcttctatatcctgattgtggtcctggttacaacacatagctatacatgtatcaaaattcctagaactaaaaggaactctaggaagcaaatatggcagaatgttaaggttttataaacctatgtggtctattcttttcttaggtttgaaatattttataataattttagggaaaagaaaaaaacaaaaagcaggaggaggaggaagaggaaaaggatatttggggaaagtctgtttagatgggatggctggagctgctgcggccatcttgcaaccatgaaagaagccagtgtaagagcaaatctgagacacggggatgggagagcagagagatggaaagatgatcctgcagatgtcggtcagttgctgaatcaatcagaatctcaaacctgtcctcctccctctggacttcctctctgccataataaatttgtttatcgttgaagcaatgtgagttgatggtttctgatacttgggttgaagacactgttactgatacaggatacggggtcagatctgaagcagtggggcagccccatggccagcagcagtgctgacaaggagactgtggaaagtcactgatgtggctcatctagatgtggctgggcatgagacatcggggaagccagtggggttgcttgttcagaaacttgccagctgggtttttttttttttttggtgggaggttgtggggggacagagtcttgttctaccatccaggcttgagtgcaatggtgtgatcttgactcactgcaacttctgcctcatgggttcaagagagtctcatgccttggcctcctgagtagctgggattacaggtgaacaccaccatgcctggctaatttttgtatttttagtagagacagggtttcaccatgttggcctgcctggtctcgaactcctggcctcaagtgatccacctgccttggcttcccaaagtgctgggattacaggtgtgagccaccacccccggccgtcagctggttttaagattctaattttatagcaatgtaggtcattgtcatgtgatttcatcttaatgttcctttcctagctgacaccctcacggataccacatctacctgggccttggggaactcaggaacttcgagcaactaagagctggaagtgttcaaaaatgtgcaagataatttttcaaaaatctaatttttgtgacaagtcatcaatctatgtgttctggctgctacttagagcaatcttcctggtacagatgcagacatctgagtctgggggctcaaatcacttggaaaaagggagagctggggtgagggcctacagtcatgagtcctcctggcacctgcctcaggtaagggaaaatcttctctgcgtgaaaggaggaatgaccatgacagtgatgtgatcgctgcatctcagtttccttgtttccaaaatggtgaagaggtcaggcacggtgtggctcggccttaatcccaacactttgagaggctgaggcaggaggattgcttgagctcaggagttcaagaccagcctggacaacatagtaagacctcatctcaataataataataataataataataataataataataaaacaaaatggggaagaatcatccctctctcagggttgttttttggcttggagatgatgcatatgaagcatctggcacacagtggatgcttcacacacggccactgctttcattctgaagcaagccagaagaattctagttgctgcagatggaagcaggaggggagactcttttagaaccaaacgaagagaggaagaaaaaaacttttaagaaaaaaagaagaaaacttcagaaggtctcacgtcctccgagctcagcggacttcattagactttcataaagtccaaagtcggggagacagggcactagggggctgatgaggacccagcgggagagaagctggctgccccttctgcagccccgcccctcctctcatcaccatggagacggagcaggctgcccagtggggttcctgcccacccgaggcctgaggctgctgcagagggaggggcaggggctgagcagacagggacctgtctggaaagctgggttggcggtggggagtgtctacatccccccaactcccaaggcgctgagggattcgggctggtgtgggatgcatctggagggctgtgttttgatcctcgctctgctagcagcttgctgagtgaccgtgggaagaacgcttcccctggtgaagcctcaggttctacatctgccaaaggaaggagtaaaaatgtacaaaaacagaagcttggataagaaagctgtgggatgaggaagcaatgaaatatttaatgctggagaagaacatttgctacctattgtttctcgaaaaaagggaactttaccaaactgaccaggtgatcccatattggttaacaaacaaacatggactctctacctatgcttaccaacaaaagagggagaaaagaaatactctaaaatacactttggcttgtctccggaagagggagttatatgtaatttgtattctcttgtttctttctcaaattttggccaataaacatgggttacttttaaaatcaggataacattaatagctagcatttggatatttattttgcacgggcagtatgctaaatgctttacgtggttttaagctcattttatcttctccacaatccagagagggagcagtactatgtatttctcttctgcagaagagaaaaccgaggttcagagaggttaaagggcttgcctgaggtcggaccactagagaatgacagggctaagatttaaaaccatagccaagatactagactctaaaatgtgagcattgaatcattaccactactgcctctcaggacaagaaaacacgaaagcatctgttttcttaaatgttttactatcaaaaatacaaaagaaatcaaaagtagaaagaaaaatatgaatccttatgtctgtgccacccaccttcaagggagtctgtagatgggggcatttgggtggggacacagagcggggaatggggtgcctagggaggggaaccaatctacacacacacatacacacacgcacgcccgcgcacacacacgcatgcatacatggacatgcgagcctcccaggctgcacttctccctgcctgtggggccctaaccacaatggaaaaccacagcggccctccctctttcccaccctcaccaggttccttcctcctttccacattctactgacttgcatttccccagccgactcttttatagctccctggttcaacctcaaggccttgaggttttggcagctctggaggatgagagagaacatggccaggggcccttgcaacgcgccgagatgggcgtccctgatggtgctggtcgccataggcaccgccgtgacagcggccgtcaaccctggcgtcgtggtcaggatctcccagaagggcctggactacggtaactggatgcctcccttccctcctctccacccctgaggagcacttacttagcatctactgtgtgcacccctttagatccagcacctggcacactcatagcacctcagggcaggtccccttgcccccattttatatatgaagaaactgaggcaaagcgagttgcctaagattgcagggctgggatggcagagctgggattggagcactggtctagaggactccaagtccagtgctcagacccctgagggtcctcatggtcccctccttccctctatgtaacctccacctttgacttataagcccttctcttctttccaaagccagttctcagccttgccatttgcctctcgttgctgaggaggctgagcagggtcagagggagagtgtgggaggacctccccaccccgtgctctccccactgcaggggctggcggccatactgtgcacagtgctccactgggtgacacaaagagggtccccccagaccactcaccccagcccaggcagaggagagaaagacctgctctaacctgtgccaggcattgagctaggaactttacacacacagtctcttttaccctcacttcagccttgtgtaagacaaactgctgctatccacatttacacgtgagaagtgggcagcctggatttgagctctggtcttgcctgatgccccagcacggggttgctcgatgctgcctcccgatggcagagagatgacctgcaaaacagtgggtgacacccagccccagggaaatcagaccaaggggaaggcagagcctcaccagttggggtgcgttgggaaaacagacaggactcaggggacctggtatcccacccctgaattcccac

SEQ ID NO: 8999 - DNA, 6000 bp, Homo sapiens
cccctcagcaggaaaagacttgcaaggctgactttgctctggaaaaggagggctctgagctacaggggagggggagggggctatctgtgatcattcagccccgaaatgatgctcatgatgttggctttccaggccattaattcaagggctccatgcctccccttcccccatggtgctgtctgctctgggagataagcccagttctatttaaccctatttattcccccaaagtgactcccatctctgttagccaggcatttaaccccctgggtactgaaggcatcaaaggcagagagattgagctcatgtgtcaggaaggggtgcgtgcatttcacctgggccctggcttcagggaatccgatccaggtccttcctaatccaaactcctcatctggaagtccttgcttcacaaggcttggtggaagtcctgagagaaggtaggaacctgtgtggccctggcaggagagaccctctgacacccccaggttgggtagcgacagctcctgctctctccccacataccctcccagtccctagtttcttagtcacaagatctgggttctggcatcagcaaaagagaaaggctgtggcatctctgcctcttttgtgtcccactggctggtggctgcattcagcaagccctcttccatctccatctccctgcttggtcctttttacgtcccctgcccctttctgccctttgttctctcctcttttccccttcagtgatcacacaagagtagtcctgactactcgtctcggtgtgtgtgtgtgtgtgtgtgtgtgtgtgtgtgtgatttcttgtgtctgggggcttgtcagtgtgtgtgtgtgtttacctgttcttgcactgctgtgtgtctgagcctgttatccaggtgcctctgcccatgcagagggacccaccagtgtctgtcctgatttctttgtgtggcaggcagtcttagtacaaatcttgcatgtgtctgtctgtgtgctggcctgttcatgacctgtgtgttgctctgtcaatgtattagaatgctctgttcaatctactagaatctctatgttgtcctcatgtttttgtacatctatccatcggcttgtcatgctctgtgtgaatgtatgtgtgtgttgtgcttcaactcaggggaccagtctactgcaaaatcctctcctagggaacccttccagaggagctatttgggagaatttggaggttgatggcttcgccagggcagagcccagctcactaccagcaagggaagtcatcctgttggtctcctgggctcttccctctccctgctcctgacctccctccccttctctccaggtcagcttgcgactgtgaggagcagggacagagagcttcaaagacagaagagcgtacattccaactcactcaacccccagatccaatcgcaggctttttcttgtgcactcccatttccacccccagccccacaacgagaactggctgttgagtatagtcactacaacaatcacaaaataattgctatcacgtattgggcatgcagcacctgttaagcatttcatatatgagatctcattgaattttctcaataattctatgaggccgttattcttattttcacattttagagatgaggaaatggaagctaggagaagtcaaggaagtagtcaatgtcatagaattagtatgtgatggggtagaattattcaataaagtgtgggttgtttgagagtttgccacacctgccttcagcctgggaagaggcatttattacaaacagcaggaaaggagggaaatatgggaattcctttcccaactgctggcatctaattatagccagcgggactagaatctgattttgaatttcatctctttggacaatgaggtggccaaataccaaacgacaaccagggagaaatgatgtaaggacaagacgaggtagtgcagggcaaggcatgctggaaagagccttaggattcctgggggttctagcctggctttaacctggattctgtgtgaccttgggcaggacacttccttgctcaggcctgagttttcttgtctgtaaaactaggataaatgtgaggttctgttgggatgtttgggggaggtttaaacattgcagaaaggaaaattggactcagggctttctaagttccctcctagacccaagaattggagtggggagtataggaagagactatgcttgtgtcatcttgacaattcctggaatagccagaacagaatcacgtgcacaggaagggctgtgaaaaggttcactgaatgaaggaataaatgaccccatctctcactgatgaaaaaacgtcacagcccactttagactcacttgtcagagaaggcatcagtggccatcctaaggtctgggtgtaatgctgtggaggaggcactggggaatcctacaaagacccagcctctgcccagatcatctcctgtgggccaaagaatttcaccagaaacagaaggggagaggatggcaattaggatgtggagatctttgtctataggaatctgtagggaaaattctctctctctgtctttcctgtatctgagaattggggtgggccgaggctctccgtatagggcaaatttcggatgggggatcgcttctatttagaagcctccttggaggagaggatctctgtgtttggaggaagaatctctttcctgtctttgttctgggtcctgtcatgacttggagtgtctgtatttggaggacggttctatagaggggtctttttttgttttgttttttgttttgctttgttttgttttgttttttggtcttagtagctggaggctaagaagaggatttctgtcttggtttccaccaggcaggagctaggggctttccagagcttctggggaaattaagggggtacctggggagaggttaggagcatctctgtccaatgtggtggaggttccctatctggagagaagcctcctccgggagactgggaggggcttgggatgggaggaggtggcaggaggcgggagggtgtagagagggaagcctgtcttgtcctggcagctccaactctctggccaaagccctcgggccgccctacttgtgcgctgacgtgagctaatctagaaatactgcagagaaagagtggctggggttcccagggagaaagggcctcgagagaggggagatggggagctgcttccttttttgtttccttcggtttttccgtccgcccccgcccccacttccagtcacagccgctacttctccattcaggctgggactgccaggtggagccctgcggtttactgctcaggaggagcccggccaggacatcagctggggacttacgcagggacccattcagagcagcggaccctcacggagactactacaaagggactaacacaggcacgaacgcaggcaaccccattcgggaacacatacgtaatccaacacactagctctggcacacacactggaatgcgcgcaaaaccacacagacacagaacacacgcggttaccaaacctcattctcagaggccacactgatccaacctcaagcagagtctgatacagcatcggtctttgtctctgggtctctcccttactcgcgctcacacacccgtaccccaatcaacacaaacagcccaagctttcacagcctggaggcggccgtcggagcagggccccagcgcaccgcgagcctctgcttcctccgccttgcagcgccgcgagcccttctttcctccgcgcctggccccgtctgcgcccctctcggcgtgggcattcgcagacccgctaggaggctgacgagaggtgtcctcatagagtcctgccttcttccagacccccaaacgaaaagaaagagaaaagccaacctttcgcctccattctgcacgcatttggagagcggctggtggcgagcgatccgcacaatcgcttccctcgcggcgtccctggacgggcggagagaacccgggtgactgagcctgaggctgagcttccttgggagcgatccatgccagccacttctaccttcaagggggactcgcggccgggtttacgcgcgaaggatgggtgccagggaaactgacttatagacgacccgctccgcgagagactgacaactcagtcctgcgggctttcggggcgcccagaccagtccttagccagaggatctggggctgcacagctcccggaccctggagggggtggtccgggggtgggagactgcgagcatcagcccacgccggccccctcccaccctgcggcggcgaggtgggaagggccaggatgcgagcttagcacctcccctagaaatgcagcacttcgcccccccacctcccctgccctcggcgctccctctttcacgcgctccctcccgcctccttcccaagggcgcccttcttctgcccccagctcacgtctgaatccctcggcgccccctttctcttctcctagccccttcctcacgtcccctgcctccgggtatttcctctctccaatcccccacccccgcaccgcctgattccgaggggcgggagcgcattgggctgcgcacgggtgggggcgccgcgccagcttcgcgtagctgctctgacgccgctgccgccgccgccgccgccgccgccctccgcagcccagctcgcgccccgcggcagctccgcagtgcactagccaccaccgccgccgccgccgctccgccagacctgctgccagcttgcccggtccagccctgagagagcctcgaacgccagctgcgagggtcatgagccagagagccccggggcgccgcgcggagagcaagcggagatagcgactttgcgccccccagccctcgccttcttgcatcgcgttccccgcatcctcgggtccttctgtcctttccgctgtccccaccgccgccatggccaccttgctccgcagcaagctgtccaacgtggccacgtccgtgtccaacaagtcccaggccaagatgagcggcatgttcgccaggatgggttttcaggcggccacggatgaggaggcggtgggcttcgcgcattgcgacgacctcgactttgagcaccgccagggcctgcagatggacatcctgaaagccgagggagagccctgcggggacgagggcgctgaagcgcccgtcgagggagacatccattatcagcgaggcagcggagctcctctgccgccctccggctccaaggaccaggtgggaggtggtggcgaattcgggggccacgacaagcccaaaatcacggcgtgggaggcaggctggaacgtgaccaacgccatccaggtaagcgcgggattcccagttctgcctgtcctcccccctcccagctcagcgtgccgggctctgcccccgacagtcgcccggtgatctcggcctggagaccccctcctgtacccaggaatctccctttctccatccctcccagccctgcgcggggacctacgcccccaggcggtgttttccgccctaacccacgctccctcccaacggcaccagctgcaagaccgctaggctgaagttcggtctgagacacctgtccggagacactgcaaaagtgaaggaaatggggggagggagcaggaagcgatgagaaagaaagaaaatcaggattggagggcacggtttggtcttggactctggaacggattcacagctgcatttttgggaggaaagaagaaggggaaatcgctgaggtcggagtctcctccccccgcacacacgcatagacacgcacacgtatataggcaggcacaccacatgcccacagccccccttcccacgaacaaaggcgcaggcacaggcgcacacgacatgtatctatatatagaccacagtactatccccaaatgcacctgcgtacacccctacagctccacaaacaaaagcatatacctgcacataccaaacacacgaatattcgtttgaacatatgcacacacacatgcacagatgcatgcagacaggaaccagcctgctcccttgggtgcggccctgttggagacatacaggtatacacac

SEQ ID NO: 9000 - DNA, 6000 bp, Homo sapiens
aagtgctggtattacaggtgtgagccaccgcgcgcggcctaccttctgtataatttctatggaactatgaatttacttagttgctgttgaccggttgacctaaagttatgttgacatttaactctatatttttaaacatcagtgtttagattttgtatgttggagcccatttatttatttggcggccctcaaacattttcccatagcctcgtagaatattcagtggccttggactgtcccttaatgtcttactacagatggtaccacagatgacctccaaaataaaggaagagactttcctgcctgtggacaggagagagaggtgtggaggatgagagcatagtttaacttttttttttgaaaaactttattgagatataatccacatgccatacaattcactggcttataagtatataattcagtggtttttaatatatccatagttgcgtgatcatcaccacaatcaattttaaaaatttttatcacctccaaaagaaaaactggtactctttttgagtcaccccccatttgcctccaataaccccctcccagctctagacaatcaccaatctgacttctgtctctatagatcagcctattctggacatttcctataaatacaatcatataatatgtgtatggccttggaactggcttctttcactcagcacaaggttttcaaggttcattcacgttgtggcatgtgcttcattcattttgattgccaagtaatagtggattgtaccgtgttttatttatccattatcatttgatggatatttggattgtttccacttttttttttttttttttttttgagacggagtctcgctctgtcgcccaggctggagtgcagtggcgggatctcggctcactgcaagctccgcctcccgtgttcacgccattctcctgcctcagcctcccaagtagctgggactacaggcgcccgccactacgcccggctaattttttgtatttttagtagagacggggtttcaccgttttagccgggatggtctcgatctcctgacctcgtgatccgcccgcctcggcctcccaaagtgctgggattacaggcgtgagccaccgcgcccggccttgtttccactttttagctgttgtgaataatgctactatgaacatttgtgtacaaatttttgtgtatgtatgcttttatttctcctgagtatatacctaggagtagaattgctgggtcatctggcaactctatgttttaaattttgaggaaatgccatactggttttcaaagcagcggcaccattttacatttccaccagcaatgtatgaaggatccaatttctccatatccttaccaatgctggttattgcctatcttttttattataaccatcttagtgggtatgaagtggtatctcattgtggctttgcatttccttcattgctaatgatgttgagcatcttggccatgtgtatatctatcttctttgaagaaatgtctatccagatcccttggcctttttttttttttttttttttttttttttttttgagactgggtctcgctctgtcgcccaggctggagtgcagtggtgtgatcttggttcaccgcaacctctgcctcccaggttcaaacaatcctcccacctcagcctccccagtagctgggactacaggcccatgccatcatgcccagttaactttttgtatttttagtagagtcagggttttgccatgttgcccaggctccttgcccattttttattatttgtctctttattatagagttgtaagagttccttatatattctagatataagtcccttaccaggaatatgatttgcaaatatttcctcccgttctgtgggatattgtattattttgccaaggctgccataacataatactatagactgggtggcttaaacaacagaaattggctgggtgcggtggctcacacctgtaatcccagcactttgggaggccgaggtgggtggatcacttgaggtcaggagtttgagaccagcctggccaacatggtgaaacccttactctactaaaaatacaaaaattagccgagcgtgggggcatgcacctgtaatcccagcttctcaggaggctgaggcaggagaatcgcttgaacctgggaggtggaggttgcagtaagccaagatcgtgccactgcactccaccctgggcagcagagtgaaactctatgtcaaaaaaacaaaacaaaacaaacccccagaaatttattcctcacaattctgaaggctacaattctgagatcaaggtgttggcaggtctggtcccccagccctgagtcctctctccttggtttgtaattaaccttcttctccctgtgccttcctctggtctttcctctgtgtggcgcatctctagtgtctcttcttatgaggacaccagtcattggatgagggccccatccaagggcctcagtttaagatgatcacctctttaaagaccttatctccatccacagttacattctgaggttctgagactgtaaccagtacagttcagcatatgaatgggggtgagggggcacacaattcagcttataacagttattttttcactctctttttgttctttttatgtttaatttttttttttttttttttttagagacagggtcttgctctgtcacccaggcgggagtacagtagcaccatcatagctcactgcagccttgaactcctaggcaaaagcaatcctcttaaatagctaggactacaatcatgaaccactacgtctgcctaattttaaaagaatttgtagagacagagtttcactatgttgccctggctggtcttgagctcctggcctcaagtaatcctcctatctccacctcccaaaatgctgggattataggtgtgagccaccaggcccagccataacttttcactttcttgatgatacccctgaaagcacaaaagtttttaatttatctatttttttttcttttgttgcttgtgctaatatctaagcaactactgtttaatccaaagtcatgaagatttaggcttatgttttcttcagagagttttatagttttagctcttacatttagatctatatgttgcatatagtatgaagcagggatccaaattcattcttttgcatgtggatatccagttgtcccagcaccattttttgaaaacactattctttccccattaaattgtcttggcactcttgttgaaaatcaattggcagtaagtgtaagggcttctgtctggactctcagttttattccattggtctgtatgcccatccttatacccgtaccaccctgccttgatgactgaagtttcctagtaagttttgaaatcaggacttgtgagtcccccaacttattctgaatttactttaacttttgataccgaacacagtgtgagaggtgaatgaacagcatgacattggagttgggagccccctccctccaaaggccttattttaggaacacaggccccaagtgccacacaagccttggagagatgggttcccatcctctcagcccatggctcttcattatcaatcaatggaaacattcttcggagaacaatgattcccttgggttattttaaacatggctttaagtcttccccacatgctctactgtctaattgcttttcctgaaacagtgtcattcacaactggattattaatgaactgagagggagccagggagccaatgaagggggcttacagagttcctggagagggcctgggggcctggaacaagttcaacccacagattttctctcccccaagaaaggtgactgagcaaacagaaaatcactaaactcaggtgatgctggtggcctcaaaagaatattgccagtgaaaaaaaaaggattcgggcgagttcctcaaacatgacagctgagaatcaaattaactgggtaccatccccaaactccccaaacttaaactctgaatttccccagctggctggccctggggtgcctagggctctcatctgtaggccgggaaagctcaggaaacaaggcctttgtggagaagagaaacctattgttctaaggccagggttcagcaaatgtggattccagagaatgtttggggaggttttctctgctttgtttatgaactttcttttctcttcctggggtggtgatggtggggggtgactctcagcaacttaaatagttaaacccattgtgttgtaaagaaaggctggtgcacagagtgcagaggccttcagccccagaaagaggcttgaatgaggtgacagaagccaccgggtatgttttgctttttatttttagcgttaaatctcagggaagcagcccctatcttcatcctgcacatctcaaagggcgtcagacgtcagcagaggtacgaccacttccttcctccagcgcttcacctcccttctttccagaaagaggaaatgatgcgagtccacaccgcaggccacagcccccatgtctcggccccagcagctgggggacctggccccacagatctgtccccagcgcaaggccagggccggcccctggacctcctgggaagccttcagactcaggccgcgcaggccttcaagctaggaaccctgagttcctggccctggcattcattctgtgtgaccttgagcaggttaccactcctctctgggcttcaggattcccgtctgtcaaatgggagcagggataccgtccttggcttccctctttccatggtcggggtgggggttaggaaaactattttggaggagggggcagcgttaggaaaactattccgaagcctggccacgtcccaaccggtttcaacttcctgcagctcagaagaggggtccccacccgagagcgccgggaccctgtcccgcgctgcctcccaagccggatggggttgagcgcgcccaccccagtcccaggagctcaggccccgccttgggggaggagccgagaggcggcgcggaggctcgcggccgagcagagccagctctgtcgccgctggagcagctgcggctcggggacccacagacacagccggggtcgggagccgcccggggcagggctcgggagagcgggtgagttccccggcggcgccaccaccctccttgcgctctgcggcttcgcagggcgggggatgaggatggggcggggaggtggtcccagcctgctatcacctagctgggggccggggcgctttggccaagggacgatagcttgagataaatgggagtgtggggactctggaaagacgggtaccgagagcgctaggtccgggagtcgggctggaatgggggcgttctccccggcctcgcaattccttgacgaggccaggggagggggcgcattggcaggttgttggctgcggccgtcgtagaccgatcttggggcggggaggtggggtcctcggtctgttctggactcatggggccgccgtctgccgggggtgcaatgccgggcggcgggagccacagcggacaccaaacaacccccccccgcgcactctcccggccgggcatggtggtgccgccccctcgcgtggcggggcttggtcctggcgggcagcggcagggcgcagagagcgctcctgcccgggcgggaaagatccccaaggcaggcgcctccacctgcagacccgccccgcctcaggatccggctgacagcaccagccagcccggggagaccccgcgagtggtagttccccgggaggggcgcgcccggcctctcccagggccccgtgcgccggcggctgggtcccccgcgccaggagcgctcccctctgggcgactccggctcatcgattccggcccagaggagcgcccccgggcgccgaggatgggcggagacgtgcagccgcccctgagaggtcgcccagaggggtctccccaaggtcacccggagtgcccaggctgagctgcccagaccgccccgggtggagagccgggaggcaggcgctcgctgccctcctccttcccccatgtagactcccttcctccgctcccccaccccggcccggcct

SEQ ID NO: 9001 - DNA, 6000 bp, Homo sapiens; identical to SEQ ID NO: 955

SEQ ID NO: 9002 - DNA, 6000 bp, Homo sapiens
acttaagatataaagttatttcctcatatagaagttaaaaagtacaggtctacatgaaagctccatcgttactcagcactgggctccttttttgctcttttgcacatggtttgcattcttagcaatatctcacatctaaggtggctgtcaaagccccagccatcatgaccttgagactggcagaaagcaggagaggaaatgggggatgggcaaagagggcacagccagtctattcccatttaggaagaaatttttggaagttctttttttttcccccaagatgaagtcacactctttcgcccaggctggagtgcaatggcacgatctcggcacactgcaacctccgcctcccaggttcaagcaattctcacatctcagcctcccgagtagctgggactacaggcgcacaccaccatgccaggctaatttttgtatttttagtagagacgggatttcaccatattggtcaagctagtctcgaactcctgacctcaggtgatccacccaccttggcctcccgaagtgctggaattacaggcgtgagccactgcacctggccaaccatcctatagtcttccagcagagtctctcaaatcagtgtctccagatagacgtgaactccttggcatgtcaagtgagggggtactccagccattctggctccttacatcctttttggaacagagggctagtcacccagatggggagtttcagaaaggaccaggtttgagaagaaggccataaatttggtttgggacatgttgagtttgagatgtctttgagacatccaagaggatatgttgagtaggcccttgcacccatgcatgtggaatttagataagaggattgagctggaaaaagaaaacgatcagttctcagtgtataggtggtaagtgaagccatgggtgcgaatgacaggagagaatgcccagggagagaatgctgaatgaaagaagaggttataggacccagtcttaaggaacatcaactcatttctcacattcaaaaaaaaaaaaaaaaaatcagtccacctcccttcatacattgaacatcacccatgggatcagtgaccttcagccaaaatcctaaagctttttgtgccacccaaggttgagtgacaaggctgcagtcttcctattgtcccatcctgctctcacccctgcaggaggccagtgtaagtatctgttcctaagtgtttttcctaacactagtgagaaacctgtgggaactccagggaagtaggagtgtccaccagccattccctgtctctaggaagcttgtggagtgaataccttctgtgcaaaagcctctaggtccaagttgagatcatccactgagctgggccagggcccagtcctctattaacttttggggtttttctgggttgcttatgaccttgctgcacatagaagacataatctctgtcctcttgtggcttctctccttccttcctttagagtagcaaggttctatctacctcctgtctgactgtggctgagccatctcttgggctgcggcccatgatcccaatagctttgctgtgcagggcttctcagctcccaggatcaccccccttccttccatggtgaacgatgagaagctagactggcttggttgccgtcaacatgtcaataaatctcttagtagcccaggcacatgatgcgaagattgtggggagcctgccttgagagagggatttacagccctctagagaagtagaattgtttctgagcctatggggagccttcagtttggctgctatgagccccagccctgcctggaaaagtctagtgtcagctgagaccccaggactacttcctagttgggacaataaccttttctcctgccgaaccacaggggcttggctggccttcagaaccatcatctccagctgactgttttttgtttctttgtttttttaaaaaaacttatgggggtttcaaacgtacaacaaatatagaaagaaaaatatcccaggttctcatcatacagcttaaaaaatcatcaaaatagtaccaagattgtatcatctacccaccacatatttttagtggaaagacatttatgataactcttgaaagaaagagtagactataaaacaccatattcaatatggtcactttttaaaaaaatgataatcttcagattcaccatttgattatagtgttgcattaaagttaaaccgtggtttatggcagcccagagcctagctgtctggtttttgaggccacacagtgcctttggaggtgggaggaagatctggagccaactctaagtcaaggagcccagctttcagtctccaagctacagcgtggcttctgatatttgcacggacttgtcatagggtggacatcctgacacacttcggaaaggaggcaccacagctcagaaaaagtttccttagaaggcttacactgtagcaaccccaggagtgcacagaacttgacactgaacagcatggcagagtagggaaaatacagaactgtgctatgatgtcatcttgtttgttcattcattcacacattactgagcacctactatgtgacagtcaccttgcttaggcaacagaaatactaaggtgaccatgagctcttccaggagcagacacagacacaggtaatggaaacaatgtgatgagagatgtagcagaagtacatgaagcctgtagaccactagaggaggagaaggtaagtcttcactagaggtggctgggtcctgaatgatggagatgggcaatttcaaaaggaaaacagagaagtacaaaatagtcataatgatggcagctacctttaaaaaagtattattttgaggtttgatagtgtagactatagtcctagctccatcactcattgtaatctttattatcttagtttatgtacttcttaataataacactcaagcaaccctatcacttaggcactattatctacatttacatattagtgcctaggtgacagggttgagtgttactattaagcacttgctacattccatatcctacatgtacataatttctcatcttaacaacaaccttgaaagtaggtttcttcattatacaaatgaagaaaagtgacacttgggttgatcatgctcatatggattaaaggctggcatagggatttggactcctgtctttctgacatctaagcccatggccttcctaatatttcgtgtctaatggggcaggaacactgaatgcaggcagaatgaaggcataatgagataaagacatctttctgacatttcctttctggaaatgtctggttggttggcgcatatcttggcagacctgcctgacaccaaattggctctttctagaagtgtggtcatgagtgtcaccaagagactgttcatgaaatccttcatgaatgtgtttcccatagggcaggtggaaaaactaaagcatgactttaactttggaactccgaaaaagtcaataaaaagacaagccagtaaacaaaggggtgagggtgcagaagactttaacagacctttcacaaaaaaataaaaattaaattaaaaaataaatggcaaataagcacatgaacagatgcttaacatttttagttaccagggaaatgcaaattaaaaccacaatgagcaaacactacatacatacccaagtggtcaaaactaaaaagtacaaaaaattagaaacttcaaatgctgaccaggatgtggtacaatggagactcatagtttatggaaacataaaatgatacattttggagaaaggtctgacagtttcttataaaattaaacatacacctgctctctgacccagcaattccactcttaaatacctggccaaaggatatgagaaatatacgtctacaaaggagcttgcacagacagcagccttgttaataataaccaaaaactttaaaagtgcccatcaagagttgaatggataaattaataatactacgcagtaataaaaagaattgtggatacatgcaagaacatggatgattctcaaaaacattcttcccatgagaaaaaaaaaagccttacacagtatacatactatatgatttcatttatatttagttctggaacagattaatctattgtgggaaaaaatcagggtactaactgcctctggaaggtgatagaggagcagggattgactaggaaagggtattgctaattttctggggttttaggaatgttctgtatcatgataggagttcgggttacataggtgtgtgcatttgtcaaaactcagtgaatgtgtactttggatttgtgcatttcactgtatgtgaattttacatcaaaatgcaatcgaatactgaactctagttaattatatgcatgcttaactacttaaaggaaagtgtactaatgtctgcaatttactttgaagtgcaccaaaacacaagatggaatgatggatgtatagacaaatatgtggtaaagtacaagtatagtataatgtaaatagtagaatctaggtggtggaaaataggtttattgtaacaggtgctcattctttcaattttgtttgaacattttcgtaataaaagaaccacttatttgggggttttgcagcaaatggagacactagaagctaagaggggcaggaggttcctcttactttgggaaatgcaaattaaaaccacaatggttttcccaaaagtaattgatctttttcagtcaatgtttcctcaactatcaaatgggtaaaatggcagtgaaggagcttcatattattaagcatttcctggtgggtggaatacgccatgaactaggtgcggcctcaagctggttactcgccctgcctactccctctcgtgtcctcccagtacccccttagacccaccagctctgagggaatcttcgcgacctgcgcaggcggtcgctctgataaccgcatcccggtttccgggacgacagcggaagtcacttctcacacgcctttcttattggataccggcttttcatggggccgagcgccgctgggtaggcggaagtagccgcaggcatggcggcggctatgccgcttgctctgctcgtcctgttgctcctggggcccggcggctggtgccttgcagaacccccacgcgacagcctgcgggaggaacttgtcatcaccccgctgccttccggggacgtagccgccacattccagttccgcacgcgctgggattcggagcttcagcgggaaggaggtgagggcgcgagatctgaccagggaaagatttccgtagtgcctgctggctggccggccgtgggatgaaggcaaactttgggggcggggcctaattcctgggtagagttcgggatcctgggtgtggaccccgacgaggtggggatcgtcactcacctgctcccgtttccccagtgtcccattacaggctctttcccaaagccctggggcagctgatctccaagtattctctacgggagctgcacctgtcattcacacaaggcttttggaggacccgatactgggggccacccttcctgcaggccccatcaggtgcagagctgtgggtctggttccaagacactgtcactgagtgagtgcacaccttgggccctgttgcaggccatggagggaatgtggctgggagagtgttgtcatcctgccactgctcttggggacagcacttccagtaggcagcgattccatgggggtagagctggcattggaagtaagaaatgttaccacagatgaataaacttcccaatcctaaaactttcagacctgaggtagcacatgcatatccctggagaggcaaatagcaaacaattaatgcttatttggaggtaaggcagtagaaaactggcaactggataaccttttaaaaggcattcattaatattttttaaatgataataaataccacgaaagccaaccataacatatctgtgggttacaactggccaacaggatgctacatcacagtgttagaggaactgcttttgtttgggagggggcaggtctagttactgtgcctactacaaaccgctatttcccagtggctgctgtgg

SEQ ID NO: 9003 - DNA, 6000 bp, Homo sapiens
ctgtgtctatctgaggggtgggtacctgtgtgcaggagtgtattggaagttccatctggacaatgatttgggtgacttttaaccttttaagcctgaagcagtctcaagcacctcctctctggcagatcactgtatggggaagtagacaagggctacttaggggaacccagcatctgctggtatctttcccatagctgttcttgtgtcagccctctagcccctgatagattctctttccacctcttgtcttcacccaaagggagggatagcagcatgtctaagactgggaaaggttgggggagatggtgtgggtgtgtattatcttttactctgggccaaatgagtggggtttgccacttggggggctttctgctgccagaggatgagccataggtgagaacatgacttacagggagttaaagaagcaaggcaaggccaagcctcaaatctgccactaaccctggattgcgggccacacacctcacttgcttcacctgtgtcatgggagattgatggtgacttggatgaacagaagtagacctggtgacagttgttacaactctgagatgctcccctattcctttatctgatcctctactatgcctccatttctcaggggggagtcagggccctgaaaagagccctgggcctggtaggactaacaggagttgggatgtgtccccatggagggagagggagctaacttatgctgggaggatggagcaagaccacaatgtagcccatctgtgttctagctcaggctctgtggtgtgaccttgggcacacttcttcccctctctgggccttaatatacccatctgtagtataaaggagttgaacaggaagctatctaagggtccttctaaccataaaaatgctaagattttgtgatgatttggaaggatgaagctgtctgccttctctagacacaaacctcatgtttcagtctctccatctgtaaattgggaagaataatgctgttattggtatatatgttggatctggagatttccagtctgtctaaggagatctccagtcatctcatccccaagccagaactcagaacctcactgcccggtacctcagcccaaggtgagccctaggaatctccatggcaacaaactggttatgaacggggctgcagttgccatggtgacaggctgctctctctttctctctcatccccctcctctcccctccccttttctcaatgaaccagagcgatctttaggcctcagttctccaggtggggtggggatcggggggtgagtgcagtgagaaaggggtccggattgggaaagagggaagatggactgagtctgcagaggaatgaggggctgttggggtgctgttgctatggtgatggggctgcagcctgttaattaaacccccggttgccacggagacagtggtggttgacgtgctccgcagtgagccctgtgtgtgtggggcgtgctttgcgctggactcatcaattcactgctacagttttgggtccgaggatggggcatgcgggtggggaagaagaagagtgaaggagggcattcaggaccctgggcccataaggccacagccagcggtgggtgggttaggttgtgggggtaatgcagtggagatgcggagggagagggattgagccataaggaggaatgctatgcctgcctcctgtgaaaagaggacccagtccggtggctctagcttcctccaaccagccccttgtcctggttcagtggatggagtcccggacaggaggtcaaggggctgggttctagtccctagtctgttacaagttcaccccatgaagaaaatatgaacctttccattttcagactccaatttcacaataagtggagagtggaaaataatttataatatctcttccagttcccaaatcctgacactcaggaggcagcttctctgagcttttttctctctgagacatatggtgggagggggtatgagtttgagagactcagagtttagaaataggaccctccctagccctgcatcttgtgctgctttagtgagagggtttctctggccccagatctccccagggttcttggtggggaggggatgctgtactggcagccaggttcctggggctctgagctgtgggtcactttttactggccagtgccaggctggcagtgtggtgggtgcctgccatgtgttttctctgaacctcaccacagagagttggctggaggccagaatagggcacagtcttcctgagaggtgaggggtgtcagtggaggggctggggtccccccttgggactgtctgctcacttggtcggggctccttaggaagggatatgtggctttggtctgagattaatagagcactaagagttttcagagcaggaagaagtgccatggattatacgacctaactcatttttacagacgggatactgaggcccacagagaggaacctgattttgcccagagatacacagagaatttgggggcagaggatatgacagaaccactatctcctgaatctcagatggctcttgagatgggaactctagtgaaggtggacagatgggttccccagggaaagaggaatcactcctgccttcacccgtactccctagaatctaggtttccccatgcatgggcttagtctctgagtggccaaagctggaccacaaatgaaggaaaataaccccaggggaacatgccagacctaggattactgaaaaaccttagcatctccttcattctacagcacttctctgacaaacatgctacacgtgttttactgttatgcatctctgcagagtagtagaacacagtgctgctgctgctgctagtgctgtgtgtgtgtagagtggagtggcatgcttaaaaatttttgaacactggcttcttttaacctctgtcaccaattcaaactcatctcacccttttggtggtttttttctctgggagagccaagaataccagtgcccacaacttgtctgaatagctaactctccaccctgaaaggtcctttgggtatccaaaaaaccaagtggcagcgatacttgattggtaggtccctcagaggcacttttgagtcagctgctgaaaactccacggttgacccaatctgaagccactgacaaattgtattaatacaagtaaagctgagccctggatcctgtccatggtcctgaaaaaagtcctgtcctataccccggtctccagggatatgaatggctctttaggatttttgcaggttttctggaggcttccccttcagttgcaagccaagagtccattctagccctgcacctctgaagcctgagcacaagaaaaggaataaagcacatctcagatgtagtgcctgtttgtttgtttgtttgtttgtttgtttttcaggagctaataatcagaggctgctgaggggcatggatatgactgcatccttgtctcttctatggaggcaagacgacttttataagttctatcaatgaagagagtcctaaactggagtaaagcaaactggatgctagaccaaattctgccatccactggcattatgtccacaggcagtcattttccctctatgggccttagttttttcatctgtgaaatgaaagctgtgtgtaagatacaatgactgatcttttcccaaccgaagaacttttctggaacttagagagccagggagagagctagtaccagtgtgaagattgtttaccccgatctgctcccaccctcagatgtttagatcttctagagactcaaagctttcaaacctctgatgccacttcctgagatgtctgcaccactggctcaaacctggactctaggggctctgaggggtcccaggatgatcaagcttctgggggattggcctaagggaagaggggaggaggacagagagcatgtcggctctggaagcctcagaaagcaatcctggattaggggattagacacttctgccccaggagaaaatctggtctcaaaccgacaggcggcctcattccgccctcccccactctgtccctggccagcctcaggaccggcctgtcctccctagaggctgcaccatccctgatggaaagtcagtgctccctggaaactcactgctgcctcttctgctcctcctcaccaggtcttatctctagatcagtccgcagtcagaaggtccctggctgtgggctccagggacttgtcttgggggtgggacgctgggactcttgtcagtctaagcacaatgagagagttccttggaacttctcaggcgctaccccacccattttaagacagattgggtcagtcagcccagtgacctgaacgcccctgggggtagcacattgcttaattatgggccctgggctctacatgcctccagctccaatctcttgagcagtggtatgaaagagggtctggttctcctcccccacttcagggctggcctctccagtcttgcagagaggcttcccaagggccccatgttccatggcgcacctccacggccacttcagtgccctttatcttccccctgggggttaccccagacccccagtcaagcagccgctgcggggccgcctccccgcggccgcgacctagttccctgccgttatttttagggcgcgggatggcacctgcccacgtgccgggccccgcccggagagtgggtggggggagctgcgtctgctcaagggaggcgaggccctgtcccccgaagcacccccttcatcccacccacgcaatcccccagtttttgtgcaagggggccactagtcgggctctgcccgcccctcatcttctcttctctctccctcccgctctccccccaaaaccccgccagtggctcacgcctcctgcatacgggatgaggtgagcagcgccgctgctgagagggggcgcgcgcgggtgtgagcgtgtgtccgtgtgcgagtgtgtgtgcgccgggcgggcgggcactgcagcttcttcctccgtggagcggagagcgagacagagctacagcgaacgagagagcggcgaaggcgggtagaggggcgcgggcgaggcggcgcagccatccccggaccaggggccgcgccgccaccatgctaaacaacctgacggactgcgaggacggcgatgggggagccaacccgggtaagctgtggtccgggggcggcgggggagggggcagcgaggagaggaggcagctctggggttagaggcggagcgggggccacctccttcagagaggaggctgggactgacccgggcggtgggcgccagttgcagcctggagctcagctccattggaatgctccgggcgctgtccaaggtgctggaatgcgccgcgcccgggggcagagctgcgggccgggggattatcgctgcccacggcttcgggctgacttgggttagctaaaccgaggaggcggtgggaaggggatagaagacctagaatgggctgatgtggagctcgacggcgggaggagggctcctttccccgacaggggaccccggcgtcctggcgcagagcaggcacccgtggagccggggggcgcagtctgctgcagtccctcgttctaagacttccatctggaagatgggggaagaggtggctgtgtgtgtgtgtgtgtgtgtgtgtgtgtgtgcgcgcgcgtgcgtatgtgtgtgtgtgcgtgtgtgtgtgtgtgtgtgtgtgtagggggtttggagccatatgacagccccccgtccgggctgtggtgtctccttaagacacccagattgtccccttggtgcaatctgggacccctcccccaaggcttcccaaggtccgacctcagactgaagcgtacttcctccatagattttcagctctactttgcagaatctctctctcgctttcccgtgggttcctattcaggacgggaagcaagatcaccctcctttcttccctctttccccctcctctcagttccctggggcggtccagggcggggcgggggggagtctttttagttagctctgctagcttccccagtgaggcctcagaaatggggtcccagtggct

SEQ ID NO: 9004 - DNA, 6000 bp, Homo sapiens
acctcaaatccacctcctggaggagtttcagccttgggattttaagggttttggagtgggctgaggtatagggatcgtcgtttggttgaagaatgcagagtgaagtcacaggacagggagataaagaaatttcgttcttaggctgattcagttcctctgtgggggtcttcaaactggttggtgtctgccggtccactggaattcaggatctgaagaacatcttaagcaattcctaaacaaaaagccttatgatgcaaaggtcagaaatcctatctgtaggaacaatggggatgcaaatggcagtatctagtgccacatgactttcagttacaaggaagtgggccaaagggcagccaaattaatgcttaattataactatgtttctgcccagaacccagcatgtaattctagttaaccctatgaggacaatttcatggcggcacatgcctatagtctttgctactcagaagactgaggcaggaggatcacttgagtcaggagttagaggctgaagggcactatcctcatgcctgtgaatagccactgcactccagcctgggcaacatagtgagactccatcgcaaaaaatacaaaataaaatctcaaagcagaatccacttacaaaacaaactctaaatgtgcaagttatactccctttctcagccctaatccaaccctccatcgtgccctcccctcctcactcctgctaaacttcagggttgccgacagctgagtttaagctccatgccctgctacatgattcacagctgaagcctccttctgggtcttgctgtcttcatcctgcctcttctgatccatcccgacagtcccagggaagtgtagttgttcctggtctgttcctcattagctgtgtcgaaagacaaaatcacaagtttaaagatctcagttggctttatttacaattctaaaattgggcaacacttcgtttcatcaaatagaataaatgttccagtaagctgagaagcagaggttggctttataaagacagagaaggactgaagaaagcagaaacaaagaacaaaaagtatattagttactttagagcaatagaaaaataactggttaacatcaggttacttcaggctaccttttttgtgtaaggatgaaagcagagggaacttcatcatcacactgattgaagatttaagctggctgcttgtctctctcctgatttctggaaaggtcagataacaacttagcttaggttcagtgacctggaactctagcatgggtgactccattttgattttcagtctgttctgttggggactagtgcaggagcttagtccaaaacaatggctggtaaggttgccagatttagcaaaaacagcaacaaatagtatgcccagttaaacgcgaatttcagatagacatcaaataattttgtagtaaaattatgtcccatgtttatctgaaattcacatttaactgggcatcctgtattttatcctgtattttatctaaattctgtgtcactccccaagaaatcaacttgggttctgaggccatctataaaaggaagtttattaaagtggctttttaagggaattttttttttaaatcagagaaactcctttttccatgatggaccccaagctaatgaataggcttttaaaatagtgagtgagaggtttacaacacttaagagacagacattggtgagaagggcttttcagcaaagtcctataattgctgaatgggttcttcctgctcgctgcacagacaaaaccagttcactgagactgcagtattgcagtagagaaagagttttattaatgcagagctagccaagtgggctaggtggagttattcctcaaatcagtctttctgaaaacttcagaaaccagggtttttataaatactttggtgagcagggggatagggaatgggtgctgctgattggttgggggggtgaaatcatcgagatatggaaaacagccccgtgcactgagtctgcctctagatgggagccacaggaccagtccactcatgaatctttagtccaggcggggtcagttggttgccaggatgtgaaagtatgaaaaacatctcaaaagatgaatcttaggttctacaatagtgatgttatctacaggagcaattggggaaattacaaatcttgtgacctctggccacatgactcctgagcagtaaggaattaccaaaactacacctgcattttagcataattcaggcccatcccataatcctaacctcatggactttcattaattttacaaaggtagcttcagtccctgagcaaggagggggttagttttagggagtgattattatcatccttgcttcaaagttaaaatataaactaaactcctctcgtggttggcttggcctatacccagaaataagcaaagacaggtagccggtgaggtcagagtcaagatggagtcaaccatgccagatttctcttgctctctaatctttgcaaaggcattttcagtcccttaagatcacattaaattaaagttagataccatcctcaccgatttctcagcttctgatggttaactgttcaagggtcagaggagagattcaaggccaagggtgataagcctcctagtgtccatgtagatataacctaatctctactttctcctggagatgatccatctcctttttctaatcaagataatgaacaataatgaaatgtgtattcgttatttatcactgtataacaaattattccccaaatttagtggcttaaagaaacaaacatttattatctcatgtcttctaggataaagaatttagcatagctaaattctagctctgagcaagagctcagaatcttgcaaggttgaaatcaaggtgtcagccaggactagagtcacctccaggctaggctgagggaagattcacgtccaagctcaccacaagcttgttggccagatttagctccttaggggctgttgatttaagggctttagtccctcactggttattgcctggaggcattagctatgtgattcaatagcttcgctccatgtgggcctctccattgggaagctcaaaacatggcagctcaattgcttcatcagagcaaacaagtgagagatctcgaaactgaacaacacagaaatcatttataacctaatccgaaaatgacatccaccatatttgccgtcttctattcattagacgttgctaagtgatacttctagtgacatctagaagagaagaggatgccactaggccacgaataccaggagggtctcagtgtaatcagactttttatatgaaggctcagggatccaggcaccagtattccagtgacccagcctcagaagttacacagtgtcactctgcaggctactgatcaaaccagtcacaagcccacttttatttcaagggaaggaacaacgaattctggagccatgttttcaaactgccccagctattattatttttgaaactgtgcaaggatcccctggttcagaggtcttatggatgctgtcatctttgctgagatacctgcttgtgccttcagcatggaagaatgcctgtgtatccacctgtacggtaggggtcgctgtgactttgactggtgagggtacagccactggtgcacatgcaaaggtgcctatctgtgaacacgtattgagaggctggataaggctgcgcccatgtgagtgctgggcttgtacgtgcatttttgcctgagtgagcattagtggcagtgtccccagcctacccctttcctgaatcccaggctcatagccaactgcccacctatttccacgtggatgcctgctgagcacctcaaatgtcacacagccaagacagaactctggatctcctttcccagccacaagctgcccctcttccagtctgtaagttcttacggagcatatatatgtgatctgcctacttttctccaacctcaccacagtgacatgagcccaaaccaacttctcaccttgcaacagcctcccaggtgggaaggctgagtattctggcccttaaccagttagaactccccagttatctgtcctgctgatggggttgaaatctacattcctgaccctggcccaccaaagcccctcccttagctcccatctccctcctctctccctgtcttctcctctgctccagacactctggcttcatttctgcgttttttgtaccccataagctccttcccaccccggggcctttgcctttgctgttccccctgcggggaatgccggatctctgctcagatatcctcttctcagatcagcaagctaaagcagccacctgtgtctgcctaacccaccaccgtagtttaactttctgcctagtctttatcactagctgatatttctcaggatcctttagttacttctttttcgtcttcccctcctagaatgtaaactcttcccctcctagaaggtaaacaaaagacctgttctgttttgttcttcggcccatcccaagcctagcgtagtgcctggtatgtggtggtgtccaaacccaagcgtggagtgaatgagggatgaatccatgagagagtgagcggctccagtgggtatgcgcgagtgtctcactcggtgtagatgtgtgtgttgtgtgtgttgtgtgtgtgcgcacgctggggaggccagacaagtgtggaccagtgattggggcacctcttccctgcaaagaggccaggggaagacagtgcgtgtggggtcttctaccagggaggatggcttgctggtgtgtcccccccaggggaggactaccaacgaaggggacccgggagatggcgggtgggggcccccgggaggacagtgggcgagggagggggtccttgccaggcctggggcggccgggggcggtcctgggctcccctccgtcccgcctccaggcctcggggcctggctggccgacgtggcgttggcggcgctgcgcgcgggagggcagggcaggagggacagaggcgggggcgggccggaaagtttgtccggcggcagcggcgttggggactccggcgggggatgcgcgcccggcccctcagcgcccccagcacgccgccgagtcccgctcgccatgggtaagtcccgatcgggcgctgcctgctggaagcccgaccccttcccagggtgtagacaccgcccccacgctcccctaagagtgcgcgccccctggctcccccagggccgccccggccggataccgcctctcgggtggccagcccgagactgcaggcctgcggcgggggctgggacggggctcggtcgcgcttccttccatcttcctttctgccccggaaaagtggcccctcacttgctgcagcgcccactcgggcccaggcactctcccgggcgccctgatccgacagccccaggcaagtgcagctgttcctggtctgcagatgaagaaatggaggctccgaaagaagcaaagcagttcatcgattcgctgagcgcggttgtgccccaggcgctgttgtgggcctggggacgctgtcgcgaacgaaactgcgaacaaaacagacgaaccccctcctctggacgtgattctgcagagaggggacagagaaggagattctaacacagcattggggtgggacgcgtggggaatggctttgttgccactcgggactagggctctatttttctctctgcattcagaagcctcgaaggatcagtcgttgattcttgagtgagcacctactacgtgccagacattgatataggggttagagcttcagcaatgaacaaaatagacaataaacctctctctcatggaggtggcattctgattgagcagctgggtaaacacgtttatgaataacttcagagagagataaggtgttgtggaacccataaaatggggtggcgtgaaggccaagggcgtgggttccttgggtaggtggtcagggtgggttttctggagtaggacgttttggagctgagaacttcctcagaagcgggtcttgctgagatctggagaaagagcttccaggtggcagcaacagtgcaaaggccctcaggc

SEQ ID NO: 9005 - DNA, 6000 bp, Homo sapiens
cctgactccactgaattctacaagcccagattttctatttttgcttagtaattctagtgcctgttacgtgctaagtggccagggccagattaaaatgttagcatccaaaggtattaaagaaattatgccccactcgttcccatgtataaatcaatatgaaatgataataaatagcaaaaatacatgaagagggctgggtgtggtggctcacgcctgtagtcccagcactacgggaggccaaggcgagcagatcacctgaggtcgggagttcgagaccagcctgaccaatgtggagaaaccccatctgtactaaaaatacaaaattagccgggtgtggtggcacatgcctgtaatcccagctactcgggaggctgaggcaggagaatcacttgaacccaggaggtggaggttgcagtgagccgagattgtgccattgcactccagcctgggcaacaagagtgaaactccgtctcaaaaaaagaaaaaaaaaaatacatgaggagaagtccaacagatcttatttttcctatggcgtggtgggtaggataatggccctccaaagatggccacgtgctaattgctggtccctgtgaatatgttacagggcaaggacgaattaagattgcagatggaaatagggtgctaatcagctgactttgagacgggcagattattctgattatgtaggtgggtccaatgtagtcagaagggtcctaataagagaaagaggggctgggcacagtggctcatgcctgtaatccaagcactttgggaggccaaggtgggtggatcacctgaggtcaggagttcaagaccagcctggccaacatggtgaaaccccatctctactaaaactacaaaaatgagctggtgtggtggcgggcacctgtaaccccatctacttgggaggctgagatgggaatcgcttgaaccccggaggcggaggttgtagtgagccgagatcatgccactgcacttgagcatgggcgacagagcaagactcagtctcaaaaaaaaaaaaaaggggggggtggaggggaagaggaagaggaagacaagagagtcagaatcagaagcagagcatggggtgaggcagtccttggctttaaaaatagcgagtggaccatgagacatgggatgcaagcagactctaggagctggaaaaggcaagaaagtttattctcccgtagggcctccagaatgaatgtgaccctgccaacaccttgattttagcccagtgaaaatctttatcttctaacctacagaactataagataattcatttgtgttgttttaagccaattccttgccataaagctcttaaaatatatccccttttggttctgcttctctgattgaatcctgactgatatacatggtaaccaatttgattccctgtttaataaaagcattaaagatcaaattcttagccaggcacagtggctcatgcctgttatcccagcactttgggaggctgaggcaggtggatcacttgaggtcaggagtttgagaccagcctggccaatatggcgaaaccccgtctctactaaaaatacaaaaattagctgggcatggtggcacacgcctgtaattccagctacttgggaggctgaagcaggaatcgcttgaacccaggaggcagaggttgcagtaagccgagatcgtgccactgcactccagcctgagtgacagagtgagactccatcttaaaatacaacaacaggccaggcctggtggctcatgcctgtaatcccagcacttggggaggccaaggcaggcggatcacgagatcaagagattgagaccatgctggccaacatggtgaaaccctatctccactaaaaatacaaaaattagcagggcatggtggcacatacctgtagtctcagctacttgggaggctgaggcaggagaattgcttgaacctgggaggtgcaggttgtaatgagccgagatcgtgccattgcactccagcctgggtgacagacactccatctcaaaaaaaaaaaaaaaaaaaaatccaaagaagaatggtatttcatgacatgtgaaagtaatgcaaaattcaaatttcagtatccataaagttttgttggaacacagctatgcctatttatattatttatgctgcatgcaaactacagagttgatttgttgctacagagatagtaaggcccacaaagccttcagtatttactgtctgactctttacagagactggtcagggagggcttccctgaggaggggacatttaagctgagacatgaataacaagaagactggagatagcgggcagagctgtctaggcagagacaatggagagcaaaggcagttttctctctaatcttgtaacagtcttctaaagagaagcgttattaaagaaaaaaagaaaaaaaaattgagggggccctgaggctctgagggtgctgtagcctctcagggtcacggagactgtaggtcctgaggaggggttgggaaccagcactgtctggcaccagaatttgtggtgccttatgctgcctccttctcggcctgacacagcattggagcccagaaactgcatgttgaatggctttattcaccttcctcggggaaggaccagggattttagattcattctcaggaataggtgagaagagccaaagactcacccatgggcatgagagaatgttctctgcagcctcatggttagtggtaggcccagaggaggccaagggcagtaggcaagacaacggatagagaagagtagtgaattccagctatgtggagtttccagcttggcgaattccagccatgtggggtttattggtgctggtagaaaatggtagcctcaagccctcagttgacaagtgtggccagagagaaccccactctcaatcctttgtagaccaggtcattcccgccaggctctgtgctaacggaggagagtaggttattagtcccatttaagagccagagaaattaaggcagtggagagtagcagggctactggtttaaaaacactggctctgtgcctgaatcccagccttgtcatttgctagctgtgggaccgcaggcaagtgccttgatttctctatgtctgtggataatgatggtatctacctcaaagctatgtaaagaattaaggaaacaatagcccaacaccacacctgcaggaaggaagcaagtttattattactcaataaacattggtggatcctgatgacattctctcagtcagctttagcagtcttaagagactgcagaggatggagaacccaaggttagagccagatttcttctctacccagttcctcggggccaaaaccctgacaccatgcttaactcctcttttatacgccatagtccgtcagcaaaccttgtcttcagtatgcgtccaggagtccaaccattcctgccacctccaccgtattactttcatccagactgccatcagctgtcacctagattattgcaaaagcctccttgctggctttggggcttccatcctctctctctcgccaatccccagtcaactcccaacaggcagcaaagcttaggttacttctcagttcaaaacccttctaggtgtgctagaattaactgatttatttactcaatgattatttattattgagtgtctactatgtgccaggtactgttgtaggcattgcagataaaatggagaacaaaacagacaaaaatttctgcattcatgaagcttccgttctcatggagggagatggttaacaaacaagtgtatgagtaaaacatatggtaggttaggtgtcatgtggaaaaatagtttagggaaggcggggggccttggattttaagtagggtggtcaaggaggtctaacacacaagataagggttaaataaaaggccaaacgtaggagaggtgggagccaaagagctacccagaagaagagcattctagataaaggctcagtaagtgcaacggtggaagtattcctggtgagtctgggacaatagtggaaagtcaaagtgtgtgggaggggagatatagagccccatgcccccctcccacacacttcagaggggaaaagggggcaggattgagtcctgtacattccccacgttttttttttctctggagattggaagccattggagggtctaagcagaggagtgatgagttaagctgctgtgtggaagtccgtaaggaacaggggtgagtcagagaccctgaatggagccgttgcaattatccagatgagatagagtgccttggatcaggaagggaggtagcaacagaagcggccaataaagttcaaagtcctcagccccagtcctcccgatgggggtctcacctacccctctcacctcaccttgttcctccctgcatccccaccccaccggtcactgctaggcacatagaagcatctactaagcatgtggtgaatcaatgaaccccttaatgaatggtccacccctagatcatcagcatcctttttaacgctaggcatatagtctgaactcaacacatgtttacagatggaatgctgcacagtcctgccaagtccaggcggttattcctctccacagccgaaggaaactaaggctcgggtggggaagtgtccccctggggtctctccgcttaggctgcaggctgggcatcctttttcaaactcttttagcacagcgaagtcgagggcactgggtggagggtgcttgcttgccctcagggtgagtcacagtgacctcagaggagtttccccaaaacgtccccgccctgtgatggggaaaagccggaatctctcggtcccaggtggtcatgtggcccaggccggacaagcgtcccgaaagccccgggagagactaagaagcaatcctcccacgcgctttctcccaccctcgggccactgagacggagggacagagggccgccctcgcgcggccgaggccccgcctcccgctcgcccgcccgcgcctccagcggaagccggaagcaaaagcgggtcctgctagccccgcggctccgaactcggtggtcctggaagctccgcaggatgggggagaagatggcggaagaggagtgagtgggctttttcccgggcggcggaggcggcggggctgggccccggcgggtgacagcgagcgcctcaggccgccctccggccccggaaggcggagcttcttttgctggttggccaggactgaccaagccggtgcctacgaggagggcgggatgggcgggcctgggcccaggtgggccttgctttcccctggagatcggtccctcgagctgggaatctactgcccagcgcaggcccggagagctgtcttgcggaaaatacaaaccatatttactttcccagttttcggtaatctcatggttactgagccctcttccgcctcctccaggaagtcgtccgggttctccacacccacctcctacgtagccagtcgcctcctgtataacgatcagttttcatgtctttctccttcactaagtttcatttagtcattaactgttagccatctactcaattccaggccctgggcaggtggtaggaaaggaggccgaccaggagccgctctctgggagcttccattctagtgggaaaagaagaccataattagtcaaggtggtttcagatcgtgattaattaacgttatttgtgcctagtgttccattattggaacgctaagcatgtgggagttatttatatcctactgctcaaggtcatcgccaaggtctgatttttctcacgtctgcagttctaaaaattgcaacctctggcatgaatgggttaagtgttctgaaggaagcaaaatagagttaaggttggggagtccactcaggaaaaagtgacattcagcagaaacttgaatgaccagaatgagggataggagaaataacatcaggttcaaaaggcctggctcaagaaagagtttagtgcttttgagtgacaggcagcatggctggtgtgtagagaggaagggggttagctggacaaggggagatggggaaggacgggctgtgtcctccaggta

SEQ ID NO: 9006 - DNA, 6000 bp, Homo sapiens; identical to SEQ ID NO: 2170

SEQ ID NO: 9007 - DNA, 6000 bp, Homo sapiens
cttgaattgcctccctggaacttccatagaagacttcccttacatcactgtcaagtattggatcatgtagctacctggtcttcaagggaggctggcacattagtattgcagctggacatgctcttgccccagtaaagcaggagtccattggtgaggaagaagagaataggtattgtgtggacaacccacagccctgacttctaggagtaagtaatcaagcaagggaaagagtatgccaaagaagcctggtgcacaggaggtcttctgtagtccttaatttggaccctattcccctaaagctgaacttgtgacagagacttgggagcatgtaatttatttgagaggtgatcctgggaaacaggtctgagggcttagagagaatgagatggatacggagcaaaagccaattataagacacattatcaagcagttgcagtaggtgatggaggttcaggggatatctgggaagcatacacagcatctgccattgtccacctgcaggatgggggagctgaagaatgtatctattgcctctggccctcattagttgagcgttgcccctggggtcatttactcccccctcatttccaggttgaactttgtcagatgaggaatgccacacacacacacaccagggaagactctggggcagaatgtgttcgtcacccttaaagtggcaccctggcagtgtaagttgaatctgagctcccacggaactgggggagctgtccagcaaacggctgttgaaatcagaggtaagctgggtgcagggacacaggcatcagcagcatctgcccctcatgaaaagttcatatttataataaaatctaatcgttgtgttctaacatgactgctggccaaactgtcccccttttcgtggcatggatgtgacctctaattatgcaatattctgcatgtcatttttaaaacagctttgttgagatagcgtcaatataccatacaattcacctaaagtggacaattcaatggatttttagtgtattttagtattttcactaatgactaatcatattgagtcttttttcatgtgcttgttggacatgtgatatcttcctcggtgaaatgtctattcaaatcctttgcttccaatcattaaattgggcaatatgtctttttgttataatattaaattgtaaatgttctctatgtattccagatacatgtcccttatcagatatctgatttgtaattactttctcccattctttgtgttgtcttctcatttttgtggcatcttttaaaacacaaaagttgttaattttgaggaagtccaatttacttttttttttttttttttgagacagtgtctcgttcgctctgttgcccaggctggagtgcagtggtgcaatctcagctcactacaacctctgatacctgggttcaagcaattctcttgtctcagccactcgagtagctgggattataggcgtgcaccaccacacctggctaatttttgtattattagtagaggagacagggttttgccatgttggccaggctggtcttaaactcctgacctcaggtgatccacctgcctcagcctcccaaagtgctaggattacaggcatgagccaccatgcctggcccactttttttttctcttgttgcttgtgcttttgagagtggggaaggagtactgaaccctgtcagcttgtcagcaaggagaaagggtggtaaattagtgtatgaaatttaagaaaagctgtaaaaaatagttgacatttaagctggatcttgaagaataaggagggtataccagtcacaaaattgaggaagagcttttcaggcaaagagaccacctgggttcattatctcctagaataagaatctccttgttacatttattataactgattcaaaacagacacccccacatatgccaacaacatacggtaaacactgacagagactgtcatgtcctacaattgttattaataaagccaattcattcatgcaagattcagttaaaacgtaatgctgcatctgtgcaactcccccaggaaagtgggaagtagtgtttggagaagaccaaataaacactcatgagtgatgatgatacctctgaggacacagattttaagtactaggtcccagctgctctctttgaaggatgcacacgaccagagaatgaaagcaggaaaaggtggtcagtgctcagcacgtgccaagcacagagcaggaaaagacctagtagataatgaatggtccctgccttatagtctagctttacatgtatgactcatgcccttgaaaccacagactggatgtgaccctgagggtaagagaagttcccaaaaggattaagaatgtgtttttttccaacctagaagaatggtggcttggcatcagaaattaagtcgttctgttgaaaataaacagaagtggaaatgtatattcagggcaacttaaactcatgctcttgacaaaatatttttttaaaaaaagcaaataaacaaaagtatttctcatgcccctcagttcatagacagaaactcataccaacaggctttttttttattttagtaagaactgccaaatggtgaaactattcacaaacactagaaatgcatgagagtgtcctcccgatattcttacctgaattttgcatctttttatctcttgtcaatctagctgggaaaacgatattaaaatctcattttgactggcatttccccaacttcctagatggcttcacatcttttcatgtttattaaccatttgcatcttctcttcagtaaattattatttatatcctttgcccaattttcttaggggtaatttatctttttctagttaatgtgaaagtagtctttgtatgtaagagatagtaactttacctatagcaaatattttcattctgtttttcttttaacttagttcagggtgtttttccatactaaattttggattgctcatcttgcttaagatctttccaccccaaggatcctaagttttcttctatttccatatgcatatttttaatatttctcacacctacacacacatacatagttacatggagagatggatcattaattcacctagaatgtgcgtgtgtgtgtgtgtgtgtgtgtgtgtgtgtgtgtgtagggatgagaagactcagtgttttctgagttcatatgatctacatggggaatcagatctaacatggaccaagtgttaaaccatacttccaagaacaacactacattagtaggccacctgctaacttctgcctttcacattttccagcttaaaacatctccatcctccccattatgtaagaaagaagtacaggtgtttctgactgctccctctcccatgatcccataacccatcagttctgaagctgcattatccaaccttctgaatctctctgaccaccctccaagtcttccaagtccccatggccactcccttgctccaggccaccatcatctcaccctgggtctttgcaacaccctctgccccggactccctggcctacatgctcagtctgtctaattcattctccaccctgcaaccaggaatatttctaaaatgcagaccccatctcattcctgccctacctatgtttcttccacagtccccattgctgtcaaggtactgtccaaattctcacatctggctgaggctgtccttcaggattcaggcacctctcaactttttaagaaactgtgcagcctcatttctcagattgtgtctcctatttccatgctctgaccagagcagactactttcagcactttcaaaagcccaagattctttttcagtggagctcaactgtgactatgccccagctcacctgtcaaaaattgcaaacacacttgttcaggtcttacacctgggtgattctgactccgcgggtcaaatgggatctccacatccacaatctgtgatgacttctatggccagggtgctctctgcctccaggctgcagacgtgtgattccctctgcctggagtcctcttctacctcctccagctccagcccccaccccaccacccaccccaaactggatatgacctcttcctccttgaagtcaaagcataggtgctccttcctccaggaactttgacagtccgggttagggctcttcctctttgcatccctggtttcctggactttcctgattcaagcatttattgattcctcttcttccaccccagactctgagttcggggaagcctgagatagtggctgttgtcttgctcaccactgtatttcctgcactcagcagagacctgacacatagtaggcgctcaataaatgtttgctaaacaacaacaacaaatgaatgaactaacaaataaacaaacaaatgaacagatgagtggatgcctgtggcagtttccatgacaaacacaaagggctaagccaagccagcaagcagacagccgtgcggcctgcagagggcactagtctgcttcttaatctccctgcagaatcctcagggccaggtacctgctgtcagtcagagaggtgcccgatgctcagtggtcattctgctgcgctgaagattaagtaggagttgtttgcccttggccaatatgaaaaacctgagtgttctcccttcacttctagcgacaagtaacacatcccctgtcttgccatgaaaagagctgtaactgtagcagccggtggcaggttttctgttcccaggtggggaagtgaggagagacaaacagaggggtgagagggagacagaaggaagacagctggtaagagaccctatggtgtattttttctatgtaaacaagataaaaactgctcctcctggaacagcaaagttctccctatgtctccaagctacaaacttgcatgctagctactaactagctactctccctctctctctctcttcccccttcgctctttctctctgtgtgtatgtctctctctctctctgtctcttcctccaccctctctcactatctgtctctctaccctccccatccttttattctagaggagaataaactctaaggccagattgaatgagcatccaaaagacgtatctggagggagattttgtctttcctgtgagcagcagcagcttcctacggaccctgctggagccccagctcggatcagcccttctgacagcaatgaatgcttcgtgctgcctgccctctgttcagccaacactgcctaatggctcggagcacctccaagcccctttcttcagcaaccagagcagcagcgccttctgtgagcaggtcttcatcaagcccgaggttttcctgtctctgggcatcgtcagtctgctggaaaacatcctggttatcctggccgtggtcaggaacggcaacctgcactccccgatgtacttctttctctgcagcctggcggtggccgacatgctggtaagtgtgtccaatgccctggagaccatcatgatcgccatcgtccacagcgactacctgaccttcgaggaccagtttatccagcacatggacaacatcttcgactccatgatctgcatctccctggtggcctccatctgcaacctcctggccatcgccgtcgacaggtacgtcaccatcttttacgcgctccgctaccacagcatcatgaccgtgaggaaggccctcaccttgatcgtggccatctgggtctgctgcggcgtctgtggcgtggtgttcatcgtctactcggagagcaaaatggtcattgtgtgcctcatcaccatgttcttcgccatgatgctcctcatgggcaccctctacgtgcacatgttcctctttgcgcggctgcacgtcaagcgcatagcagcactgccacctgccgacggggtggccccacagcaacactcatgcatgaagggggcagtcaccatcaccattctcctgggcgtgttcatcttctgctgggcccccttcttcctccacctggtcctcatcatcacctgccccaccaacccctactgcatctgctacactgcccacttcaacacctacctggtcctcatcatgtgcaactccgtcatcgacccac

SEQ ID NO: 9008 - DNA, 6000 bp, Homo sapiens
gaggctgaggcatgagaatcgcttgaatctgggaggcagaggttgcagtgagccaagattgtaccactgcaccccagcatgggtgacagaacaagaccctgtctcaaaaacaagagactaaatgactacctaacaaataaggctttttcatggcatgtgtcagtataagtcttagaactgacaagaaaaaacctttacaaatgcacgaagtatttcagcagaaatttcacagaaaaataaatccaaatggccaagaaatatacaaaaagattcaagtacataagtaatcaagtatggtagacagaataactttcccctaacaaaagatgtgcacgtcccaatccacagaaactgcgaatgtgtcatgttacaaggcaaaggaatgaaggttgcagatggaaccctgtgaccttcaaaaagttccttttggcctggcacagtggcttactcctgtaattccaacactttaggaagtcaagtcagaaggatcgcttgaggctaagagttcaagaccagcctgggcaacatagcacccatctctataaaaactaaaaaaattagcaggatatggtggcatgcgcctgtaattccagctattcaggaggctgaggcaggaggattgcttgagccttggtggttgaggttgcagtgagccatgatcatgccactgcactctagcctggacaacaaagaaagactctgtctcagaaaaaaaaaaaatagaaggacactgttaaataggcagtaaaaatcaccatgacaactcaagggagagagattacgaaaagaagaaaacagcttcatattttaataccttgaaaggcacttcttgcctgcttttttaattattattttttattttactattttattttattttgagactgggtctcactgtcgcccaggctggagtgcaggggtgtgatcatagttcactgcaatctctgcctcctgggctcaagcaatccttccacttcagcctccggagtagctgtcactataggcgctgtcacccctgagacagcaagaacaacctttcctcttccttttcctcctcagccagctcaatgcaaagatgacaaggatgaagaccttttttttttttcttaagatggagtttcactcttgttgcccaggctggagtgcagtggcacgatctcggctcaccacaacctccgcctcttgggttcaaggggcctcaacctcctcctcaacctcctgcctcaacctcctgagtagctgggattacaggcatgtaccaccacacccggctaattttttgtatttttagtagagactgagattcaccatgttggccaggcgggcctcgaacttctgacctcaggtgatcagcctgccttggccttccaaagtgctgagattacaggcgtgagccaccgcgcctggccttatatggctgcctttaatgtcagattctcaagttaagatcataaaagtcagtcctacatttctctgctaaagacaccatttagagtcggggtaaatagacactcttggccaggcgcagtggctcatgcctgtaagtccagcactttgggaggccgaggcgggcggatcacctgaggccaggagtttgagaccagcctggccaacatggtgaaaccccgtctctactaaaaatacaaaaattagccaggcgtggtggtgcactcctgaggtcccagctactcaggaggctgaggcaggaggatcacttgagcttgggagacagaggctgcagtgagctgagatcacaccactgcactccagcctgggtgacagagcaagattccatctcaaaacaaacaaacaaacaaaaaactctcatttgctgtactctgcaacctttatggagtgaaattttgccatttattcaaatttacaaatacacatatcttctcactaagcaatttcactttgaggaatttattacacaggcatacttaaacacggcaagtgacagaaatacccgctggttcatcacagcatggtttatgatcacaaggactggaaaataccctaaataccctaatggtccacccacaagggattggttaaagcattacagcaccctggaatacactggaatgctaagcagattttaagaataaggaagatttttgtgtacatattcagaaaactctaaaatataatggaagcaaaaaaagtccaggtgaagaacactgtgtatactatgccccacttgggtaaaaacagcaatgaaaaccgttcataggaatttgcctgcacacatgtaaaattttctagaaggatatgcacaagcaacgggtaacagtgtttgtctctagggagaaaaaaatgaggagaactggtcactgggataggaaggaagcttgtcattgtgtagactttttgtacctttaaaaatctgaaccgtgagaacacattatctattcatgaaaatgaagaaattaaaataaatatagttcatgcatgagctgctgctctagagagacaaagagagctgacacaataagaaaaaaacaaaactgtcacaagttcaggcaggcagcagctccaatacattttgttaaaagcaaaagtttcttcacttttagaagaagaaaaaaagaacctaaagtctataattacagtattatatttactgtcaaatttaaagggaaaaacaaaattacctttttctcttctctaataagcatatagcatgaatcacaaactcaactgcccatgaagcctgggcaggaaacttaaatgaatgaagaaggcctggtgacaagaaaatcacgggcgctttgggaggccgaggcaggaggatcacgaggtcaggagatcgagaccatcctggctaacatagtgaaaccccgtctctactaaaaatacaaaaaattagccaggcgtggtggcgggcgcctgtagtcccagctacttgggaggctgaggcaggagaatggcatgaacccgggaggctgaggttgcagtgagctgagaccgcgccactgcactccagcctgggcgacaaagcgagactccatctccaaaaaaaaaaaaaaaagaaagaaaatcatgggaaccatgaggaagtcgagatcagatgccatctggaggtggcactgtcaccgggtgacagaggggcttcaggcaaggcatctctacaacatcccagctaacgtgtgtgccctctctgtgcaccaggcactgagtgaagccctttccaagaactgtgtcaaagaattatctcaacaatctcatgggggaaactattattatcttcattttacacatgaaaagaccaaggctcagagaagttgagtcactacttccaaatcacacagctggacttctagggccaacctgacagacaatctgcacccttaagcactcttccccagcttcttgcagacacttaaatggaaggattcccatccaggggcactttaggacctccctccaacagaccctgttactttcacagctataactccatcttatgtaataaatattttttaatgcatatgtgtttaatatcatttctgtgcctgtgtaagagcttggttgagttgaattgcagttgactaatagaatattacatcttttgtaaaatatatttctttttctttttctagagagacagggtctcgctctgtcacccaggctggagtgcagtagcaccatcgtggctccctgaaacctggacctcctgagctcaagcaattctgcgtcagcctcccgagtagttgggactacaggtgcatgccaccacaccaggctaatttatttttatttttgtagtgacagggtttcgctatgttgctcaggctggtcttgaactcctgagctcaagtaatcctcccacctcagcctcccaacgtgcttggattataggcatgagccattccacccagccagaacatctttattgaagtataatttacacagcataaaattcatccatgttaagtgtacagtcccacgagttttagttacacagctgtcaccatccctacaatctgggtttaggatccttccctcaccccaagacgttcctcccactccttggcagtcaatctcatttcccactcccagccctaggccaccacggatctgttttaggtctctgtgattttgcctattctgggcacttcatgtagctggaatcctccagtgtgtgacttttgtgcctagattttttcaattggcataagagctttgagattcatttatgttgtgcatgtatcagtagtctgttccctttaattgttgcattgcgtcccattgaagacttgtgccacagtacgtcccagtttatgggcattcctaattgttgactaatatttataagatctctacaaacattggtgtcttcacattttagtctttgagtgtcgagcctttgtttctcttgagaagctaccgaggagtggagttgctgggttgtatggttagtgtatgtctaacttttcaagaaactgccacaccatctttcgctttacattcacgccaacaatctatgagggtcagaggactttttattaaacatgtactaatatcaattctcatatttattttcttctttggagctaacacgtaaacatatctataattttttttcagatttcacccatttctgcagggagaaaagctcataagccacggccctacgcccacctttgtgcccgcagaataaggaaacccgccaactacacaccacagttagaaagcccaagaccctgaaaagacctgcacccacccccaaaggggcggggctggtgggcggagaggaggcggggcgcgctccttcagccccgcccaccagccctggactccggctcccgaggagcggagctagcgggtgagccaaggggatgtgcacaggcctcctcagtcccgcccagcgcgcgcgcgcggcggcgaagccggcgggcggggccggggagggccctcgccgggtcagctccgcccaccctccccggcctccgcccgcctcccgggtcagcggcgcgggtgctgcgcctagctgcgcaccatggccgggttgctggcgttgctgggtccggcaggcagggtgggcgcccgggtccggcctcgcgccacctggctcctgggcgccaccgccccctgcgccccgccgcccctggccctggccctgctcccgcccaggctagacgcccggctgctccgcacggcgcgcggggactgccgcggccaccaggtaagcaccccaccccgaccctgatcccgggcggtgtccaggtccccagacgtccgcagggccgcgccggggtccggccgcctccgccaaggacgcctttgcacttgtagctgcccgggaccgagctcttccagggtccccgaaaccccaaatccctgcaagccaaggaagcgatcctcctagttgacagccagagaaactgaggctcgggaaggtgtggcgctctgcccaaggtcgcgcagtcttcggccgagccccgggtctgcagagcctcagccaggctggggcgcagccgactgacttggtctgaacttccacacgttgcctgcggagttgttgtccaggccttctggctgggtctcgctgtgttttgaacacctcccgacgctcgctgctcctcccttttcttctgagtggaagagcaggcgtcctcagggaagccgcgggcaagaaacccacagtgctgtttgttatgtttcatttccgtcactttccattggtgctaagtgaaaactggttttccttcagagcagtcataccagctttcctttcaagaaatctatcactttcttccaagtgagtctttttaaataaaaatagtagtaaatgaagtctggcggtccaggaatggcaagcccagacacgcggagccggcgtccagcccggagcgcatccggcctggcagtctggagcctctttgtttgcctgggtgcagacagggcccctccattcatcgcccggtgacctcagaccgagtcctgaaggcttttgagcttgttttctgacctttagagggccaaaaatagcac

SEQ ID NO: 9009 - DNA, 6000 bp, Homo sapiens; identical to SEQ ID NO: 3358

SEQ ID NO: 9010 - DNA, 6000 bp, Homo sapiens
acaacataaatggaattcacacatttagcagaatctcaagcagtgtgtttggctgtgtactttgtgtggctgagaaatgaccaagagcacagaggtgcacgggcccctgggtaatggatgatcagggacggagagagcagatgtggatgtgtggtgaggaggtctgggaggaggtactagatacctctcaggatgggtgtgaagacactggtgtctcggccaagcgctgtggctcatgcctgtaatcccagcactttgggaggccaaggcgggtgaatcatgaggtcaggagttcgagaccatcctggccaacatggtaaaaccccgtctctactaaaaatacaaaaaatagccgggcgtggtggtgggcgtctgtaatcccagctacttgggaggctgaggcaggagaattgcttgaacccaggaggtggaggttgcagtgagccgagttcgtgccactgcactccagcctgggcaacagagcaagactccgcctctaaattaaaaaaaaaaagacactggtgtctcatgtgaatgcccactcaaagacatctactgcagcagcaactctattaattgagtggacaagagggcacattctgcagacaacagtcagtctttcccacagctgtgccattgcgtgctcaatgagcttatttatgcagtggccatggtggcaggtgtggaggctctgtatgggcttaggaacatgggcttccccttaccaaagtgacccggcagaagagaccaacactaaagctttgttatggcaccattccctgggggagggcagaggagctgggaaccagtgttaaaaaacctataaatgtggccaggcacagtggctcatgccattaatctcagcactttgggaggctgagacgagcggattgcataaactcaggagctcgagaccagcctgggtaatgtggtgaaatcccatctctacaaaactttcaaacattagccgggtgtggtggtgcctacctgtagtttcagctactcgggaggctgaggtgggaggatggcttgagcccatgaggtagaggctgcagtgagccaacattacaccactaaactccagcctgggcaacagagggagaccttgtctcaaataataattaaaaaaaaagaaaaaacacaacctataactacttggatatgtaaaagaacaaaatagaacttataggcttaaaaaaaaataaacaaaatgaaaaactcctgaaacaggtttatcaatagcctaagagataattagtgactagaagaaagatctgaagaactatccagaacgtggaacataaagaggacagattaagatgtgatagagaggttaatagacatggagaagggcacaagacttttctctttttctttcacaatccacagtaataaatgtattttagttgtgactcactccatagatatgtgtatattaataaatacaactgaaacaaaagattcatgaaataatacaatacactccaatatattatattctcgttctttctcaacactggtaacaatctactacattgattttataagccactgttggaaaacaacctacagtttgaaaaatattagttgaataactactaatcacactacaagatgtaaagagtgagagaacgaggttgagataacatttatttttatttcttctttttttgagacaggatctcactctgttaccccaggctggagtgcaatggtataatggttcactgcagcctccacctcctgggctcaagtcctcccacctcagcctcctgagtaactgggattacaggcatgcaccaccatgcgtggctaatttttttttttttttttttgtattttttgtggagatggggttttaccatgttgcccaagctggtcttgaactcctggattcaagcagtctgcccgccttgacctcctaaattgctgagactacaggcatgaaccactgtgtccatccaagataacatttaacagagatattgtcacgtatgatacaacacggatgaactttggggactttatgctgggcaaaataagccagtcacaaaacgacaagtattgtatgattctgcttacaaaaagtacctagactagtcaaattcacagaggcaggatgtggaatgatggttgccaggggcttaggagagggagcatggggaatgattgcttaaggggtacagagttctagttttgcaagatgaagggagctctagagatggatgatggtgaggtcgcaccacaataggaatcttgttaataccactggatacttaaaaatgatagagagtaaattttatgtgatgtgtatcttaccacaataaaaaagtaaaattaaattgaaaaaaaaaaagtattgtctgagagttttcaagaataatgaaagacaccaatcatcaaattcagaaagcccaaagaactcaaggcaggataaataaaaagataacagcatgagctgggcatggtggctcacgcctgtaatcccaactttttgggaggtcgaggtgggtggattacctgaggtcaggagtttgagaccatctggccaacatggcaaaactctgtctctactgaaaacacaaaaattagctgggcatggtggtgcgtgcctgtaatcccagcgactcaggaggctgaggcaggagaatcgcttgaacatgggaggcggaggttgcagtgagctgagatggcgtcactgcactccagactgggggacagagcgagactccgtctcaaaaaaaaaaaaaaaaaaagatacagcatggtaaaactgtagaacatgagaagagggagaaaagaccaacaacctatgaaggaacgatgttaagattgtcactggactcctgaggagcaatgagggggaacaggcaaacagtggatggcaatcaagtgtgctgagagaggacagctgtcattcaagcaagcaagccaaaatatctgtcaagaacaagggcaaggccaggcgcagtggctcatgcctgtaatcctagcactttggcggctgaagcaggaggatcacttgagcccaggagtttgaaaccagcctgggcaacatagtgagattttacagaaaataaaaaaattagctgggcgtggtggtgcatgcttttagtcccagctacaccggagtctgaggtgggaggattgtttcagcctgggagatacaggttgcagtgagccacgatcatgccactgcactccagcatgggcaacagagcaagacctcatctccaaataaataaataaataaaataaaaacaacaaaaggcaaaaatgaatccatttgcagatgagcagaaactgagaggatttgcaccaacgaagctacaaaaaaataaaatttaaaggatttacctcaggcaaaaggagagtgatcctgttggtgaaagctgagatgcaagaagaaaaggtggataaaaatggtaattgtgtggctgaatctaaactaatgttgactgaataaaacaatttagtaatgtctcttggggttacagtggcaaaggttaaacttaacatacactacattaaggtgtataatttagaggatgggtgattaaagtactccaaagtctttatattttaaggaaacagggtaaagacatttttacaaatatttaaagatattggactttcacaaggtaagtatgcatgcccaaaagtttgaagtaaccactaaaacttagaaatagagtatacaggtgaagaaaatcagaatgagaataaaaataaaccctaaagaagaaaggaaaggggaaaaaaaccaggcaggacaaatagaaataacaaaatacaatggtagaaataattccagatatatcagtaaatataataaatgtaaatggactaaatgctccagttaaaatacaaagactattcttttaaaaaacctttttatcatgaaaaatttcaagtatacagcaaagtgggagaaacagtacaagaaaaccatatacctgcgatgtagagtcagccattgctagcaatttgccacatttgtctcacctatatgggtatgtataggagactattaagaacacctatttaacttccatagtaaacataatataatgaaatacaatttaaacggtaatcatgatgtagagtatccacttttgaggtcaagcagatctggattctccagcaatttttaattatttaacttacgtgtgtggttatttattcaaaagatgtctcttcactaggctatagtaaaaggattggaatcaggttcgcttttctgatcattgtatttctaaatatttgttgcataaacaaatagaatttactagtaaagaattcagcacagtgccagttgcatagtaaacatttaacgtagagtagcttgtatttattgtagttgctgttgttattggaagcattcagtagagtgatacaaaataaataagcaataattggtagtttattatatttataattattatttacaagacgtcacagtgcctagcccatatcactcacccataaacattatacttatactaagtactttcactattattcaaagtctctaacagtgcctggcactacataagcaagagaaaagtggaagtttattctaattgttattattgaataaagcacttaacacgaagctggcccccagcgggcccttaatagtttccgcggtggctgtcgtagctggactacagaccccgcctcctgagcggcccgaagccccgccccttactgccccgcagtcccgcccccgtggcttgtgccgcgcctgcgcactgtcccggaaggggctctacgcgcgcagctttagtccccgcccctggagccggcggcgcagggcgcagcttcccgccgccagagcgggccagcctgctgcgtgcgtgcgtgtgtacgactctgcgtgcgtgcgtgcgtgcgtgcgtgccgtcagctcgccgggcaccgcggcctcgccctcgccctccgcccctgcgcctgcaccgcgtagaccgacccccccccagcgcgcccacccggtagaggacccccgcccgtgccccgaccggtccccgcctttttgtaaaacttaaagcgggcgcagcattaacgcttcccgccccggtgacctctcaggggtctccccgccaaaggtgctccgccgctaaggaacatggcgaaggtggagcaggtcctgagcctcgagccgcagcacgagctcaaattccgaggtaagccccagaggccgccaccttcctgcccgcggcctccgccccagtgctggaaggacggagcccggcgcggcgggtgacgtcggccctcgtccccaccccgacggcgctgtcgcggggggcggcgaggccgggccgggccttggcgctcgccgcgctccccagaactgcccggagtggccgggacccgagagggctggtgcgggagccggggcctgcgcctcctccccgacccccagcctcctgggacttgccttcgaggcacttgtcactttgtaacttaccagtttgtgatcctctctagtgtgagcctccgccgctgcctttgcctagaagtttcttcccctgctccgtgacagtgttgacctcagggcttagttgaggtgtcagctgctcagagaggcctgctgtgaccacccagccaccgtgcacacctgctgtcattccctattccgtcactgtttcgtggtcagcacggcacttttcatacccaaaatcactgtttcaatactagaagggaaactgcatgaggacaggctcttgtcagttcgctgctgtgtacccagcacacattatacgcctagtaaataaatacctgttgaaccaacagatgaacatgttgaaccaacaaatgaacctcctcaggacttctgatgggattgggcccattttcctttcactgcgtccctcatgctgtctcctggttgcggtgcaaggaggctgccacggtgctgggatcctttttctccgcagagctgtctggagcaacacctgcggcgatgggaagccatgaccctggtttctcccagatact

SEQ ID NO: 9011 - DNA, 6000 bp, Homo sapiens
atgcccagcttggttcaacttagagcacctgttttctgctgagcgtcatttgagatcggctggcatgggccagagggagctgtttcagggcctcaatcaggcagtgacatgatcagatttatgctttggaaaggtcactgtggctgcaggatgaggagggaagagacgggtggttgttagcaggctgctgggaaaatgtacacgatgagaaccagaatttgggtagagacagtggagatgcaaattccctgaaggcaagagttttgctgtttcattctttcagcagtgcctggcaagagataggcacagccactggtagatttttagaaatgcctactgtattgaattgtctggtattaaaagctacgggactccagacaaaacaaaagtgttgcctctctccagagtctcccttcttgggagaggcatcatagctgaagacagacccagatagggagttttctgttgttggaaatactcaaggttttgaggaactatttggggacacagaacacacaactcctgttacccgaacctggcccgaatctgtctgtcagatctgtgcagacgagacatatgttaggcctgggggcttttgctgcttgataagcaaacaaccatctgtctttctataggtgggagaaagaccaatgttaaaaggtgtctttgagatggtttagccccctcttccacatgagtgtgcactgcagacacatctggattcccaaggtccagaacaagaagctcggaaacgtgcttagatttccaagtgttcagttctcaataccatgccattctctttggagtttatgatgccttccagggagagcagagcccacgtgagctttccaacagtaagactactgctgtaataaatcatattgcccatttgtggcgcacttactctatgctgaggttgtataagggcttacatgagccctatctcatttaaattgttttcaccaaagggtgtgtgtcccactgctgacctgttgagctaaccatcccctctcagtacttgaaaacctgcacctgcccaagccatggcctggcttcaatggggcttcctcctgcactgaatgagatgacaagaaaacaatgaaacacttgtccccaaaagtgacttattggattcgttggcagaatgttagaaagtgggtatgaagcccaagaaacaggacacggagcctcaccaagcccgaggagtattaccgaatcctagcccaggccaagaatgagtcacaatgaaagcttttaaaatgtaaaaccatcaacctagatttcaattccaaggaaacacatacttggccatgggggaatgctttaaaaaaaaaaaaaaatcaagcttaagtcacttgacaggaaaataaaacagccaaggaacattcaaatataatgatttacatccttccccaactcccttccagtgtgggtcagggcgaacatggaccatggacgtgactggagccaggggtgcatgccctctctgggctccctcttggttaacactatttcaggcacacaatcccatacctaaacacagcctgcttagagctgcaccgtgctgcctttggggcctggtcagagctgcacggtgctgcctttggggcctggtcagagctgcacggtgctgcctttggggcctggtcagagctgcacggtgctgcctttggggcctggtcagagctgcacggtgctgcctttggggcctggtcagagctgcacggtgctgcctttggggcctggtcagagctgcacggtgctgcctttggggcctggtcagagctgcaccgtgctgcctttggggcctggtcagagctgcacggtgctgcctttggggcctggtcagagctgcacggtgctgcctttgggctgctatgccaacttcttggattttcctgacctccccgctgttaggctcttgggttgcttggggtggctgttttgggaataccaggatttttcttccattatttgtgtgcaagcagtgttcatttcgctcaaagaaatggaagcttgattgatctcctaaatgtaagaatgagattgtcctgtaataaatatttaagactgaccaggaaaggcgaccaccatctgctgaaacacaagaccaggaattactttgctaagcttcctgaacggagggaatgaatgaataaccatcctatataatatttgctcagcacctggtagtttacaaagagttttcacttaccttatttgatcttcacaataaccccagagaagtagacagggcgcggattacgaggattacgaaaaacccacatttttttctttttttcttaacagataagggctctaaaggcttaaagtcactcgagggaggtcagagagtttggggactaaatctcgagtctctcattaattcatgcacatatttaaaaaatatttatccggagcctgttccaagccagatgagatggcagtgggtacaaagatgaataaaacactgtccctgcgtaggaagaagatcacgttctagcctgggggagagcgccaggaaaagtaaacaggtccccccctgctttgtgaggtgatgagtgctggggagataggaagagagtggggaccatgtttctaatctgattctcctaccgacgaccagctcagttgttatttacaaatacctgtcccctaaaggggggagcggggttgggggggcttggccgtgctgctggggtcagagctcgcaggggggttctgccgcagtgtggggacaaactctcccttattgggcaaatatttcccggggcgctacgctaagcacacgggctccccgaatttccctccccagggcctctctgtctttggatggcctgtcagcaagtccctgcagcctccagcccggcccgcgcggcgacccagtcccctgtcgcccgaatcttccaccgctgcgaagcgtccccgggcgagcgccctgctctccgcgctgcgcggaagccagagccggtcctcacagtgaactcgcccagccctgctcgcggctctctcgattttatgtgggtttcgttggatgcattttgttatttgcctcaatggatgtttcacattaatttttagttgcacaacgaacgcgcgggaacattctccgtgagagaaaaagcacgggtggggggcggttaccggtgcttcccccggtcgcctgggggtcccgcacgcgccccgcgggtgccgctgtctggctggggtccctgggtgagccgcgggcaccggcttcgcgtctccccgggcgcgactccgctttgcaagcgctcagcacacgggaaaccctcggaaaacacacacgtgtgtaaagtttgttccacgcagaaacaaaggacgcgtgggggccgcttctggggcctcggtcctttgttggaaccccgcaccgcagcccggcccgcagcctcgccccgcaaggggaagccggccctgcacaggcccggggcccggaaggcgccgccgcacagctctgcgcccccgacccgctccggccgcgcgctgggccaggcccttggcctcaagcctcccgggcggctccgggccggacccgggtctccgtcgcgggacgccagcctgtttgtgggtgccgtgctcgggcccgggcggcccctgcccgacgcggccccacggagcccctgcacgaaccccgccgacctggcccggggcggcaagtcgaggtgcttagggcgccctgggcccggccaaccgtggaaaacccggcccggggcacgggggggcgcgggggtcgcagggccagggcccaggcagggaacagagatttttttcgcggggaggggggtgggaggtgtcaaagttttcggggaacttttccacttgagattccacgaccctgcagtgccccctacagaaagcggcagctggggagggcgggcgcccccgacgacccccgactgccagcggcggcgcggccaggctgcctggagttcttgttccttttttttttttttttttccttttatttcctcgtggttgtttgtcggatacatctttttccagagtgggaaaaaaaaaaaaaaaagcgagcgccgccgcctgcagtagagcgtgctcggcctgcagaggcagtcgtctccaacttttcctctcccgctccaactccccgcgcccaaaacttcagttcttggggagcccaaatttgcctgccgcgcaacttccactctaattcagcgaccaagggccctggcagcggtttgcagcctgggggccacgctccccaggctcaggcctgctcgttggcctgctcctagtgcctggacccagttgggggaggcgaaacagggcgcccgaggagcaccccgggagagggcggagcactcccgtgccccggggcaggagtgcagggagctcccgcgcccggaacgttgcgagcaaggcttgcgagcgtcgcaggggggcactcgcgagggacggacaggaagagggccaggggggaacgccagaacccgggaccacagcacggaaacggtccggggctgagctgcagtcagatccggggatggagggagccggagaagaggagtgagaaggccggggaggcaggccctgctgtcttcctgcaggccggcagcctgctggcagtggaggaccaggccgtccaggaaaggaaggggtcaggaggtcgggcagggcctcagcaggttcagacaagtccccagaagggagctgcaggcgccctcgagtccaggccccaagcctggctccggttgtccaaagagggcctaggccaggcctctggtgcggaaactgagtcacagccagacctcagggcacggcctagacgcttacgagccaaagttaggggtagagagcagagacctccggggggtctcagggagtagggggcttcagggcctcccagtctagagccggattggcgagttagacgcttgtagatccaaggttggattggggtggggtctctgggacgttggatcgctacgcaaggattggggggattcaagtgcttagagatcgaagtctgccctgggtagggggagtcagacaattggaaagcctaggtagttatttggggaggggtctctacgccttggcgaagcgcacagctgcatctttttggcttgaggcctgaggccttgtcgagaagcttccgtgaaagggtgggccagccgggccacgagaaagaaagtgaataaatcaggaatataagtgggcggggggcccctgagaggggggtcgcaaagggtgagacatggccaccaggcgtttaaccgacgctttcttgttgttgcggaataattccatccaaaaccggcagctgttagccgagcaagtgagtagtcacatcacctccagccctctgcattcacgtagcattgctgcggtgagtctcctggcggcctctccgacacacggaccgtgtgcactgcggctctgcctgtttgtctgtctctgtctgtctctctgtttaaaaagagaagataagaataataagactaagaataataagatctcttggctagagtcagggggcatctgtagccctggatgaggaagaagcggtgctgtgaggccgcagctccacctctgcccggtcttctcctcacttccgcagcacccccccccccgcaccccccgccttggcgtcactgcgctacaggccgcctgtaatttacatatgttttaacgctaacattgggaagcattgggcctttctgaagcctttttgtttcgttttgtttgaagctcccctccccccagtaatgagcctcagtttggtcctaagggctgggtcgccggatcgtagacccaaatccttgcaaaatgaacgactccctcccctcaaagaggagggagttgtgttgttgttttgttttgttttgtttttccgcccgttttcttttaacggccccgcagccctctgtgtggccttgttccctgtgaataattgcctcactgttcttcctgggggcttgcgtttgtgagactcaaggtgctagcctcttcactttccatttc

SEQ ID NO: 9012 - DNA, 6000 bp, Homo sapiens
gggtggaggcatgatctgggttgggggcagctttggtttcctctagttctgcttcatctgcattagctgagggagctgccttttggcctgagataatccacagaggaactctgagtttcttcccctcgtttgtaaacattgcaaaatcacagtgcttctaaggaacttctggaactttccctaagaggtgaagcagtgcacaaaaagcttcaatccctttaaaaactgtgacccacgcaacatgagagagggatccttgctgaccctttgaaaaacatttgcccagaagatgaaggaaaagcataaggagaaactgcccctctccgcacctttctgggacctgcactttttgttgttgttgttgtttgcctgagtccaggaggttcctgctgcggtgccctcaacaggtagctggggtggcaacctggcaaggttgcaaaggatgcaatccaatggctgacagctctcaggaatgctggagggcttggcgtggcccaccccttacagtggtgtcaggttcacataggtgagggggatgtagaagaccactttgaggaatagggttacccaactgtgaactgccagggctctgctgcaaagggaacacaccaggggtaaagtcctaggtttctgttgcaagggcaggttggtttttcacactaagctaacatcatctacaggccactgaagatgggttcctttccaggatgaatcatctccccaaggcagacaaaactatgttcagtccaacaaggagggggacgcttggtcttctggtgaatgtcaattccacagacctaggagagtctttaggctgtcctccctgtgcttccattcctttcgtgaattaaacactctcgtagtttaattgctcttagaatttctcaaattacttgtggtagaaatagtgtttctatgacatattttgtttttttatgcaacttttttatcttttaatgtaagtttttaattttaaaaattgctgtccgttttccttctacaagatatgaactggttcatgacccagcaaattgggtcagcgtcgacaaaaactccggagtggtcatcaccgtggagccaattgaccgagaatcccctcatgtaaataacagtttttatgtaatcatcattcacgctgttgatgatggtgagtgtttacccaaaattggaaaaataaaatgctcattcttgcttcctgcgggaaaataaccctggtgagcgtctttcagcacagcagagaaaaggataaaataaaccttgttatcactctgcatccatgctggtgattatttttggtaataattcttaaaatggtaaacaagggaccaataccatcgaaagagggcagtattcattcagaagagacaattaaaccagcaaggaggctgcaatcaaacccagcatctttttcatctgttcatgagctaactctttagctctttgtcaaagccaatgatgtgtgataaatatttagcacagcttccctgtgcttgggatggcatacgagctcagataaatgggactgtaagggacacatttgtcataaaccagaatgggtggttttataagcctgtttcagcatttttctctacactctcctaaggctgaaactttaaacacaccaaagcagagttgaagaaataaaaatgttcaaataactttaaaattgtatttaagaaagtctgtgaactaaaacccaagctccaagtgatatatcactatacgttccattctgtaattaactagtggaatgttggcggggggcaatggagatatgaaacacgtgttcctaatcagcattaagggaggagaaaaaatggggccagtgtttcagggttccgtcattctgttatggatgattttatgattggtactttttttttcctttattttttgctttttgtatttcaaaagcttttggggtacaagtggtttttggttacgtagatgaattatgcagtggtgaagtctaagattttagtgcactggtcacctgagtagagtaccttgtatccaatgtgagatttcttagcccttggctccctcctcccctgcttctgggtctccagagttcatgatatcactcatgcctttgtgtatccatagcttagctcccacttataagtgagaacatacagtatttgattttctattcctgagttattcacttagaagaatggcctccagctctattcaagtgtctgcaaaaaaacatgatttcattcttttttatggctgagtagtattccatagtatacatatgccacattttctttatccactcattggtcgatgggcatttaggttggctccatatatttgcagttatgaagtgatgattgccacttttttgaattagaaaaagtcgttttagataattgtagattcacttgcagttttaagaaataatctagtggatcctgagtatcctttgccagttttccccaggggcaacaccttgcaggactacagtgtaaccttgtaaccagtacatcaacgcggagacgcagcgcatttgcctccccttggggacccccatggtgcccttctttagtcacacccattttcctccaccccacccatccttgatgcctggcaccattgattgaccttttgtttttttaatgaagccacattctaccttgttctacaagtgatttgaggtggtaagtgctttattagcttacccaaatattctgaatgctcataaaagcaggaaaacagatcacgtgcatgccaggagagcttatgacgttgaaagggaaacagttccagtatttcaggaatattttttttctgagagacggagagtgctcattctccagagctgtgtgtgcacgagataaacaactcctgaaacttcctccccatacaaggcttcccaccgcagactgctacagggaccctaatgctcttcctgtctgacatcaatgacaacgtcccgactctccggccacgttcccgctacatggaggtctgtgagtctgctgtgcatgagcccctccacatcgaggcagaggatccggacctggagccgttctctgacccatttacatttgaattggacaatacctggggaaatgcggaggacacatggaagttggggagaaattggggtgagtttttgtattggttacgggcaaagagtggaaaatgccagatatccaattcaaacagatttaggcaaaaaaggactttattagcttaaaaaaccggagaggtctgcgttctggcagagctggctctaggtgctcaaaggatatccctggatatccttcccacacatggtctgcctttctctaggttccttcttttttaggaaactctcctcatcagggggtaggaggctgctgggagtccctgagacatattcttgcatctggcaagaagggtgtttccagggaagctccaggattgacgtcactgtttggcctgggtcagctgccctgtcaatcactgtgggtgggacttgggagggcggatgtgctgattggctggttcccagcccacacctggaccttgttgggatctgggctcaccctctcctgattcatactgagaattcaggaagtgtgggcttccctaaggaaacactggggcactgttaccagaagatgaacatgctgagcaggttaaaagcaactggcatccactgtcaacactctcttctgtgcctctagccgtggcgtctgtagactgtggcacggtttcagctgaaactgtgtgctcaagtttgtagttctcagacctggagtgtgtggtaaagcacttcgccttgcccaaagagaggtctggtctttgtccttggggtctgggtgatctctattggggtatcatgtctgacaccagtgtctctttacctggggtgtcttgggctgagccggataggggcaatgtgatttacactggggacttctggtcacatagtatcagtctattaccagagaggctggagactgaggccgcccacctgggaggcccaccaggttgcctgaccaagccccaggaggacactggagcctgaggctcaggtgaacgtccctgactgcagcatcccatgtgtgctgtccctcatcgatgctgacctggcttctcgggagtggatgatgagaagctctgctactggtgcttttctggactctgccctaggtgcctctttccttgtgtgatttacgtctgtatcttttccctgtaaaaaacggcaccatcactgtaacaactttcagtgtgttctgtgagtctttctagagaattgttgaacctgagggtggtcttaggaatccgtgaacttgcagttgatgtcagaagtgagggtacccttgaggacccctccctctaactctgcagttggcttactttcatacagagcttggcccgtgcagggcgttcagtaagcgtgtgttgagcagatgagcagatgagtgagtcaatgcatgccatgttctttttccctttgcaggtcaatcagttgaacttttaaccttgagaagcctgccacgtggtaattacttggtgccactcttcattggagacaaacagggactttcccagaagcaaactgtccatgtaaggatctgcccctgtgccagtgggctcacatgtgtggagcttgcagatgcagaagtggggcttcatgtgggggccctgttccctgtctgtgcagcatttgtggctctggcaggtcagtggtctgtaggggtgtcctgggactgtggctcctctccccaggcaataggccaggggtaaggggcttgctggggtaggggacagcggtggcaggattggtggaatggctttgagaatgacttctgggtgtactcaggctcctagatgtagatcagaggttgccatgctggccaggcaagatccctggccagcaaaagcagcttctactcacaatggaatccactggtaaatatagtcaaggagtggccctttgtttgtaataaccatggagacagcaatgtacagatattcaggctcctggacttggcaaggctaataagaaagcagcttttccaagaaacaatacaatattactggccagatagtattattgattaattcaacaaacagttatgtagcatctactggtaccctggaactgtgctgaactttatagctacacagatgactaagacgcaatttggccttgccagttcatgactgagttatacatgaacagaacaagatcctcatgaaacctctgatatgggtgagcttgtctaatctgtttttcccctttgtcttataacagtggctctgctttttctgttgcgatgctattttgtgcttgaacctaagaggcatggatgctctgtatccaatgatgaaggccaccaaacactggtcatgtataatgcggagagcaaaggcacttcagcccaggtagtggaatgtcatgctttgtgtcttatggcaaggaattcactaatacacagacatatagcatgtatttttccccccattgtgccacctcttaattcttcactcttacccgtgtttcagtagcaagtgggaaaaaattcttgcaaatactatctaactcagataaatgaatttattcttttagatcaatggttctcaaccatgagcaattttgccccataggagatattcatcaatgcctggagacagttttgatggtcacagttaggagtgctactggcatctagtgcgttgaggtcagagatgctgctaaacagcctacaacgcacaagacagcctctaccacagagaattatctgccccagtttcctaagtgctgagtttgagaaactgtgcttagggaaatagtgttttttattaagtagacgttccctaaatgggattgtgttaggctcactagttaaatgagtctgagctggcttcttggccatggctttcagtagatcatggcagaacctgctcttctaccattgtccggcaaaggccaaccagaaagctcactgcccttggaggtacaaggcctaggctctgtttctgcttttgcatctcatt

SEQ ID NO: 9013 - DNA, 6000 bp, Homo sapiens
aagctgcttctataaaccagccagagacaaggcagacatgatgcgaggtggagccagggccctgtcgttggcctccctgtgacacgtgtgtctctgctcccacctctggtgttcccccctttttaacagcagacaagaaacaaacaagcaaagcaacaacatggaacaaacaaaagccctgggatctcaaaacggcccctccccatcttctgttgccaggacgcatctcccttctccagcagatccgatacctttgattgttgcatggtttgactgttttgttttgaatttttttccccttgtgaattgcatctcctgctccatggaaatttccaaagattcaaagacccccaagtcccaggggagtgagagaagcagcctcacctggttcttcctcagaacccagagtgcatggtgtgcttctttggagcacagtcatgactaaggctgtaagtctgaactcagccagccctgggttccaggtcaagctcctcccctcttttcatgcctcagtgtcttcatctgtataatgggggagtgcaggaagtaccccagggtacagtgcagccagtgggggtcatcgttggtatcattgctttatgggtccaccccctgggggctcctagagggttagagcctgggccacatgtggagaggggaacaccctgttcccccaccctcaaggctctcggagtggccagagggcggacacacagaaaggagctccaccacactgtgaggagagaggtgtccaccaagccctgcagcagctaaagccaacacagtgctccgagagaaaggagctccggagggagcagcagaggcacaggcacagagcctggatgggggcgtgtgcttctggatggactagagggtcaggattctgctggtggcgagtgggccaggctgagcatgagactggaaaaggaaagaagacagccctaggttggaaggggacatttgcatctttccccctgggatttctgcttccaagggatgcacctcacagccatgcccccaggtcctaagtcacgctgcctggagtagaatctcagcccaccccgtgccggcgggtgacccaggccaggctgctcacatacccaagtctgtcctgtctgtggaccatgggcatcaccacctccgtcctatgtgaggatcgcatgggatcatgactgaaaaccttcgacacagtacctgccacacagtacatagggatccctgttcatggagaaagatagattttgaaaaacctacaacaataactctattcctttctttattcccagtgtagcttcacctcagcgggtgagcgttattggaatggaaggcagggagcgatctgtactggtctctctgctgcctgctcgcccctctcaatctctcctttgctttttgctttaagatcgctcttctctattgcatgcagggagttttcttgagctgggtagcaggctgattccattcatttctacagtgccttgaatatcttcaatcgcccacaaagacaatgttttattctacgaacacaccttttgccaacatctcactgctttctgtacaaaacagcctttttgtcgaacattgaagtgtctacaataataactatcaatagggaaggaaacaaattaacatccaacgaatatagggaaatgtggccctgatacaagcacttggtttttgcttctaaagaggaaccccttcccagactcacctcatcgagagggagacagagaagtctatcaagcttagcaaacatctgtagtccaattactgtcaacagtttacaggtgttgagagcaaacagtcacttatacactacctcccaaatgcattctcttaatctctcttagaaacaaacgcacacatttttctagggctctttatccaaagtgcagagagactagctcctcctccaggccagctgtggtcttccctgcactgggtggaccaaaggcaggccacagtcccactggccaatgtgccaaacactgtgccagggtttctccagctaccccaggcagaggcccaggctccacccctggaggtccaggttctggaaatccagggtggggcataggagagagcatttttctgatgcttccagctgctgctctgttacgtgggacatactgtctgtgggacaggccgtgattctcaaatgctagtggcatgagcatggactggagagattgttacaaggtcagcttccaggccccacttgcaaaagctccaagtccatggatttcaggtggagcctaggaactggcatttttcatgagtttctctgtgattttgttgcagatgattgcagaccagaggtgggcgtggcggggaatcccatcagcattcagaatcaatgtagcaggtctggggtaaggcctgagtttctgcatttttaacaagctcctgggggatcttgatgctgctggtctggggaccacactcagagtgacaggctgaagaccattctttggaggcactgctttgtattttaggtcatatttttcttttctgtctcagcaatctttgctgctgcattcagagtaagtctgataaaccaatgctctctactggactcctgtcagttactgcagtgtttctgaaactatgtatttcggaaaatgcgagttcccgtaagacattacagctgtgtaagaaggtttctttgaacaaagttggggccatgctgcgtgtgccagggtcccagctctgggtgagaatgctggcactgcagctttccccgtgcctgccctctgcaccctcctctgcctgactgtatagtggagttagaaggactccaagagcaactttacataaagctcctacacatgtccctggcacatagctagcaccttgtaaggacaggctattgtcaaactctaccctttctggaaatcacgctgcagtagactcaagattcattcagtagtagagggagatgtgcttaacacagtgtttggagttcaggacccacctgctcctggaccccagtctccctgccacacactcataccttttctttttcaaattggcgcgctcctcagcgcttcaacagtttcgcagagcacgttggagcaaatgcgggggtctgtgatgcctctccaaagaaataactcgcataatgctcaggcctcctgcagacaaaggtgtatccccagcgacagatattttaagaaaatagaccagggacacaagacaagagagctgtcttggtgtctaaagcagtcttggacagcttctgatgtcgctcgagcagtggtgaagcaccttgaataaggaggaaagcagagggggcgtcttcccaaaggacgggcacatggccgaggaatggaattctctgtccatgaggattttggatggatctgttcatgaaacctcactggctacgcaggaccttcgagtgagtctaaacctccagccatgtcaactggtaacctctccttcttcggctaggtggggagtgggacaaggccataactgataggagtccaggctggggcagattttgtgtctcctgactagttccatagttaagttgcaaaaccgaatctcgccttgtgctctcggatgtagtgcttactctggtcctctggggttatctaaaatctggtttccttaagcgtaaggcagagctctaaccgggagaccaccctgcccccaagggtgggggttctgggagggagagagggaagcggctgctctgtagctttctctactggcttgcccaagtggactctgatcttggagctcaacagtgtcactcaatcttccaccctctcctttgcaacctatttcttaaaccagaactaatgtattctggacacagagtccctgaaaccccagacaaagaaaattcgatgtatctgaacaaacaaaaccgcgtttctttaaatctccaagccaaaaggaaaagtgcagaaacatttactcactgtccgacctgtacatatattttacctgataacccttaaagaagtgccccccagttcagccatcacccatgcagggcaaagggagctggagctggcccagcctgtcggcgcagacactcctgacagctcctgtctgggcacttctttctttcttggagcttctaatttctttcttggcttctgaggcctaacagggtgttttgatgcacacacaggaattactaccgtccccaatcctagggtacatccctagcccaggccagggctttgagttttcctaggagcgggagggtctgcaaagccccacaggctgaaatctcagcgtggccctctgctcatctgctccaggtggaaactctcacccctgagctgcccgacctgggttcaagcccgggtcaggggagttagcaaggagacacctgaaaaataaaaggacagaatggaagtgcacactcccaccgcgggcccgggcgggaagtcggactaagaccgcggcgggaccgccccatccagaaagggtgccccgggtgtgggggcggaaaccccagcgctgtcttcagtctccacacccgcgcctttttcccctggaaaacgagcgtccttggcctcttcggccgcaaccgggcggctccagacgtccaggagggcagaggctgggctggtgcggcgcggggggcgcgggcgcgggctctgcgcctttaaggcccgcgtcggcagagcgagcgcaggggccgggcggcggggcggggcctcggcggggcggccgcggcttcacctgcagctccgagcgcgcggaacagaggcgcgggcggctgcgaggccggcggacgcaccggcccgagggaacgcgccgccggccggacttggcctggctcccggagccggggcggcgagcgcggcgggcgcagcggggctggaggctccgggcaggcgcgggggagcggcggcggcggcggcgatcggagcggcggcggtggtctcggcggcggcggcggcggcggcggcagggagcgggctcccggtgccgggcaccgggcgggcggcggggaagatgaccgcgggcgccggcgtgctccttctgctgctctcgctctccggcgcgctccgggtaagttgccgcctcccgcccccgccgttcggaagccccgggcagcgggaggtcgtccccggatcccgcggggcgctcacacacccggcggggctctcccgggctcccccgccgcgctccccgctgcatccagcccggcgcccgcgctcggcgaagctgcctgcggtcggcaggagcgggaagccgcctgggcagcggggagcggcggagcagggtgggagtggggctcggtggaggacccggggagctccgcctgcaccggacccgccgagcctccctcgaacgcccaaagcccgtagccgctacccggagctcggcttgcctgcatggggcaggcttccactggcggagccggcgcgccctccatcgcccgggagccgcgcgccgcgggagttgccgagcccagccccggccgtggctgaaggcgtggggcgcccggcggctgcgggccagggatccgcgagtgcggggcgcctgcccgacctctcctgcccaaggcctgggggtccgtctagcggcgccgctcagttctgtgggtgccggcaggacccgcgctgcgggtgggcggcggggtaggactgcggggcactctcacccccgagccctcggcggggctggagcctgcgtgtccggcggggccccgggggctgggagctgggccgggcttgggccgggaagccggacgccgggcgggcgcggcgcgggagggcgccccgggagggcgagcgggtctcccgctgcctctgcagagccccgcgggccggattgccagctttgctctgcgcctggcgaggtgcgcggcccgcgggggcagagagcgcggcggctccgggggcgcccctgggcggaggcggaggggcggcgggagttgcaggaaccccctctcgtggccgatcggcctcgctgccttctcccgggcagcgctgttgtaacctcggaaataaacaagtgccagcggcg

SEQ ID NO: 9014 - DNA, 6000 bp, Homo sapiens
ttcacttcacagtcggtccttcgcttggtgagctttgggagccaggctgccgtggccagatgtttaggagcacgacggtggctctgcagagggcgatggtgtgcagccgggctttcctgtcgcccacaccttgcaggccctcacccctccccgtgccttcacccagctcctcctccagtgccattcatcccagcaggcagcaaggacatggcagctgagaaaagatgccagcagaacgcacttattttataatatttaacaactgtcagtgccaaactgcattaacacagtcatcctcagatttttcagagggctgtgtacacatctgtgaaaataaatgttaacctctaagatttgaatgaagattctctgaagatgggcagcaggtgacctttgttttacactgagcaatttttcaccatctcagccgctctggccattttgaaaagggctacaaatctgctaaggatgagtcctcatgcctggttatcagaagtttggaccgcgtgttcctgaggattggccaagcaaatggctcatttccaaaaactgccctgtggagagggggctgggggacactcgtgacacctgtcgggcggcacatgtgatgggtggagcacccaggttctccaagcagcaggaggctctgatggacccccctcccctggcggggggacgctactgctagaagcagcgaagggcccggtgccccaggtttcagctgcctgccttctgccgtaagttgccccagcaccttcgtgcttttcaggagcgtaagctgagcagactcagtcgtcccagtggtcagtgtggctggggcagagggacacacggtccacaagacgtccatgctctcggaatgctccaggggtttggctgtggggctccaccaccattgcctgagcccggagccagaggctcctcccacactgcctggtctgccccacagagcatcagtgccacgccaggtgaggacagcgctcaccagacaaccaggcctgccgccccactgacgctgacttccggacctgcagaactgtgagaaagtacgtttcgcttctttgtaaactgcctggtcagtggtggcagcacagatggaccgacgtggacctcgacgcgaatggcgggctctgggcgctgacccggtggcggcgtagctcaccgaacacccagggggaccagaactctctgccttccactcagttgtgacttgtctatttttaaaatgttaaaaaaaaaaaaaacccacaaggtgcagtggctcacacctgtaatcccagcctttgggaggttgaggcgggtggatcgctcaagctcaggagttcgagaccaacctggcccacatggtgaaaccctgtctctaataaaaatacaaaaattaaccgggtctggtgacacatgcctgtaatcccagctactcaggaggctgaggtaggagaactgcttgaactcaggaggcgggggctgcaatgagctgagatcaagccactgcactccagcctatgggatagagtgagattccatctcaaaaaaaaaaaaaaaaaaaaaaaagtttaaaaaaccctacccctgccaaatgcttttccgaagtagccgtgccattggtgtttccaactttgcctggcaccttccatcgtttgctaagttccagcaggtgtatttcatttgcatttccctcatgaataatggtgttgagcagcttgccatggtgcctttgctgcctgtgacctctttggtgaaacatccggaggtgtcttctgcccacgtggaggcgcagcctgggctctgccgcccacctttcacccgaggagcctgcagcacgtggagagcatcagggtgtgctttctttacagtttggggcttttttgagacagggtctcgctctgtcacccaggctgcagtgcagtggtgccatcacggctcaccgccagccttgaccttcacctcagcctcccaagtagctgagactacaggcatgcaccgccatggctggctcttttttaatttgtctttttctaaagacagggtctcactgtcttgattaagctggtcttggaactcctgggcttcaagggaccctctcagctcggcctcccaaagtgctgggattgcaggtgtgagccatcatgcaagtctggggttgttttttttttgctaaacaggatgaatagaaatctcttttgggggatctcttagtccaaatcctttagctgaatgcgcgtgtcccggtgaggctgctcctctagatgctgcgggcattttgcagacgtcccaccaactgccatcagcgaccaattagaagatagggacagctgcacatgtcacacagcccttctgaccttgtgtgtgcttcaagtccgagattcctgacacaaagcagcgtgtgcccccccacccactctgtggccacagctggagtcctgggctgctgggtgctccaggtgccataccccacacacgcatagagcccgtgggctggcagcgggcacccacagtggcctctgcaaagcctgcctggctgcggctcgtttcctcactgcagcatgctcataggaatgtgggagtttcgcttgaagtgtgggtaaagagttctggggttgtttgagccatcccaggccacagggcctccaggaagtggaggaaatggtaaatccagggtcctcttggccactgcgttggcctctgcacacttggcccctgcggaccctggggcttctgctttactgtctgtgacataaacaagtgacgcttgccaccttcttgccgggaaagccaggctgggttttctcatttccaccttttccctgttttacacgagggcacgaggatggggctgcagtatcagtgacgcacctgtcaccagcgggccacagagctttgtgttagcccctctcaagccctttagcttctggaaccgtttaaattcttaaaaattatacaggaccccaaagagcttttgtttatgtgagctttatctattgacatttaccatactaggaattaagaggacatttaaaattatttagctacataaaaataacaataacaaacttactacctgttaacacacattttaaaatgaaaagtggctacattttccaaaacaaaaaacgtgaatctttagctcaatcaatgtttcaaatggaagcattatgacagtcaaaagctggcaactaaacataactggcacaagctctgccaccgagacaatggaggcctgagtagtaggctccctgcagaatgaaaggactggagctgccagcatcaacaccaacgcatctcccaacaagggtgagtgaaaacacacacctaaagacctcagagagcacgtaagcacacagctgtgcatccactctgagggtgagccaccaagcacacggtgaccccggggagcgcccgaagggagtgaagtatctgaaggaaagaaggaagtgagcgatgggcaaaggagaacctgaggaccctggcacagtctcagctgcaaacatctagtcttgcttaactggggtgcagaggccactgcacctcagggttctcacgaagcgcctgacctctctattttattactattattattattattttttttttttgagaaggagtcttcctctgtcgcccaggctggagtgcagtggtgcaatctcggctcactgcaacctccacctcccgggttcaggcgattctcgtgcatcagcctcctgagtagatggaattacaggcatgtgccagcatacctggctaatttttgcatttttagtagagtcggggtttcattcaccatgttgcccaggctggtcttgaactcctggcctcaagtaatccgcccgcctcggcctcccaaagttctgggtttacaggcgtgagccaccgcgcctgagccctctaagagcccccgcctggcgtcgctgtaggcaaatcccaaagaacgtgtcccttcagcagccggctggggcgccacaaacactatctgttgtcttcgctttagtttgtgtcaaagtgactcaaagttacacaacactggcgggcgactgccgcctttttaccctgtggcctttcccatccaggcgtccagagggtgagcccctgccctccaggacccctcccttccaggaccctacccgtctgggactcaggccttccctgactcctccctcccggactcacccctcccagatccctcccctccgggaccctctcccctcccgggccccctcccctccgggaacccctcccctcccggactcacccctcccagatccctcccctccaggagcccctcccctctcgggacccctctcctcccggacccaccccttcctgacccctgccctcccggacccctgcgggactagatgtatacagctgagaccatatcacggttctcaccctcgctctaccctcccggacccctgctctcccggacgcgtggactccagctcccgcctgggtccccaaagcgctgaacccatggtcacttctatgcgtagccctggtgcccgccgcccacagccggaccgcactcctcggcctccgcctaacccctggctcagccacacgagtgacagctctgcccgcccgggcgggcgacgccgaggggtgggctcggccccacctgagcagttccccagcgcccctctgaaacccgcctgtggtccctggcgccgcctctaggggccgccgccgctcccctatgacacagcaacaataggggccgctctggtccaagcgccctgcggcccgcgcttccgccggaaaagagccgccggcgcgggggcggaccggggaggagcgagtgcgatggacggtcgccctcgccaatcgttggcaggttagagccggctgcgcggcttacggggctcaatcggcggcgagagcggcaggcggggcgggccgaacgcgggtttccggcggggcccggcaggcgccgaggaggaagagcgagcccggacggcgcctctcgaacgagtgtgggcgcgaggcaggtgcgggagtcgccgggcctggggcggccgggggcgaccggaggcgggggcaggggctgctggaccaaggatggggcgggggcagccaagacgagaaggtggccggcgcggcgggtggggcctgcgggggccgggccgggcgggggttctggggtctcgggcgccgccccggttccgcctgcggctctgaacgtggggctcggcgggagctcgggcgggtctgccccgcggagcgggtcgccggggtggcgcgtcgaggctggtgccccgcggagacggcgtcaagcctagggccggccccactaggcttggcggggctgccccggcccagcgccgagtgcgggcggtgcgatcgtcgtgagcggggcaaacgcggaaaggcagcccggcgtgtctgagtctgccttaggcagctctgggcgcaggccccctgctcgcaaacaccccagggggcgggagcttgccggaccgcaggcgacagtgaccgccgcgtctcagcgtcctctccgcgctttcaggatgacgacctcaggcgcgctctttccaagcctggtgccaggctctcggggcgcctccaacaagtacttggtggagtttcgggcgggaaagatgtccctgaaggggaccaccgtgactccggataagcggaaagggctggtgtacattcagcagacggacgactcgcttattcacttctgctggaaggacaggacgtccgggaacgtggaagacgtgagtgtccctgagccgcagcagcaggacaggcgacttctcgggccctcggagtcctcgctttggagttcgcggtgggggcttggccgcatctggggaccgctcgtggggccgtcatcgactgccctgctgatgggtcgtcctggtttccgcggtgacaggggcatctcggccactgtgtatcttgaactgtccgtgtgaggtgcctgggttggaggtgtggccctggagagcccggagctctgtgcctggccttgaactgtccgtgtgaggtgcctggggttgg

SEQ ID NO: 9015 - DNA, 6000 bp, Homo sapiens
ctgcaaacaatcgccaacaaggtaaatgattacatttaacgcttttactgtaaacactctcaatgcaatataatcttgctagtcatgctgggtgggccgggatgagagttagcagaagacctgatgggtctgtgcctcggcgggtccggactgcatgcacagttgtattggaagctaagataatcactcacctaacacgaggcccttccagaatgtgaggtctcagccaagtgaaccctgtgaacacctccacccccagacccgcggggaggctcaggagccaggcagaccgaggcagttccagaagcccttgggctggcagacgtttgcctctttgtaagtaagagtgtatgcagaagacctcacaagcagatcaccagtgaaattcagatgacccttctagagaggctgtgggcagccaaggccccaggtgtggacagggctgctgctctccaggtgctgggggccccagcatgtctcttcctacagctccatgtgcctttgccacggagccaccggcattcagtggcctcttccccacttggctgctatgtgtcccctggaactcagggcactccaggtgtcctcaggtcatgtctcagagctcagggccatctcgccaggcagggaagtccagattccaattttttctaccccacacctaatctctaacagcaggctctgaacacacaggaatcagttggtggcttctaaagagaacatgataccgtcatgtagctgcctgtccagacgctgaagcctgtgctttcaccggaccctagtgcttgtgaatgacgacctctgttctcctgggtcaaaacttccttcaccaccgtcaagaaggccaccctttgtcggcgggttaaatgcagtgttatttacatatggtttatctgggcatctataatcccagggcgagagcccaccatccaccagcattttggaagaacgcctgagacctgagacctgagacctggtgcaatggaatcagattccctggtagctgcttttaatggtgacagattctctgaaacagaaaaagattgaattgagtctgtctccctggagtcgtcctgctctgggagatgcagagggagggcggcaggagggaggacagtgggaggcctctgttggtcaattgctaggctgctgtcaccagatggtggatggcgtttgtacagcactggccaagggcccagctcagcagggccagagcctcaggtcatgtcgcaggtgagcaaagcagcgtggatggaagacgaagatcttcgtcccacggagggcttgctgtgcgccccgcaggacgcagatcaccgggaagagcaggaagcagaagcgcaggaaagccaatgctgtgactgaggcgtggccagcaagccaggccctccagccacaccctgctccaaaggggctccgacaggatggactgatgatttccaagagagaacatgctttttatcttctatggaattttgctaccaaagagcctcccagctacctgtgcccttccctaacctgacaatcttaattcccccatgaaactcctccatcgcggacatttggacaactccaggctgagtttttcctaaggccactctggccttgtgcgtctcttctttgctaagctgtgtgccagccgccagcccacatctgggttgtaccatgatcctaactcctcacctgaacacagcatttaacagactgaaacgtgccactctggagctggggacttcaagccacatttcgcctgcagcccgatcgccttcaatctttagcaaaatcctctttctcatgcaaaacagtgcagtcgtaacttttaaaatattttttagaaactttctctagagcctccaccacatggccacagcctgagactttgaaataatgaaacaattaaatgatgttttcatcatttctgagacttgcccattatcacgaagctgaaatggccatttttttataagtcaaggaaggacaggcagtttcaaatgagttggctaagacatacgccaaattcatagaaaatagaaatgaactatgactacagaatggaagcaaccacagaaatattagcaggattttaagtattatcccaatcaagtactaatagctaagtgaggtcattttttggataccattcctggtcaaagctaggaatgatgtgtgttccaggctggaccctccaggcagaggcaccgggatcccacgctgtttctgggttggccattaacctgccccttgacctgacagcgtttctctctcttctctctctacacttctcttctgatctttagatcgattttcctccaagtgacaatgtccataaagagagagggaggtggaaatacaggctgtcacatttcagctctttgaggtgcctctaaagatgatgtcagagaacagtaagtggcccacaaatgtgcagcatctgttccgagcctcctgaagccgcccggacaggcagcagtacgaccctgcaaggccacaggggagccagggggttctcgctttctttttcttttaattatttcctctcaaaaaagaaaaaaaaaaaagaaaagaaagaaaaaaagccctgctgggatagaacttattgagttcagaatgttccagggcacataatcaggctgcccttgttccaagacactgctgtgctctgtagctgacccccgagtcctctagggcaagagtaaggacacagtcggctcccgaaagctggtgcagatggaccccaccacgcagggcctggagttgggccagacctgcagacccccttgatggcctgcggcaggacccttcacctgggtcaaggcctcctggtgctcctaggggcctcttgaggagcctgggcaccagcatttgcctttgaggacaggactgagggcctgcattttgcacgaatgtacctgaaatgtttgctctggatttacctttccaatggtgcctatgcaggaatcccaaagaatgcctggtggggtctgaggcgggtctcaggccgggagccctccacaggcagcaatatttggctagaatttaatgccattttgtttctttttatctatttttatggtgacctctttgtggtaattgacactgactttttaaaaaataaacttacccttttaatcaaatgtgtgaattgtttaaaggaaaaacattgtgtaaataatgttttcagggggtagaatccagacgtgagttttggaaacagagtccagtcctgcttctgacatttgaattgcttctccagcatcatcaccagaagatgggctacctgtgctcacaagcctcctgtaacacggagctcaccacctctcaaaggcaccttctgtcaggtctgcctggaaatgctgctcccgcagactccgcacctgaggccaggtctgcagcgaagctcatccacacctgaggccaggtctgcagcgaagctcagcccccttccttcacaggagaaatacttctgggtgtgcaccttccactcctggcagggccgtgagcccctgtggcagtgcctcaccctctgggagggaccctctccatctgggaacaatgtgggtacttttttctcttaaagggcagtgtcaggaatgaaagcagatacccaaaagcagtgggtctcgtggcctcgtgtctgcttccagaagtggagggcggcctgggacggcgggagccctgaggacaccaccgggggggtcccgggacctgatacgagtgggcaggagccccaagccctggaggaaggaaaaccatttcataaataactgcatggggttgtgggccttttctcacaagccgcagcacctccttcgtctctccacggtgaacccgcccgccacgctatgccaccaggccaggtcctgcagcaccgcctccgtggctaggacttcctcaccagcctggggccgtgaggtggtcatttccccccttacctgacttatctcaggattcacacacacacacttgactttcggaaacttcttttaaattaatttcactgacactaaaagggaagctttgtggagtgtgattgtggttacctgttaatacttggcaacaattatgagccctgatatgagccaacttcttccgtcttatcccctttgaggacgctctgttatcgcccccattttgcaaacgaggaaactgaggctcggaggcctggagcaatgtgttccaggacagacggcaggaagccggggtaggaattccaacagggagttccctctgtggaagggaacgtggctggcacctccctgccttccaccctcagagctagtgtgaaaaagaagacggggttatggaaaaggcaacgggctggagattccccggattcccaggctagggcgccggtctcactgtgcgcgcaggtggggcgcgtgccagaacagggcctgggggtcaggccgagaccggcgggcaccttcaccagggccgcccgtggcgttcccccagcccctctgccgcgggccccacgtggccccgaccctgcggcagcctttcggaagggcggagctgaaaaacggccgcttggctccactcggccccacagcgcccaggagcgaatcccgagtccgttcggaaccgcctcgccgcgtggcctggggcggcgtcgccaccgcgcgttctcggcctcccggctgcggcagcgatgccggtccttggagctggagcggggagtccaggaggcggcagcgctccggagagagacgccctggtcccccgccgcgcgttcccgcctctgtgccctgggggggaggagggggcggtcgccgctgccattggccgtggggggtgaggcgggccccgcgcaggaaaccccgcccctccctctgcggcgggggcggccccagcggatgaatgaagcggcgcgtggctgccggggaggccagagcgtggagcgctgcgcggcgcggcggccgggccctcgagacggggacggtgagtgcgcggggagcggggagctggcgcgggtgcacagggcccgacctgctggcgtaggagcgcggcaggtgccgccatcgtgggcaggggctggagcgccggggggatgcgcgcgggggcgggaggcctgggcaccggccgagcgccccgagcctctccgcgggggagggcaggaccgagcggaatcggaggccaaattcgccgcttcccgccgccggctgcgcaggtaggagctcccgagtcgcccgcaggaggaccgaggcgaaggggccccacgctgcagcgggtgccggggggaagcgggtgagcaggggctgcggccctggcagggactgtcggagtggccggggcaggtgacctgggcaggtggcccggagcgcgcgcaggcgcaggccccacagatccagctggggacgaacgcgcctccgcggagctccagagttgcggagtcacccacctgcggcggccgctgctgccgagtcaaggaggaaaccttcatgcacggaagtttctcgggggcggccgggctttgttcgcgccagaggcgctcgagacatctccgggaggggagcgcgggcggagcgcacagggctagtttccagcagcggcggcgcccctttccctgccccaccacgcgacgtcctggccgtggcttggggggacccgggcgccctccaggtgcaggcagagggtcgggtgccctcgcgttgctgttgggctcccctgaccagggaggatggaaaggaaggagcaggcaggcttagctgccctagaccggccctagaccgggaacctggaagcagatctgacttccacttccaagggagaaaccgcctcccgcactggcgccccgaggggagagagaagcccagctaggtttccgcgtggtccgcgtggttggtgaaccctcaggctggggggtgccccgcttggcgtgcaaggccctctttggagctgccgtgggacctggctatgcgtcctgtttctgtctggaggcggctggaacgcggtagttttccacatccatgcaaccagcttgtcagctgctgctcctcagct

SEQ ID NO: 9016 - DNA, 6000 bp, Homo sapiens
agatattgagggctctgaagcctagttctgtcttctctggagcagctgtggcttccccgtggctgcttggtgacatggattagcgctacgtgggctgcagcatttgggatccaggctacctagaggggcatcgggccagggaaaacctcggattagcaagcaataaaaacatgacctcactcttcctcaaaggagcccctggtcttccctgtgtgactcagttctttccatctgtttgtcccgctgcaagcctctttctgcgctgactgtgacattggaacgtggccttcctgtcaccccctccgtgccacgcactgaaggccacccccacccacctgggaaactaagaactggatattttgcctcattcacttgtactgtaacaatgtatataatttggttggtatttcactatttaatttttaagaagcctattttactagtgttttatatgaacaaagtactgcagaagttaaacctgtgttgtattttttctgagatgttttgctttaagagatactttttgctcagtttttatatgccagatacagagaatttgtagcggttatttttgtatgatctagtaacttgcaaacagaccaaatggatgagaggcggggaccgtgcagctgtcggctgatgaggaggcggccgccccagtgctgatggagatgccactttcgtgtgactgcgaacattaaagcacaaaaaaatccaacctggagttgtgtgattttgataccaaagtaagttcacttttcctccaaaaggaagtttttatttttccaagatttataactaaagcatacacttagatgacttattaacattcacttgatacaacatataaacaaaatagtaacagattctgagtggttattttgtggactgtgacaagcacttcaaatacaaaatgttaggagggcaaaacggtgcgggccctcgtaggtcaggcaggcaccagtgggctccttcctgctgaaagctgcggctgtgagatgagaccgctggctgggtcacagagtgaaatccagcgttccgtgtgcggacgaggagacaagctgtcctggccagccatcgcaccccaatgtcttcagcttgacgttgcttctctgccagtggagcctcctccaccacctgggaacatccctggccatctgtccctgaagtcctcctcaccatgacgcagatcacaaggcacccactaaaggggcaaagccaggaatcccgtgccatgtgatcgccccgtgtggcacctgccactcgtctgcaccaaacgcactgccagttctggggaagaacagcccagggaagctgctggtctacggcctgcctgagctgtattccaagggtagagcagctgcctggggggaccctgtgggtcccttttctatagagccgggacaaatccacagccctgcagtaacagcctgccacaaagagcaggcatctggagggccccacacacatagaccaaaggactgagcccgcctggcattcctccactcacagcacaaatactcagccctgcagccagggaagggtggggtctccctttgctgcccaagtgtgcccccttgcccgtctgatctctcctgttaggtcagcctcattcagggctttgtgccaggtcctgtcctggagtctcagtccgggacagcagcctggctcttaggcagtccagaagcagcagggcaaaggggggcaaatactaacacggggtgtcacgggatggccaggaggagtcctgctcgccacccaggctcactgtcctaaacctccatctgaaaccgcatctcgggtgacctcagattgtgctaggaaagcctagttaataaatctgcctcatctcgattactgtaacattttgctgcacttccaggagaaagctagagcccacaggttaagcccactgggcaggtgagcagcgtgcccccgccccgggcctcccttctggaccagaggctgactggttgaagtcaggagccacgcagcccttatggactcacaggggcttctgggcttccctgtggggaggcccagttcatgctctgctggcaggtgggatgaccaggtcaaattcacaagtgtcagggcaagggcgatgtggcctcaagtcctggtaagcgctgtacttaccctctcctggccccaggggtcctgtctgtaacctgggggctttatgtaatgcacactccaccatgtcatgtagaaggtgccgactgaaccccaatctgaaaaggaaaacagctggcatgaggctggcccgtgcacggacgctcacgcgcctgctgctgtagaggcgagacgtggtacactgtgcactcgggacaagatctgaacgggtcagaagccgccgctgatgttgagcctggaagcctcagcagcggctctacacctggaacacgcagggcccaagagcacctgctgccgcagagacattttctctatggctggcagctgcgggtggggactcagtgaaggctgagagtgggagtgatctgaactcccccgcctgcccacccagggcgacccaggggtgactgggaaaggcaattgggctccactgctccccaaatagcagcgaataaatactgagcggcagggcactggcagcgaggctccctgcttggctggttgattgaggacagggcatgcttgggccaaatcaggaggctgccactggtcttgcctggagaagatatgaaggctgtaatccaagctcccagccacacaaaattctgctgggctccttagctgtgagcattgcctgctccaggcacatcacccactgcgtgtgcagagaccattgcccttcctgggtgcctgggagctgtgtgtgtgtgtgtgtgtgtgtgtgtgtgtgtgtgtgtgtgtgtgtgagtatgtgacagagaaagagagcccctttccccagcctcaacagcaaacccttctggaatgccgtgccacacggggcgtcactggactgcagaggatgctctgaagaagcaattctgttgcacagtcccctgcagcagctcctgcacttcttggattagcacgcccccgagatgagctctgcacacacacacacacacacacaacacaaaagcaactaaagaagcaatttggtgtggtgatatttgtaaaacagaagttgggcaatgtctctaatactctttttagggaagtggttctatagtcctgccgacagtaggtagcagcgggaatgctgtccccgtagaacaatgttgtcagcacccagtatgcttgtctttctgttttctggggcagtggagggggcagcctgaccacccaagtctcagatcacccaaaccctatacaaccacccagcacccatcaatgtccccatcagagccccccgactccacctcacagtctattctgatgctgcaaccagatcccacctgtaaatcatctaacaaggaggtcaggcagctcactcaggctccctgggaaacctgccctggccactgcactaagttgatttacagaaatgtccagcgccccagaacttcggggcatcaccactgtcgtttcaagaaagtgtgatgcatgtccacaggttccagccaggtgagactgcacctgctaacagtggtcaacaggtcagcaaagattagggcccagcacccagagggtccttaacctgtacttgtggccaggattggaagacttgcgttcacggctgtccctggcacacagtacaaggaatgtcaccagttcccaggcccagcaggcctgcagggctaggagatggcagtgtcccctaggggctgggctggggccttctccacctttccaccaccatcattacagggacaactctgcgaggagctatcctcatggccaagtccaaaatccagatttagttttacctaaatgttttgaaatgaattggtatagcagttacagaagaaatttatctggagtggccactcctgatttttatttcaagaggtcaccaaccttgccatgtatctgccagcagatgtcaaaggtggatgagcaagggacccgcggtgctgggaaatggcaggtgaaagtgactttgtgttgccccatatctgccagtgcttagagagagggccctgaggaggcgctgaactggcatcagctgtgttgaacagtccccagggtgaccctcccggtggcccaggcttcgtgtggtcctctcccctaagtgccttcttacaactgagagatggcggcaaaggtgaaggaagccacggcttgcccatgtcatcctggttatataagactcggcaccctagagagaaagactcccctggtggctttgaaaagaaaacggccgtgctttgcactgcctatggagggacaggggtccgccagcagcttccaggagctgagtaaggcccccagcccgcagcagaaggacagagacccctacacacccagcttagggagagaggcccctgtggacacgtggcccctccgggggttatcctccaagggacattcttctgatggggacatcctctggggggatttctcttgggggacagaaatattcctggaagaggggattctctgcggggcaggcatcctccggggagagaatcctgctgggaggacatcgtcgggaagacatccttcctaggtacccggctcatcttccggggagaccgtcctctggggggcgggcaggctttggggacattttcgggagggaggatctcctagggcgggcatccttgcgagacggggtggggcgaatcctcccgggtgggcatcgtggggtgggggtgggcgttccgcgaggggcatcctcccgggcggacgttgggggattctcgggggagggaggggcgcggggcgggcgtcccggggagggaggggcgttgcgcgcggacgcgggcggggcctgggccgctccgtcccctccccccgcccgccccccgcgcttcctctgctttcggtttcgcttccgcctccagcgcgagccccgccgccgccgagcatggacgaccccgactgcgactccacctgggaggaggacgaggaggatgcggaggacgcggaggacgaggactgcgaggacggcgaggccgccggcgcgagggacgcggacgcaggggacgaggacgaggagtcggaggagccgcgggcggcgcggcccagctcgttccaggtgcggccccgcggcgcggaagaggcctggggtccccggcgccccccgcccggctgcgtggacgggagacccccccatcccgggcggagacacctggagcctcctggagctcccgcagccccggggacccccccccagaccggccgacccccagccccagggcccggcggggaagtgcgggggccgcgcgtgggtgacagcggagctgagcctcccgggccccatcgtgtgtgggcgccgttccccccgggggtgcctcgggcgcgtcccgcccccagccgccgtggccgcccctgatggaacccctcccgcctcgggcccgcgcctcggcctcctggcggcccctgcgcaggccccgcggcctggggctggggctggggctggggctggggctggggcccgggccgggtctggcctgggaggcttcgcgtctgcacctgcgggagcccggggcgggccgacggggcctccgcttgttacttttgttaccgccgggcgcctgtcatcgccggggttacttttgttgccgcgctgggaacgccacactgtcgcagtccggcccccctgtcggggagctgggattgatctgggagcggccttccagctgagctgcccgggttgcggagggccgggaagtgcatggaactcgacggctccgcatggattctccccttggcacccagcactgtttgcgtttgcgcctggccatggtggagcgggcagtgagagagcacggaggggctccgccctgtcgccgggagggcagcggccaggcaggctgggcaggggggtggggtctggctctgtcccacaggacggtgtgacccctgggtgggctcttgacg

SEQ ID NO: 9017 - DNA, 6000 bp, Homo sapiens
atgtagagaagatgagttgaggacagcttttctaaggcaatgtgatgtctttgctttcttatttctctttctctgcgttgttagttttgaagagtggaggagctaggggctccagaaagaatcttacacatgtgttgaagacattgatgtcatagggagcggggagctgcattcccttctgggctgttactgctaaatctcagtatgaacagaccaggcggaaagcttggtggccaagcagtctgtgtgcttccccgctgatggagaacgttgcgttgttcacaatagggcctcatgggtgtagccgcatggcagacccatggctggcgcagctgcctgttgccgtctgtcttcagtaactgctgctctgttaactgttctattctgatactacgcgtgttgttttttacaacaggtatgtttttgtttcagaaatatgtattgcttttctcatattttttgcaaattgtattgtcaacatgggtcatttaaagtcctgtatgaaccataacctgctgtggtacctttgtacatgtttgattctgtattctttattccagtgtggcatatgtgcccctctgtatcttttgagaagtgcggaataggttgcttctaccacctgttcttaatgtaacagtaaaagttttcacatttttctcagaactgttatctggaagctctcttttttcctaagggtattttaataacaaatactgatgcatttgtattgaaagttgatatcttggaatggaaggacagaagaaagctcgcctcttggaactgtagttggctctcctctcactctgacagtgctgccccttttagtttgtaaatctgtacttggtgtgtttaatttgaaacctatcggctgctctcttgactggggcacttaatgtttcataaactaatttccttggtgtgaaggaagtagaacttttgagctacccactgcatgattttaaactgattttaatagcctaagtaattactctttttttttttttttttttgcttaatgaaattttccaaacatattaaaaacagagggaatacgccagcacatcccagtatccaccagtcagcctgacacccaccaccacctgccagagccccaggcaggagataactacaggtgtctgattctgggtggctaccatgctttcagggccatgagcgtcttcatgagtggaaggcagttgtagggttcttggaaaggactcagactgaccccttcaagggcctgaggtgaaattcagaaactgcccatgcagagaagctgagcagcgggcatcatggagcgaggcgttgagagcttgcatgtttgttgggtatcagagaacagggaaggcctctcctcacctgctgctcctccctatgtggcagtggcatgtcacagtgttcttgatgttcacacacctgtgccagtccattagcctcacgggtcagaaggcagcacggtagttcttagtggaggtgggcatcaccaggaatgcttcagtgtgagctcccacactacagtctggaggctcacaccatccttgcacacatggccttcctgtcttagatattctgccttattttggaatgccatctttgcttgtggtttttcacttctgttaaagtagaacatggggtttgaatgggcctttggtgtaactagctatggcaagaatcttttaagagatgtgctctttggagatacaatgtcctgagcttgtttgccttttccagaagccacaaaatggctttgaagataaacaggcccatgctacagagccaccggcacaaggcacctggtgtgcaggagctgaggtgcagcctgtggttaattgataataatcatgtccccacatctgcacagtgggggctgtttctctcatttcacaccccagtatccaccagtcagcctggtgcatgtgtgcggggaatatttaaagggaatgtgacgttctgatttgtctgtaacatttcagtgtcacctagttcaaggccaggtttacgggtccaaattgtccatagtacagaagaccatttatcaggtgaagcccgtaaagccataggcacagctataaccaaaagaattcatgaaaggagtaacaactgaaggtgagtgggtttcctcatgtttgtaaatgcaggtcacgttgcaggctcttccgccagctgtccgtccatgcaaggcagttggtcaccccgcaggctcacttcggagatgaagagtgctgggtgcagcagcgcctcctgtccttgggtctctgtgtatttgaggtggaattgatgagcttgggaaccagggagaagcggtggagctgctgttgccttgagctgcccgtgtcaggcaaggtctccgcctggctgtgacttctgcttcctggagacacatctgtaggcgttcctcacacaaacaaggttttctccctcttgtggatcacggtgtgtgactgacagctttggtaattttcccagctggctttgaaagtgaagcaggctgacccgtcaccaagaattctctgccatggagggtcatggaagaacgggaagaggtgctggcggtcacagcagcccagggttcgtctgtgctcgtttatagatttgtgtgcccatccagtcctcactgggccctcccagttttagaaatgttgaacactagtgcttgtaagattcgaacaatgagtttaccagctctgagaaaaatgaactgctccagaaccttcaagaatgtttctctgtatcacgcccacatcacaccgaatccatttgtcgtcattgcagagttcatctttctggttttgagcaccatctcacacagttctttgtctttttccagtctgctgttgactgggttagctcagcccgaaaggtgcccccacctttgaggcagttcccgcacgtgatgtccagtaccgcggtcttccctcttgctgctgcctgtcagtcatggcagaggaaagtgtcatctgtcagtctccttttcatggactcctcatcttgagaattgtagttgggctggaaggttgcagggctaagtggggtgcagggaggagccccaggcccagggctggcttgtcttggtttacaagaagctgtgcggggtctcctggggcgtctgtggggggtgtggatgcagaggctgagcaacgggcgccatacgtagtgaggtgtggatttgctttaggaaaatctctagcatcgtctccctatagcagcacttgaaataaacaagaagttaggtgggccaggcccaacaagagggaggcacgcagccttccagaagcagaggccagtgggtgctggctgtgactgccctgtccgcaaggtcaccctgtgtccttgaaaacccaggtgttgactgtctattgtccctacataatttttcaccttaggcctcaaagatgcttgggtgcggggcagctctcagaatccaccagaagcgtggagagcctccatctggccactaccagcacccagctttataatgtccctgtgagatggccccttcacccacccagccatccctgcatggcccgtttcttcagctcatccagccttcactcaggtgtccaggggtgcctcctcagcccaacctatttgaagtaacaccccttccctacccctttcactactttgatttttgtctacctgccccagaacatcagctccaggaggaaggggactttgggtaaccagatggcaaatgtctgctgcagcatgatcacagatctcggtaggaaatcaccatcacagagtgaatggaagcgaatcacctcaaagagggtgctgttgacagcgatacgtttagcaacagtttccaaacttcctggctatgggctagggctgtttggggcaataaacctctctctgccaccatcttttcacctaccctacgtcaggatggatgaaagtatgaccttgcttttcagggtgcccgtgtctttctgttcagagggccctgggagcaggccctgcagtgcagtgggttgggctgttggagacctgagggctagggggagggagggggtaaatgtgggtctgttctaagtgcaaggccctgccttagacgtgtctccctcggcccctgggtggtggctgctgcgtggaggatggactgaggtgggccctagtggaggtgggggcaacgcctgaggagcaggccctgccgcctcctggggaaaggctgcatggttgaggccttcccctgctggcttcatccttggcatggcagcaggagcacacagagtgggggccccaccccgtcacccctgcccccgagcccagaacctggcctgtgatgggtcctcaggacaccttttgtccaggaacccaggggccaatgacaaccttcacaggcatctgctgagaagacatgggccagcgctggatttgtccagctctcccaggcttggtccaagggctcaggagtggacccatccctgccccgaaagatccattttaaaaatcagtgaccctgtacttttactctctttgcacttggttaagactttatccctgattttatttgatcggtaaggcagggactgccatcattccccattttatagacagaggacagacggccccatggctccgtgtcgtgtccaagggatgggctggcacctcttggaccaggcttaccaccagggcccttctctgaagccccagtctgaccggcctgctgctgggaatccccctctgcccccacactaacctctgctggggctgagccagggcgcgtcggacagtcagggcgacccagccagggcgaccgttggccccgctcctatggggcagcagggaccgacgtcagcagggtggggcgggcacccgagtggtatgccccgccctgccccgcctgcccgccctggtggccgtctgggggcgacaagtcctgagagaaccagacggaagcgcgctgggactgacacgtggacttgggcggtgctgcccgggtgggtcagcctgggctgggaggcagccccgggacacagctgtgcccacgccgtctgagcaccccaagcccgatgcagccacccccagacgaggcccgcagggacatggccggggacacccagtggtccaggtgtggcgggggtgaggggagggggggtgggagcggtggagatggggccgtggggagggagctgagatactgccacgtgggacgatgctaggtggggagggctgagctgggcgggctcctctggctgtggggccccctgtgttccttgtgggaggtggaaggaagtgagtgccctgtccttcctccctgccatgagattccaggaccggacctggcaagtgccctatcccagccagtgttcctggggctcttccaggcagggctatgttccccaggccaggggcattgtcctggacagtcaggaggcatacccctcgccaggtggaaccaccctgtgtatgcatgaccctgacaagcaggcgccaggacagtcaggaggccaggtagggggcacgggctggagcctgcagctggacggggttggggggggtcctgccaccacgtgccagctgtgtgctgaggacgagctccccgctggcttcagctctcggagcatttggtggtggggagaagcagggcctgggcaggtcgcctggccaccagcactgctgcctgtaggaggctccctgggcaggtgacgcctcagaaaccgggcgagatggtgaccgcgggccattggtcagctggggagggcctctgccagggagctcctgagagcagcccccacactgctgaaccccttggctctgggtcttgggctgaggccttaagtggctggaccctgggcctagactcaggccctgtgggttccagagcagtctcctgcctgcactgagtccccagggtacctaccctgaccatggcaaggtaatggcaccttctggccccaccagttcccagctgtatgagggctgaggaccctagaagtgctgggaagagttgtaggaaggcccaaaggggcagtgccaccatcggatgttggc

SEQ ID NO: 9018 - DNA, 6000 bp, Homo sapiens
ccaggtttaagtgattcttctgcctcagcctcctgagtagctgggactacaggcgagcaccacgatgcccagctaatttttgtatttttaggagagacgggggttcaccatattggccaggctggtctcgaattcctgaacttgtgatccgcccacctcggcctcccaaagtgctgggattacaggcatgagccaccacacccagccgacactgtctcttaaaaacaacaacaactaataattatttccagtctgtgcctatgatttttggttcagacctataaaaagagactatctttttaaaaatcggtgatttaaaatctgttttatagtgggctctccaagcctcccaccatgaggtccagtagactgggcccgaaatgaatagtgcatctggctgtgagactttatgccagcaggcagtcttagagctaagaggagatacttacctgtacctcatatcaaaaaggagcttgagtcctaggcagaaaatatgcacgtgctgaatgtgcgcctaattcttccctatccttatcttcagactttaacgccaaaaggaaaaagaaagtggcagagatacaccaggctctgaacagtgatcccactgatgtggctgcccttagacgcatggctatcagtgaaggagggctcctgactgatgagatcagacgaaaagtgtggcccaagctcctcaatgtcaatgccaatgacccacctcctatatcaggtaaggggagtgggggaggctgtgaggggagcttatctaggagacagggggaaaagaattccaggatctttaatttttatggtcctttcaaaccaagggtatatgaataaatctagggtgttttgggaaatgcttgggcccactctgaaaataaggccaaaccgataagtagaattttattcaaaagtggaatgagttctttttttacttgtttttattttatttatttttgagacggagtcttgctctgtcacccaggctggagtgcggtggcacaatctcagctcactgcaacctctgccccctgggttcaagcaattttcctgcctcagccttcctagtagctgggattacagacatgcgctaccatgcctggctaatttttgtatttttagtagagatggggttttgccatgttgaccaggctggtctcgaattcctgacctcaagtgatcagcctgcttcggcctcccaaagtgctgggattacaggcatgagctaccacgcccaggcaagttctttttttattagggattaaaatattggctaggcaagtgaatttattaaaaatgcatatgctttgttctgcatacttgcttggcaagtgttttttaaaaatgcatattttgggccgggtgtggtggctcacgcctgtaatcccagcactttgggaggctgaggcaggtggatcttgaggtcagaagttcaagaccagcctggccaagatggtgaaaccccatctctactaaaaaaaaaaaaaaaaaatacgaacattagccaggtatggtggcaggtgcctgtaatcccagctacgcaggaggctgcagcagagaattgcttgaacctggaaggtggaggttgcagtgagcagagattgcaccactgtcctccagcctgggtgacagagtgagactccgtctcaaaaaaaaaaaaaaaaaaaaaaaatgcgtattttgtggctgggcgaggtgactcacacctgtaattccagcactttcggaggctgaggcaggagggtcacttgagactggaagtttgaggccagcatgggcaacattgcgaaaccctgtctctacaaaaatttaaaaactagccagacatggtggtgcacggctgtagtcttagctgcttgggaggatgaggcaggattacttgagcccaggagtttgaggccagcctgggcaacatggcaagatccaatctctaaaagtaaagtaaaattaaacacacacaaaaacaccctcttttgtccgggcacagtggctcacgcctgtaatcctagcattttgggaggctgaggcaggtgaatcacttgaggtcaggagttcgagaccagcccggccaacatggtgaaaccccatctctactaaaaatacaaaaattagctgagtatggtggcacacacctgtaattccagctactagggaagctgaggcaggagaatcgcttgaaccgaggaggcggaagttgcaatgagccgagattgcgccagtatactccagcctgggcgacagagtgagatactcaaaaaaaaagaaaacaccctctttttattgggaaatactgaaatcctttggagttctaaaatcctgtaattctgtgaaaagagttacctaactaatgtgcaaggcccatgtggtgaaaagagttccttggaatgaagttcaaaatagtaaaagtcctgtagaacagtgaatccactctgctgctcattcactcagtgcactcaccttgtagctttcctgccatcatggcaaaatgccaagtgctgaggattctttcagttggcaaatattagttgtgctatgattgccaggtactggagatgattgaaacaggacttctgccaccaaaaagttcacagcgtcatgatgtcacccagtaggtgttgagttgccacttgttattatccttggaattggctgcttcagagcagtcagctttttgttggaaggctaaggcagtgccatgttcacaccctgaatcctgagatgatgttcttctatcaggttccaaacttccctcatctttttataccgtgaagcctacgtgtgaggaagtgttgcccagccttactagctttggatttgggttgtgagagaaatgtacgcttattatacagcacttggtttggttggaggaaatgtacacttgttatatgtataatggctagagactgcctcctttcatgctgtattggacttagcagctgaacacaaggactgtctcctctttgcagctctttagttttagaattgctgggtcaagagttgttaggtggttctttatgtgagtctcaatatacctttctaaacagcttagtgctcccacaactttataggcgttagggtttttttcagtggtctgttgttcccacattcatgattttatttgatccttggaatatcctcattttgtagctgtggactttgaaattcagagcagttcccagtgatgcacagtggccttctgcacgaggcgcctggcctccttacgtctttgctctccttcccaccctgctgtattgtctcctgggcagtctgtgctcccttctcttagggtcattgtgacttgcaggaaacataatgtttggaaccaaactagggattccctgccaaatgttgtatcttgagtcatatcatcctcttcaggagaagctgacatgtgccctctaggccttttgtgtcatcccagaatgttttgcttctggtctggcttctcaggcattcctgcaataacgtgccttttccttcaatagggaagaacctacggcagatgagcaaggactaccaacaagtgttgctggacgtccggcggtcattgcggcggttccctcctggtgagaagctctcccggtcctgccacatttggaaagactgtatctgttccaggtcataccatgtgacctaatatgctggaccctgccgcctcagggaccttcagagctctccttttgctgagtcatccttttcttgactggtcactttcagacccccactgtgaaagcctgaaccaaaaataatttctcctggcctagaggtggtgaatgagagaagaggtttttgtttttccttgaagccacaaaaaggagttaataaggattgttagagccatcagtctggcattaaagagcagattggtgtggaattgggcaccaacaagaatgagtaatatcttaattaggtttaaaaacgatggtaccttgcgcatacatatgtaagattccttagagggaagagaggccattccctgtttgtgtaagagtatattccttaattaacaaattaagcagcaatagataaaaaaataaataaataaaaacaaaacaaacaaacaaaaaagaatgtattcctaaaattacctctttatttcaggaagaaagaaaagaaggaccgttgtctcaattttcacagtgaagggaactgggcaacaaacctcacatggatgacctatttttcttcctctggcaactccacctttaggtcatgaagagaggagaattgctaaagggaacaggagcctctaagctggctgcctccctcttctgcactgtgctctggcctggcttttgttgttgaaggggctgctttcctgctggcattcttgctccctggacagattcttgcaatacccaggtagcagtagcctgccagcgtggttttgataaaagcacatgcccacggtccattcccttttcctagcctgctggtttggatgagatcatataggacagatgcctcccttttttttttttttttaaagacagagtttcactcttgttgcaggctggagtgcaatggcactgtctcagctcactacaacctccgcctcccaggttcaggcagttctcctgcctcagcctcccaagtagctgggattacaggtgcccgccaccacgcccagctaattttgtgtgtgtgtgtttttaatagagatggggtttcaccatgttggccaggctgctctcgaactcctgacctcaggtgatgcacgtacctcagcctcccaaagtgctgggattacaggcaagagccacccccattttttcctaggtaacctgttttccctctgaaccctttattcctcttccattgatgtaatatctgtgatacgctttctgtaggctgaacttacagtgtggcttcatattctttttccattcatggtcttctgggcttggctcactgcttttctgctgaaaattcacacagggtttaatttttactctcactcctttcactgcttcacctatcagcagccctgggtttgcttcgtttccttatttatcttttagggtatgctttttatttgagaaggggtggggtaaatatgggcaagaggtgagttttgctcttacctgcaatcctttgtccggtttagtttgggcccttacattagctgctttctctctctgagtatgtgtttgtaactgaaagctaatggtgtggagaagctgtgcatgtgccattcttctaacctggctcataaggccaaggcatttttactgctggcagcactagctccagcagtaaaagaactccctgaaagaactcctgagacaggcttccctatttccagctataatacatctttggatcaagaggatcagtttttcctgtaacgtttgctttggtttaaaggggaccgtgtaactttaaaatttttttatttttatataatttcatacttactgaaaggttgtaaaaataggacaaagaattccccagataccttttacccagatttccttttgttttcacattttactacatttgctttttttttcttggagacggagtcttgctctctcgcccgggctgcagtgcagtggcacgatctcagctcactgcaagctctggttcctgggttcatgccattctcctgcctcagcctcccaagtagctgggactacaggcgcctgccaccacgcccagctaattttttgtattttttattagagacggggtttttcaccatattagccaggatggtctcgatctcctgacctcgtgatccacctgcctctgcctcccaaagtgctgggattacaggcgtgagccaccgcgcctggcctacatttgcttttttagctgctttctgtctttccttcgctttacacatagacatacactttttctctgaactatttaagagtaagttgcaaacatgacatctttttaccccaagtgtttcaggacatatttcctaaatataaggctctcatgtaatcacagtacactgagcaacatcagtaacaacactgaaaaatagtt

SEQ ID NO: 9019 - DNA, 6000 bp, Homo sapiens
atcgaggctacagtgagccgtgtttgtgccactgcactccagcctgggtggcagagtgagactctgcctcaacaaaataaaaatcaaagaaataaaatgactcagtgaaatgtggccatccagggtgagaggaaggaggcagaggggagtcgggagtatctggctgggatgcccattaggctagaccagaaagcctgagtggaatggaggatggaggatggagaagagagcttcgggagggcgtcataggcctgaaatgcctccatggagatatctgcctttaacattcctttgggttttttgtttgttttgagatgggtgggtctccctatgttgcccaagctggtctcaacactcctgggctcaagggatcctcccatctcatcctccctagtagctgggattataggtatgtgccaccgcacctggtttactttttgttttttgttttgttttgtttgtttgtttttgagatggagtctcagcagtttcagtggtgtggtggggacaaaagacaggtatgagtcggttgaagagacatagcgggaggggcatggagctctggagaaacttcctcttaaatgtagctgagggataaggcagcacccggagggcaaggggctttaagggaaatttttttttttttttttttgagatggagtctcgctccgtcgcctgggctggagtgcagtggcacgatctcggatcactgcaacttccacctgccgggttcaagcaactctcctgcctcagcttcccgagtagctgggactacaggcatgcgcctctatgcccagctaatttttttgtatttttagtagagagggggttttagcatgttggtttgccaggatgatctccatctctggactttgtgatctgcccacttcggcctcccaaagtgctgggattacaggcgtgagccaccgcgcccggccggggaatgttttgtttttaaaatgagcccttttttttttgagatagggtttctctctgtcaccacggctggagtgcagtgatgcagtcttggctcactgcagccttgacctccctggctcaaacaattctcccacaccagcctgctgagtggctgggaccacaggcgtatgccaccatgcctggctaagtttttgtaattttagtagagacggggtttcaccgtgttgcccaggctggtctcgaattcctgagcttgagcaatcctctcacttctgcctcccgaagtgctgggattacaggtgtgagccaccaagcccggcctaaaaatgagatgttatacatttacttcagaccccagattctacaatccacaggcaagataagtggcatcaggggaggacagcagaaaactgttaagtgcgccttgtggaacccagcggttacagtttcaagtccacagcccagtaaagtctgagaccccaagggagggaatgagagggaaagtgggtgcctgcgtctgggtccctcaacctgcctgcctatgtaaggacccagtggggcacaggacaggagatctggggcaccagtatttgccttcagcgtcagacgatctacacaggacaggaggcaggtgggaggactgaaggaaacagcctctgaaacggtcagtctggaggcagcaggcgtgtgggcctcaggggttccctccaggaaggccgagggaacagaaccgcaggggcagagcacaggtgtagcagagaagggctcagtgccagttcctttgagagacggtcagggagcggacagagggggcccatagccgactaggggcggcttggtcatgggctcctctttcctcagtgggctgaggggttaggtcctttgaggagcgctgaggagactgtggtaaggggaagcgccctccatcccagaggctttcctggaacaagtgggttggaaggaccaggtgtttgggagctgctgggagcaggtgcagaagccaaggcattcccagatgggggagactgggggtggcaaggtggcttttcagggatccagcctgcatgccacctatgcagccatgctccgggggcgacatccgcctgtgtccttcagctcttcctcagcctccacccgccacccgggagtcagtgcctggactggagctctagctggagggcgtctaggaaaggtcccaaggggtgcgcaggatgacctggtgtctctccagagtcacccctgctaaaatactatgtggccagccccaagtcagttgcaggtcatggtgttgggatcttccacaaggcctcctggagtcgcgctgggggagggtggggtactcagtctgtcgcagagccccaggccatccgtcgccaagaggagcactccagcgcttccctcctaatgcgttcttatcttgccgggaggagaactgggccagccttactcacccaatctatgcatgaggcttccccaacgcgccagaagcccttccttcgcagaggtgggcttgccccggcctgtccccgttcctctaccatggttagggcacagtggccgaggactccgtcccagcgcggctgagccggaaagcgatggcggccggaggggtcgggaggttggttagcgctttacggagctgcgtgttccgtttccaagggctgtagagccttctactgggagccaccgtggatcaggccaggggttcgtcagctgcatttgccggatcgcatcgcagcacgcgcacccacacgcgcacacgccctactcgcaggagactaagcgccccgaaaaggcgcgtccccgggcgggtcgcagccggtccaggaaaggggacagggcgcaagggccatttggggaaggaaaaagggggcgaaccatgaccttgacctcatagaaggccgaggacgtgaagaggctggcagataagttggcgaggctcgcagcgaaaacccaaagcagccgagctcggagagcgccgtctcagcgggcgagggcgtagcccggggaatgcacggaggtccgtctagtcagtcggggcgcgcttcctggaggaggaggagaaggacttgcggccggagctaccgggataaatgcaggaggcggggcagccagcgggcgtggccctgcggaggtccccggtcgaaaggaggagacaggggccggccgcgtacttaaagcggacgcgggggaagccctcccggggtctgcctcagtcgcacagctcggtgggctcgtggcgcagtcgaacgttttcccagaagctccccggccccgtccagcccctaaactcgcgacgctgggtctgctgggtccggcgcgcacaggctcgaaggagccgggtctactcggtttggcccagcagctgcgggcggcggggagcagcccagcccggctggagcagcctcccgcgggtgagggcgcggggcgggcggccgggtcccagccctcggcagctctgcctaccgcgcccgggcgcggcgtctgagcggcattaggacccaggcgcggcgtgggggtgtgtcgccggctcccgccgccggcccgcccgagtcgccgagtttggggtccagaagcgccggagcgccgcgtgaggagcccggccgtgagtgcgcgagtgtgccatggccgcggccaccaggcgcgtgttccatctgcagccgtgcggtgggtgcctgaacccgggggcgcggcgggaaggccgcccgggtctccgccaccgtctcccgtcggggaccccggggagaacgcggatgccgtctgcctgcgcgggccggggccggtgggcgagagggctgcgggattcccagccgcggggaggagggcgcgggtgcgggaggcccgggcgcggcttcgcggccaccgcgcgcttggtttcattagggctctgctgtcgccgtcttgaatttcttaccaggtttgaacagctgatgcagcgggtcgagggcggggagctcgaaagtgggcagggcggagctgtggggctcccagcgccccgagcgccgagcttttgggagcctggcgggccgccgcctcggaaggtctcattttaccttccgcccgggcatcttcccgtccggcgccgcggtgggagccccggaacccctggagttttgggagtcccgggacccctgaccgtgccctgcgcggccgcagcggtttctcccttgctctgacacgggagggccagccctgggtccccgccaggacccaggtttgtacgaccctttacctgcacgtgggccgccgggacggaagcggagtgtgcaccggcccaaccctcccagaccctcgtcgcccacggcctgggacgcgccccagcgcccccgccccccacttcaggatgcagccccggctcccgccccgcgcctgcattcacatcctgcgccccgacccccggggtctccgagtctggaggcgctttcctctcgtgcacgcggcccctcctgtcgcttccttcctccgacagcgaggcacaaacagccgggaccatccggggaccggcccagggagggcgcagcctcccccgacccatgtgtccctcagatactcctcccacccccaattgttctcccttttggaccaacggctctggcttccaggcggccgggacgcggtcccaggactggagaccgttgcctgtcggcccccgtgtgacccggggcgcgtgacgggggtcgggggaactgcgcctgcaatgggcgtttatggcccccaggaccggtctgagagtgagaagagggatgtgcagagagatcccccgccttggcatccgaggagagagggggagaggcccgctcgggcccggtcccttcctctcgctgcagcggggcagggttttctcaggaaaacctggattagcgaacatggtactggtactaactcggtgggaagacatccctggaacgtctctcctcctcgcctctggcccgcctgggcagcccctagcagatgggctaagcaattgaatttctgagattaaggctggcttcccctgctatggggccccctcccgagcactgtcccctgcttccctttctccctagggtggcgtgggttgcatccctcggaagagcgaaggaatgagccaggtcggggggcggggagacaggtgcacacaggaggtccagggcttggtccatggggctggtgacctttctgcttcccttgcagaaaactctcccaccatgtcgcagaatggatacttcgaggattcaagtgagtacctctcggggagtgtgtgtgtgcagagagagcttgtcgggcaaaagcctccagggtgcatagcctacccaccagagtcctgtggctttgctcgcctatctgggccactctagtgctggaatgcttttggcttccactcttcgggaagctagacatgggcggatcccccgtggacctgagagggcaggctgcccattctcctgggctacttggaccaggtgaaccctctgggattcttacccaaggttttctgtgacaatggcctgttatctgactagccttgggccaagaattctgtgtgcccctgtccctctgtcctcacccagccctggagggaatatctgtcgttgtctctttaaagaaatataaggcctctgtgctgcagtccctcgggcaccttcctgctgtccctgcttgtaccagtccagctgtcttcctcctcatgtctctgggctggcttcaggctgtgtcctgtgcctagccccatgagtgacctgaccattcgagggttgtttgtagagcagtgcgtagacacagggctgatgttcccttacccagagccctcaggacatggggctctgtgtgctaggctgctggtgggcaggttacgtatggggctgggactaggacttggcattgcaggagccccccaggaacctggtagtgtcagctgggcaggtccttaatctaggggacctgagcactaagtctaaggtagagctgagggcatcaggggaagaatgggggaagaacggggctgtgtgaagggcagtggaggggactagtgggtgctggttgaggggcagaggggaggctgggacaagttcgggccagggg

SEQ ID NO: 9020 - DNA, 6000 bp, Homo sapiens
tcagtgcccatctactgagggccagggtgtgcccctggccattctggttgtgggcttcctggaagaggtgatcactctcacactaagactgaggaaataaaaaaggtttggtgttttcctagggagagagcatgccaggcagtggagttgcctaagcagacatccttgtgccagatttggcccctgaaagaagagatgccctcattcccaccaccaccccccctacccccagggactgggtactaccttactggcccttacaagagtggagggcagacacagatgttgtcagcatccttattcctgctccagatgcatctctgttcatgactgtgtgagctcctgtccttttcctggagaccctgtgtcgggctgttaaagagaatgagttaccaagaaggaatgacgtgcccctgcgaatcagggaccaacaggagagagctcttgagtgggctagtgactccccctgcagcctggtggagatggtgtgaggagcgaagagccctctgctctaggatttgggttgaaaaacagagagagaagtggggagttgccacaggagctaacacgctgggaggcagttgggggcgggtgaactttgtgtagccgaggccgcaccctccctcattccaggctcattcattttcatgctccattgccagactcttgctgggagcccgtccagaatgtcctcccaataaaactccatcctatgacgcaactggagtgagtctctttcttgcaacccaaacagctgggctagaacagaggagtcacatgttagtggggtttattcttagacaccatctgtaggagggggccaggggctgcaagttacatgacatttatcacaaattaccttacgctgaagtgatttgtgtccctttctgctccttgaggcttcgtgtgttgctcacatttgccacccacaatgaccagccccgtgcatggcacgcagtaggtgggcacgtgaactaagcgtttgtcttgtctacattgctgacagtggggagggtggagaacatggactaaatccagaggtgggacagggagagagcaagtcaaatgcagccagatgtttgggggctgtctggggaagagagggtgtagggaggaccataagcagctgctgaagctgcagctactggggggatttgggaatatccggcttaggagtcttcacctgcttctgcatacttccaaggggacatatgtccatcttggattggaggctctcagaggggttagttgtgtccgcttccagtggtctgaggcctcctgagactttttgtacattcaattaaagtgtaacatacagaaaagttcacacattataaatgcaactcaaggacttttccaaaagcgaacacacccagatcaagaaatagaccatcctacagtccccccttacactctgtaccagttgcagcccccacaagggtaactactgtcttgacttcgaacaccatagatttgatttgcctgtttttaaactttacttaagtagaatcacagagtgtgtacaatgactttggaaaactgtttgacaatatctattaaagctaaaatacccttgccctatgaacctgaaattccacccaccttgccaagggacaaaaagttcccctctaaatgcaccaggctgtcagggatgaagcgttggctttggggcccccattcacacacatgactttttccggggcacccaagcatcagcctgtcgtcaccaggtgccaccctggcgatctctgaaggctggagtcggagtgcctccctcagacatcctgttctgcgtcactccttgggagaagtcgtgtttacagatggtgggtgtcacccatgccaagcactcctaagggttaatgctcactggtttgcctggttcccaggacatttcctgatgcccctctggagggtgacgccaacaagccagtggagaagccatctttcccaggtgctgtcaggcgcccccggagctgctcggtgcatcctaggatccctcttcctcagctttggtttgatggcctcatctcctcccctgcaacctcaaaatgtaaataaaccctttctcagagacttcggcagaaaattcctctgacctgcacttggacacagctcatctgggtttgggaggtgtcaactgtgtaaggatgactctgatccccatgtggcttttcgactgtgtcccctctacagtcagttattagcactgactgtgctaggaagtgagcaacacacatattcccagaccacatggagctcaggagcttggggagagagacagggaagtggacgactacagggccttctgaaacgtgttgcagggagaagtgtcagtcaggggatgctaacctggctttgggtaagggacagcctctgaatgacaggacattaaagccatggcctgcagtttaagtaggagttggccagttcgaggtaagaataccagtaagcaagaacgccagagtagctcctcgagctgccttctgtacctgacatccacactgaagccagcccctctgtgttcagccttgctttactgaagaggtgtcgctgaggggctgctctggggcgctgctctgctttcctgtccccaacttgttctgagctcgagccacctccatactggtgctcctggttctcaggcctttgaactcaaactgaatcacaccactggctttcctcgttctccagcttgcagatggcagattcgggaactttttggcctccataatcacgtgagccaattgctataataaatatctctctccctctttcttcctctctctctctctgtgcaaatatagttccaattataagagcccctaactggaaaataaccctatggtgcactggtgagtagagaaactgtggttccctcaaaccaccgaacactattcagcaatacgaaggaacaaactattgatatgcaaaatagtgtaaatgaatctcaaaaacatcggaaagagggaaggaagccagacacagaagagtgcatgccgcatgattccatttatatgaaattctagaacaggcaaaacttatctatagacagagaacaacagatcagtggctgtctggggttgggagtgggcaagtttggctggaagggcacagggctctttctgtgagtgagggaatgtgtctgcattatagtgatgcttatgtagttatatacacttatcgaaactcatcttactggccacttaaaataagtgcattttattgtgtgtaaattataccttaatgaagttgatttgaaaatccaaagtagtaataataagtaataatctcgtagctggacagctgtggtgactcactcctgtaattccagcgatttgagaagctgaggcaggaggatcacttaagatcaggagttctttttatttttatttttattttttgagacggagtttcgctcttgttgcccaggctggagtgcaatggcatgatctcggctcgctgcaacctccaccttctgagttcaagcgattttcctgcctcagcctcccaagtagctggaactacaggcactcaccaccatgcccggctaatttttgtatttttagtagagatggggtttcaccatgttggccagactggtcttgaactcctgacctccagtgatctgcccgcctcggcctcccaaagtgctgggattacaggcatgagacactgcgcctggccaagaccaggagtttgagaccagcctgggaaacaaagtgagacccccctgtctacagaaaaattaaaaattttagctgggcctggtgccgtgtgcctgtagttccagctactcaggaggctgaggtgggaggataccttgagcccaggatttcaaggctgcaatgaggcatgatcaggccactgtcctctagcgtgggtgacagagtgagaccctgtctctaaataataatcataagaacaacaaggaccctctaaacgcactgatatctaaggtgtattaagcgaccaaaaaaaaaaaaaagaaaatcaaagtgcagaaaaacgttaataagagaaaaaaatatgtctgtattgtcttgagtgtgaaaaaataatctaaaagcctatgaaagaaactaatcatattggtttcctgttggtgaggagggctaagagcacggagacttttccctatgctttctgtactttttgattttgagatatgtgaatgtaggtttctctcactgctcgaactttcactaaccaaattactacattccaaattctcaaaaacaaatagatttacttaaaagtaggctgggtgcggtgtctcacgcctgtaattccagcgctttgggaggccgaggcgggcagatcacctgaggtcgggagttcgagaccagcctgaccaacatggagaaaccccatctctactaaaaatacaaaattagccaggcgtggtggcgaatgcctgtaatcccagctactcgggaggctgaggcagaagaatcacttgaatctgggaggcagaggttgcagtgagcccagatcatgccattgcactccagtctgggtaacaagagagaaactctgtctcaaaaaaaaaaaaaaaaaaaaaagatttgcttaaaagttaacatctccggccgggcgcggtggctcatgcctgtaatcccagcgctttgagaggccgaggcgggtggatcacgagatcaggagattgagaccatcctggccaaaatggtgaaacctcgtctctgctaaaaatacaaaagttagctgggggtggtagcgcgcgcctgtagtcccagctactcgggaggctgaggcaggagaatcgcttgaaccagggagtcggaggttgcagtgagccaagatcgcgccgctgcactccagcctggcgacagagggagactccatctcaaaaaaaaaaaaaaaaaaaaagttaacatctcatccaaatttgcaccgagtaggaaaacaaaagtttaaaacatgaaacagatgttactgaggccgaaagggtctcccaggcctgggagtctgcagcttttatgcaattctgccctctggccaccgccagggaagaaaggttgtctccgtctgctgcatcgcctttgcccagcaatgaagcccccaagacagcggcagccggttgcctgaaccttcctatccttgggggcacccagtgcaggtggatgacccgactcaacctccgccagggcaccctcggggcaggacgggtagcaaggaggggacagagatcggccccaggagaccacggaagatcgcgctcctggggccaacttcagcagcgagaggcggcctttgcccaccgcctcatcccaccacgccgcggtcctccaagaaccttcccagcggttctctcctcctctcaggagtagaggccctctgagaccgacggggagggacggctcgggccggtcatccgaggggccgcacggattccctcctccgcccagctccaccccctcgaggggcggcggtccgggagtggcgacccggctcccccatggcgcgcgccgtcggggcccctggccaggctccgagcggggttggcggggaggggaggcgggagcgagggcgggcggtgggaggtgggggcgggaaggtccgaaggcggcggcctgaggctgcaccgggcacgggtcggccgcaatccagcctgggcggagccggagttgcgagccgctgcctagaggccgaggagctcacagctatgggctggaggccccggagagctcgggggaccccgttgctgctgctgctactactgctgctgctctggccagtgccaggcgccggggtgcttcaaggtgaggacgcgggcggggtgcgccctgaggggcaggctaggcgcggtggtggtggcggggatgggttctgctcagagctcgggtcagcgcgcggagggtctcacggccccggcaccatacggccagtaggtcagggcgtggggactctttgggggggtctccgtgggacctgcccagggacgctcaagtgtgcttgggctggccccgggcccggact

SEQ ID NO: 9021 - DNA, 6000 bp, Homo sapiens
ttttttttttcttgagacagagtctcactctgtcacccaggctgaagtggagtggcccagtctctgctcgctacaatctctgcctccctggttcaagcgattctcctacctcagcctcctgagtagctgggaccagaggcgcacgccatcataccaggctaatttttttttgtatttttagtaaagttggggatttaccatgttggtcaggctggtctcaaactcctgacctcaggtgatttatccgccttggcctcccaaagtgctcagattacaggcgtgagccaccatacccggccaaaagtagtggaaggctctcaggaagccggattgccccagtgtgagcagagtggcatgtaagctggttattaaagagcctgcactggatgtgctgccctgtgtgccactgggccttttgctgcccgttgtttcaaatgcttagttgcaattatcatattaaatacaagataaaataaacttgtcttctgtaactttgagatctacttttttttgttagagaccttttctgacttggtccaggtgggtggctcatgcatgtaatgccagcactttgggaggccaaggtgggtggattgcctgagctcaggagtttgagactagcctgggcaacatggtgaaaccccgtctctactaaaaatacaaaaaaatttagccgggcttcatgacattcgcctgtaatcccagctacttgggaggctgaggcaagagaattgcttgaatccaggaggcagaggttgtagtgagccaagatagcactactgcactccaacctgagtgacaaagtgagactgtctcaaaacaaaagagaccttttctgacttgatccctgtggattctctttaagctatcttttgttaaaggactagttgttccaaaaaaaaaatgacattcattttaacatgattgtctaatagtaaacagtccaaaaaatggagaaagttgaaaatgtgccccctacgttctttatatattctacgtaaccagcggctggcaacctgatgtagagtaaccgtcctaaaactgagatctgaaatctgcaatgttccaatatctgaaattttttgagcaccgacatgatgctcaaaggaaatgcttgctcattggagcattttggatttgagttttgggattgtgatgcgcaaccagtaagtatttcaaaatcccaaaaaaatctgaaatccaaaacatttgggttccaagcattttcaacctgtatgtatattccataccactttccacataggtacacacaaacagatgccccagatgttaacattttactgtattttcttcatccttcttgtaggcatattattatttttgagctgttcaaatctcacagacataatgcctctttatttagggaaaatactgcatgtgtatttccttaaaacaaagacattctctttgttttataacttcagtacaatgttttttgagatagtcttgctctgtcattcaggctggaatgcagtggcacaatctcagctcactgcaacctccgccccccagtttcaagcaattctcatacctcagcctgagcctcccaagtagctgggatcacaggcgtgcaccaccacacctggctaatttttctatttttagtagagacggggttttgccatgttgaccaggctggcctggaactctggcttcaaggaatctacctgcttcggcctcccaaagtgctgggattacaggcatgagccaccacacccggtccctacagtacaattcttaacactgatgaattaaattattagtcatacaatacctaattgattttattacttaatcccaattttaaaatatttaatatctacaagctttattcacatttcctcagttgtccaaataatgttcattattgtaaaataaataaataagttaattaattttaaaagttttggtccaggaatcaaatcaggggctgttgaggcatttactttttaggtatatctttagtctcctttaatctggaacaatttttcgttgttaatgtaacatggtacaagccagtttactttgtagaatctctctcagcttaggttcgtcactgtagttttatcctgatttttcattagtgaggctgcatctctttacacatgctcaagacccatgtgtatatccttttctgggccagtttttcctggcattttcaatatttagctttgaggctgctattatctcaggaattgtatctttaaatattaattccagtctattcttttggtttctgatttgggagctgcaattatgcatgttttgtttgttctttgcctgcctcctccagctatcagttctctttaatcttttttttcctcttagcacggagctttttcattctagtctctgacacttactctgttttgcagcttatctgttcttccttgtgctcctcacactttcatagttttttgtattttttttcctttccatctggccaaattatgtaaactcatgtttatttccagtttcccttaaatgtctgtttgaattttaaggccttccttagtaagaatgattgttttattttcaaaatgcattttttcattaatccattgaatactgtagtatccttctaatttgttaacatgtcctttatttcttaaatttttcttatttctttggttaatttctatattcttttttccttgttctgacatttaacacttaactcttacctatatttgtctttttcttatttttgagagctacctttgacttccagcccttctgttgagttttaaaaaactatcctgtgcttaatttctgagacctcttttattgttttttggttttgtttactggttaaagtctttaaaaagcattctttgtctcccacaattgaagtaactttatttttctgaagatagtttttttttaagctttttaaaaaatactacattgattatattttctgtttctttgccttcatttttttagtctttcttcactgttccaggataggaggcaataaaagataggattgtgaggtctttgtgtgtgatgaagtttatctaatcgtgggcctgcccttgagtgaccaggtggaaagccgtgttgtctctgtgggatctatagatgtcactatcttgtctttggggctgatcaactttctctagaaaggaatcgtgtggtctcctgtgggtataagtctggcttctgtgacctggtttctggcattctggaagcagatgagtatcctgctgctgctgttttccttgatcgctgtgtggtattcctcagcctgagggctttccaatttatattcttcaaaccatacatatttgtttcttgaaggaggaggatagcagtagttaacacactgtctgaccagtttgcggagttaagacctgtcctctccccattgctactctgtctagtgcttccaagcatagcactttctggggtcctgctggtcagccagcccacctcttcacagcatccttctatgagcacccagcttgtgcattccttccctctcccaaattggtcacaaatcatccaaacaatttccatattaaaaaaaatattaatctctttttcttgatctcctctttgctttgtccttgttgatgagtatcatatttattcctcctgtttttaggacttagaagaaaagacacatgtggtcaatctaccatgcttaactagaactcaaaagctggcttgttgaaaagaataatgaaattgatctttttgggttttttgttttttggttttttgttgttttgttttgtttttttgagacagagtgtcactctgtcacccaggctggagtgcagtggcacgatcttggctcactgcagcctctgcctcctgggttgaagcgattctcctgcctcagcctcccaagtagctgggactacaggtgtacgccaccacacccagccaatttttgtattttcagtagagacagggtttcagggtttcaccatgttggccaggctgacctcaagtgattggcctgccttggcctcccaaagtgctgggattacagacgtgagctaccagcctgttctgttttttttgagacaagatctctgttgcctaggctggagtgcagtggcatgatcacagctcactgcagccgcaacctctcaggctcaagtgatgctcctacctcagactcctgagcgggtgatcactggcatgtgccaccacacccagctaatttttgtttgtttgtttttggagacagggtctctgtctgttgcccagactggtctcgaactcctgagctcaagcagtctgccgaccttggtctcccaaagtgctggaattatagacatgagccaccatgcctggccaaaactgatctgttgtggccctgatcaagagaaaaaaaatagaaagcacacatatacattagtatagtaaaaaggagaaatgtacaagagaataatacatgctactttatgataatcagtttgaaacgctacagcgggggttggcaagccaaatttggtttaatatctgttcttctcagtagagttttgctggaacacagccacatttctttgtttacctattgcctaaggctgcatccatgctacagtgacagaaccatgtggctcccaaagcttgaaatatttactgtatggtcctttataaaaaatatgtgctgactgtgctgcagaagaaatgatttcctagagaaagagactacaatcgaccccaaaggtgctagactagataaataaccgcagaggagatagcaaaggttattaaaaatgttaagaaggctccaggcagagaacagcgttctgagttcactctagtctttggagcacaggcagtttttttgttctttagattattttggaccatagaataagatggaaagtctttgtaaagtgacgtaattatttatgtagtcatcttttacagaaaccttattagaggtttttgtttttgcagtatttaaaatagctcatagtttacagtgatcactgagtgtggcgccacagtgcgtagagtgcacaatggccagagtggtccttctgtcatcaggagggggggcacagcgtctgcctcacagtgttgtctgatcctcttgaccacacagccccctcctgtatcattttagtaccagttgtggacctttacactagttttgtttctgagttgtagggctaccctcattactaagaaaagcttgtgtgtgtgcatgtgcatacatgcgcctgtgtgtacatcttaacctctgcctggatgcgaaaagtcttgcttttttttttttttttttttttgtgacagaatctctctctgttgcccaggccagagtgcagtggtgtgatcttggcttactgcaacctctgtctcctaggttcaagcaattctcctgcctcagcctccggaatagctgggattacaggtgcacgccaccacgcccagctaatttttgtatttttagtagagacagggtttcaccatgttggctaggctaatcttgaactcctgacctcaggtgatctacctgccttggcaggtgctggaattacagatgtgagccactgcacctagccaaaaagtcttttcatctgccttataattaacactagtggttttggaattgttagaaaaatgttgcttacattactgtataacaggttgtactagtctatgatagggttatgtattctgtcttcagacatttctctttgttatgaaatactttgtcatgttactttgtgagcagcagcaccacctgtgtggctgtagctgacgcggtgctgttgagctgacctttgtgtagtgagccccaggtctgtaattccatcacgttagcaaaatggtgccctcagttcagaagttcccaaatcaggttctgtgatttatgagaaagactcagagaattcagcagagctgttttactcacagttaagggttttttttttgtttgtttttttcttcagagaaaggatacagattaaaatcaacaatggaaaaaggcacataggcagggtctaggag

SEQ ID NO: 9022 - DNA, 6000 bp, Homo sapiens
atatatatatatacacacacacacatatatatacacacacacacagaatgccttttctataactgttaagtatattaaagtaaacacacaactgctagaatttttgcttttagtaacctttaatttcttatgtactttcaacttctgttttgtgagagttacacaatttgaaacagctgcattcttatcccaatttaaatcacctattccagaatgacatttttgttaacttctaggatgatagaaaagtgtttgtcaattgttttcatgtcttagccacatagagaatatttacgtagcatgccagggtaaaggaatactgggggacaaagctgcctgaggctggctctgaatggcccagactccttgaaggatgacatgtctgttgggaagctaggatccaaattttttttttttgtaatctcaccaactgagtcaaaattaaatgagtaaattagatagactaaacctgagataaaattgttgagtgtacaattttccagaatagaagagtaggataaattaagatgatggatatggtaattacactgatttgatcattatactgtaatacatgcattgaaacatcacattgtaccccatcagtatatatagttactgtgtgtcaattataaataaaaaagaaaagtcagaaagaaacattatgtcctagaatagccagtaagcatataactatcacattaaaaggtaaggttttcaaacctgaatcatttcagatggaatgtttttttttctctttgttgttcaaattgatttaatggcttagagcttattgttctccaacccaccaagccttcctgcaactcattgccccacctcctgggtctcctcagtttgacattcagggctttctctggatccaagacccccatggagatccaacttagtttagcttagagcagccaggcggtgctgctgttctctcctgactgcccagggcattaaatgcctcctccttcaaagtcatcctcaatccttccccacccacagctggctgtaacatttgtgaaatgttcttccattcaatcaggggttacccgttggtgaggggcagcctatatacagagtggtttggttgtccagaatagtgtatttaaaaagacttggttcatagtgtctatcttcttatacctgcttggttcatctatttatagtgggttctctgtagacttttggctttgtgaccactttctaaattaatattttcctgtattatgtcacatttgaaaagtaggaaattcttaattatatccttgtctcttgtgaagacttttgactagctgctaattattagtctaagaatatctgattatagaagcaaggcctaattttgaggtcctttggtaataaatgtcctatctattcactgtaaaatcacttttttccttccaggtcttggtggtaatatcagaatgtttctatgtgccacttccaaggcatttatctgagcgttctggtaagtacgataagctcctgtgatctagagtgtttttggaattctgtgatgtgcctttttgtgctcatatagatagtgggttttctctgtgatttactaggtgaccaaataatcactaccaaatttcttaaaatgtgttttctaggtagatttgaacaaaattatttttctccctttcttaaattaggaaatatttcattttggcaattgctttttctttttaagtatgtgctcttcattaatcagtgtcatattttcctttattctaactagaactagaagggaagaagggaaactcaatatatattgcttctgctgtgtgctagtaactcttctaagtcctttaaaagcagtcttcccaaatccttgcactgctccacacttcttctggggccaggtgcctctggatttgcatgtctttattccagactatttttgagactgcataaagatgttcatgagactttctaattgttgaattttatgtgggagtttaaataagctcatgtttctttttagttcttgaagtttttgaggctttgagacttccattgataatttgaaaatatgattcttagatttcttaaaagtaatagaaacccaatatcaaggattttaggaaaacaaatgaaaatttattagctcacataactgaaaagcccagggacattctagcttcaagcacggcccaagtgatgttaggtttctctgtctgtgtggcttattcataagagctgttgatagtccttgcgcattttctctgtttaaaaatccctgaagaaaaagaggctgtttctcctgactctggcccagaacctctgtggagtactttgagtggcttagcatgtcacatttctgaaccaatcaccatgaccaatagggtcactgagctttctacaagacacaaaataccgagcgtaaaggaccctttgcccttgctgcccacatgccctgctgaagtcattatggtccatgaaatctccagagacaggtggagaagccctaaatggggctaggatgccaaccagagaatctgtcctatatgaccatagtttcaagatagaaaaaactgtcacttaccctctatttttatttcacagctaaacacactcaattgattaccgaattaccattgtttattcagaggatattcctctttcttccctccatagagcagaatcggagatcagaggaggctcatagagctgaacagttgcaggatgcggaggaggaaaaagatgattcaaatgaagaagaaaacaaagacagccttgtagatgatgaagaagagaaagaagatcttggcgatgaggatgaagcagaggaagaagaggaggaggacaacttggctgctggtgtggatgaggagagaagtgaggccaatgatcaggggcccccaggagaggacggtgtgacccgggaggaagtagagcctgaggaggctgaagaaggcatctctgagcaaccctgcccagctgacacagaggtggtggaagactccttgaggcagcgtaaaagtcagcatgctgacaagggactgtagatttaatgatgcgttttcaagaatacacaccaaaacaatatgtcagcttccctttggcctgcagtttgtaccaaatccttaatttttcctgaatgagcaagcttctcttaaaagatgctctctagtcatttggtctcatggcagtaagcctcatgtatactaaggagagtcttccaggtgtgacaatcaggatatagaaaaacaaacgtagtgttgggatctgtttggagactgggatgggaacaagttcatttacttaggggtcagagagtctcgaccagaggaggccattcccagtcctaatcagcaccttccagagacaaggctgcaggccctgtgaaatgaaagccaagcaggagccttggctcctgagcatccccaaagtgtaacgtagaagccttgcatccttttcttgtgtaaagtatttatttttgtcaaattgcaggaaacatcaggcaccacagtgcatgaaaaatctttcacagctagaaattgaaagggccttgggtatagagagcagctcagaagtcatcccagccctctgaatctcctgtgctatgttttatttcttacctttaatttttccagcatttccaccatgggcattcaggctctccacactcttcactattatctcttggtcagaggactccaataacagccaggtttacatgaactgtgtttgttcattctgacctaaggggtttagataatcagtaaccataacccctgaagctgtgactgccaaacatctcaaatgaaatgttgtggccatcagagactcaaaaggaagtaaggattttacaagacagattaaaaaaaaattgttttgtccaaaatatagttgttgttgatttttttttaagttttctaagcaatatttttcaagccagaagtcctctaagtcttgccagtacaaggtagtcttgtgaagaaaagttgaatactgttttgttttcatctcaaggggttccctgggtcttgaactactttaataataactaaaaaaccacttctgattttccttcagtgatgtgcttttggtgaaagaattaatgaactccagtacctgaaagtgaaagatttgattttgtttccatcttctgtaatcttccaaagaattatatctttgtaaatctctcaatactcaatctactgtaagtacccagggaggctaatttccttaaaaaaaaaaaatctatccatctacttctctcttacctgatttatgtgttagaataaattcatgaaattcgattccaagcatacgaaagatgcctaaagttgattctatgctccttagatccagacagaataatgagtacaggtttatgaaattctaaaagtttctgtcgtctttaaaaaggaacgtgcagtatatttctatctggctgtttagataaccctttccttgtattaattgtgagcacggagctcactggtgggggaggttctgaaactctctgccctcctgtggttgaatgaagatgttgcaagacttgcacaaaggaggttattcttctgacagcatcaacttttagagatggttctttttcatctttccaattcagttacttgacagtctccttccccagtatgctgaagtttgttaagagtcaccagtaattgtgcttttcagacagtagtgcagcttcaaaatcgaggccatcactgggctgatgggctgggagaaccttgccatgtgcctgcctgtttcctgcccccttagtcactgcccatttcctgcccccttggtcgctgacacaccttcacccaaagtgccatggttctgatggtggcagttccatctccctgacatcaggaagcttttctcgatcagagcagagcggggcctgcctgccctcgtgtcactggatttctttctcttataatcagctgaaacagagttctcaaagaacagtaaactcaggttcagaggtattatggaataagaatggtttcatagtttggcttttctatataattcctccctctcaaactgaaatattcatttttttagtggagtatttgactagagagaaggtaaggcagaaatacagtctacactggcttttaaaaatgtaaagccaatttccaaccggaccccaaatagtacaggttgaacattccgttccaacaatccaaaaccccaaatgctccaaaatcttaaactttgagttccagcattccgtcagaagtggaaaattttacacctgacctcatttgacaggtggcagttacagtgcaatcaaaactttgttccatgcccaagattattaaaaatattggataaaattaccttcaagctatgttgtataaggtgtatataaaacaaatgaattttgtgtttagacttgggtctactcccaagatacctcattatatatatacaaaaatccccaaatccaaaaacatttgaaacacttctggtcccacacattttggataagggatatttgacctatatctaattatataataagaaaaatgtattttcttttttttttttttttgagatggagtttcactcttgttgtcgcccaggctgcaatggcacaatcttggcttactacaacctccgcctccctagttcaagggattctcctgcctcagcctcccaggtagctgggattacaggcatgtgccaccatgcctggctaattttgtatttttagtagagacggggtttcgccatgttggtcagactggtcttgaactcctgacctcaggtgatccgcccgcctcagcctcccaacgtgctgggattacaggtgtgagccaccgtacctggcagaaaatgtactttctttctcagaaatacttttaaaaaaaattgaagggtgaggagaaaaacatcttggagaagaggacccattaaaactttaaatatctgtgggaaccatttttcctgattttcccttttttaacatcatggcaaagatgggtttttttccaacaaaatttaatttaatatctttcc

SEQ ID NO: 9023 - DNA, 6000 bp, Homo sapiens
aatggcttgaacctgagaggcagaggttgcagtgagccaggatcatgccactgagctccagcctgggcaacagagagagactttgtctcaaaaaaacaaaaagaataaaccaaagctatgtgtatctatatgaatattctcacaaagtttagtcaaaaaatgttaccaaatagcacccagaacaatgtcacttacacagcaattaccaacacacaaagtaacggctgtattttgttggtagagatagatacatgtaatagaagcaaaagcaggtggaagtggtaagtggcccattcagggtgttgtccccctctagaagggagatgacatatatatacatatacacatgtgtgtgtgtcccccccccacatatatatgtatacacaggcacatacatatatatataaataaatatctaaagtgcatatggcaaaatgttagggtttggtaaacctgggtggtaggctaatggatgttcatatttttctttttagtcttttgtatgagtcatttcataatattttaaaaattaggagctgttgattctgatgtagccatgtctgctagggtctctgttttattgtcattctgttttagttctgtaccttcctagcaggtcaccttatgcccaggaaatggatctgggggttggttttctttgtccacccctaccccacagcttctccaagcttccacacacggtcccccgtggagctgctgcttagtaatgagacagagtcctgggagctgttgagggtcttttcacaaaacctaccaaaatcccagctgccaaattggacccaactggcttggccgggccatgtgaattagcagatatcttctgtgtctaaagagtttggggcttcctcttacttttgttccccgaatcttaagaacagaagaagagccattctctcaagatcttagaggtgggccagtgagttcagtctgtccagcctctgcgcagcctcctacatccttccctcttggggccttcatctttttgtcttacagtctgagtatgttagcaatatcgtagtccccctttatctatggtttcactctttgtggtttcagttaccagcagaaagctgtggtctgacaatattaaatggaaaatttcagaaagaaactcttcctgagttttaagttgcatgccattctgagtagcgtcttgcctgggatgtgaacgatcccgtgtgcagtggattcacgccgtctgtgttacctgcctgtgcgtcacttggtggccctctcagctttcagatccactgtctggtatcacagtgcgtgtgtttgagtcacccttactttacttaatcatggccccaaagtgcaagagtggtgatgctagcatatggttataattgttctattttattattgttaatctcgtactgtggctaatttctaaattaaatttcatcataggtatgtaggtataggaaaaaaatagtgtatataggattcagtattactgcagtttcagacccactgggggtgttgggaagtttcccagaggataagggaggaccactgcagggagtaaaagtacgtatttgacagaagtttctggaattgacagaatatagatccctgtggtcagaccctacaaggtatgggtgggcacacatctgccctaactctggtgcagtggaggaagccctagaagaggtttctgttgggggcctcttatcatggtgtggatttcaggagcaaatctcccggaatgctgattgtgagaaccgaatttgagaggcatccctggcttcatcatttctgtgaatcagggatctcccagcatgatgtttacgcctcactgaagctgactctgcaaagcagcagaaaggttgtttttcatttcgatttctttgctgtccgtggtggtattgccttagccttaaatgtttcagtgtattactacttaagactagggcttttcattttcttgtgaaagatttcttttaaaaaattctaacttgggaattagtggtggggatgtaatttctttttctgcaaaagttgggaagacacatttgtgctgctataaaacatatatttgtgtgcgttgcaaaggaaaaatattctcccgagtttgtttttctcgattctgggtcccaacagagaatatgtttttgtattctgtgtttgcctatgttgagtaagattaaaagttcattttccagccttggcttttctgctggagtttagaagttggaaaccacaaggctgcacagagccccacagtcctcggctgtgaacaggccccgctttgtgcgtggctgttcactgtgtcacggtctgcaaccagtgccaatcgcgactcggtaaagaccacccctcgagcacatggttgttgggaaacgattcggggtttatggagcctcagtgagggtgacccaggcccctaatgttcgtttctctagagaaggggagtgttttagaggattttttatttttttttaaatagagatggggtctcactatgttgcctgggttggccttgaactccagagctcaagcgatcctccctcctcagcttcccaaggtgctaagatcacaggcttgtaccaccatgcctggccttaggatttttgaatgtagtgattataatgtggtgtccattttggcagagttctgagaaatcttgtaagtacccagaggagttttggttggtgggtacctgccaaaaagtgagggttgactgtaccatgttccagaccttcttgtccccatcctcctacccactgaatccatccatggctgagcagggtgcgatttcctttttaacacccagcttgagagtgtgttctcggaaggccagttcctggtatcctccctcgatgatcaaacgtgagagtgccctggctgtggatcacactgtcactgcccacggccagaggtcagaacccatttggaaatataaatgctgccttacccaggattcaaaggcctccatgagctcccctaagactttgtagaggttaagactggaatgaaaagtgtgactcagtctcgctcaacgccgagtgacagtgtgggagaagtgtgttgccacagcagctgatagagttgtccccagggagagcatatgctaggaagtttcttcgtcatgagtgttttaaaccctcttcttgtgaaggtcttagaaaggtcaaagtaatgtgttccttctgtgatgagagtgatttttttttttttgaaaattttttttttgagacggagtctcgctctgtcgcccaggctagagtgcagtggcgcgatcttggctcactgcaagctccacctcccaggttcatcccattctcctgcctcagcctcccgagtagcctggactacaggcacccgccgccacgcctggctaagttttttgtatttttagtagagtcagggtttcaccgtgttagccaggatggtctcgatctcctgacctcgtgatctgcctgccttggcctcccaaagtgctgggattacaggcgtgagccaccgcgcccggccgagagtgatttttcttagaacacaatgccaagacattgaaaacagtctcccttctcagtcccttctttaaaatgccctcatgtcaaaatttggatttgattcctactctgtttccttcctctataaccactcaagaggagtggggatctcaatgtcttaggagaagaatctcagtatctgagccactaagcagcctggacccagtctcccacagcatctagaggttttgcagggcaatgctgggggaggcctgtccacttcccctcctctcctcttccacctccttttacctccccttaaccaccccttcttacccttgtgttctctttgctcattccatcgatcttctttagagagactcgggactggcttgaatgtatccaaataaatacacctcctggagttcctcagtgaagtcgaacttagcccgggctgtggcaggaaggtgtatgaacctggatgcctctgacccattggactttggtccataggcagtgagaatggtgttgttcattcttatggtttggggagtgttgtctgacagaggggcctgctgacactgtctcctcaccctctgtgcagcttctggatgtgaaattccaaacctggcatcttctgggcctcccaagactgattcttcctgtttcccaacatgcaaattgcaggctccataactcctcaggagctattgctggcaaaaggctattttccctcactgaatttttgaacacgtttcaggattgtaatgcagaagtttttatctctgatcctgggtagcagcatttattggcactggggaagagggaaacaacagagtggagatggcacactgtgggcctgctggctaaaatgcttgtggctgaaagcctgcagatgtgtttggtttggttcggttcacatattttttaaatcagtcaatttcacgttgagagaaaaattttttaaaagtgtctggcctaacatgaaaaatcaaaacatcttccaactcagcaatcacatttctagggcaatcggccatgacagagtgtcactgtctaattttaggtgggggcgggtgtttttactacagtctccaccactccccatggtctcacacctggcctgtgtttgtgctcctgtgcatctttgaccttgggtggggaatatcttgcatcagggtcatggctgctgaggctcctgggcgtgtgtgctccagagataggcctccactctgctctgactctgctgttgctttgtatggggactgctcatgccttgggtacgaatcgctcactcctaaagaggagcaggtgagaatgtgggacatcagagagtgcctgggtttgtttcttctctgaatttattagcctgaagaaagaattagtgaaacctgaagtttggtggtagggtggggatagaaactgttgaaggccttgatttctataaatagtaacctccatgtatgtttgacaggtgaaaggaaagcaagccaggatggatatttacgacactcaaaccttgggggttgtggtctttggaggattcatggttgtttctgccattggcatcttcctggtgtcgactttctccatgaaggaaacgtcatatgaagaagccctagccaaccagcgcaaggagatggcgaaaactcaccaccagaaagtcgagaagaaaaagaaggagaaaacagtggagaagaaaggaaagaccaagaaaaaggaagagaaacctaatgggaagatacctgatcatgatccagcccccaatgtgactgtcctccttcgagaaccagtgcgggctcctgctgtggctgtggctccaaccccagtgcagccccccattatcgttgctcctgtcgccacagttccagccatgccccaggagaagctggcctcctcccccaaggacaaaaagaagaaggagaaaaaagtggcaaaagtggaaccagctgtcagctctgtagtgaattccatccaggttctcacttcgaaggctgccatcttggaaactgctcccaaggaggtgccgatggtggtggtgcccccagtgggtgccaagggcaacacaccagccactggcactactcagggcaaaaaggcggaggggactcagaatcaaagcaaaaaggctgaaggagccccaaaccagggcagaaaggcagagggaaccccaaaccagggcaaaaagacagagggaaccccaaaccaagggaaaaaggcagagggaaccccaaaccaaggcaaaaaggcagaaggaaccccaaaccaaggcaaaaaggcggagggggcccagaaccagggtaaaaaggtagatacaaccccaaaccaggggaaaaaggtggagggggccccaacccagggcagaaaggccgagggggctcagaaccaggccaaaaaggtagaaggggcccagaaccagggcaaaaaggcagagggggcccagaatcagggcaaaaagggagagggggcccagaaccagggcaagaaggccgagggggcccagaatcagggcaagaaggccgag

SEQ ID NO: 9024 - DNA, 6000 bp, Homo sapiens
tcgcgggagggcctgcccgggcttcgattcccgctccctgcccagatttccggcccttgctaggaatcctgagccgggggaagtgagcctgcaagccctgcgccacgaggccggacacattttcattttctttctgatgctttttgtgaccctgacacctcacaatgcaatatttccactatgaaacccccagaactgccaaatttcacccaatttggattaacattatcgaggagcttggcattatgttgaaaacccagacattcccacgacccgtatcctatttaaaaaatgcctgtctatttaaggttcacgatgggaggataaaagaaaaaaggctcccaaagtcaacagagaacatgagctaggcaaaaggaaagtccagtttgcttctaaaaaaggctgaaaattataaccatccatggccttgtgtcttaagtctcagaattttttttttctcttttggtggtttgcaaaccaaagtggaattttattatgggttactaagggagcttcctcgagttcctagcccccaaagcccctgctcactccatggcatgcctccgaggctcctcatgccatgagaaagagaatggagccaaaatcaagccggcagtatctcggggctgtaacgtcttccccccgtcgctgtttccacagtgctgagccagggacccggcagagctgcctgactccttttatgaacaacagcaccgtgatgaaggcagcaggagtcagagaactattcattgcaggaagccccaacatccggtgagaaataagaagtacaacagtacaggatgcgccttgggtcagggggacgtggaaagccctcagcctttgtgtccttctctgcgccggagtggctgcagctcacccctcagctccccttggggcccagctgggagccgagatagaagctcctgtcgccgctgggcttctcgcctcccgcagagggccacacagagaccgggatggccacctccatgggcctgctgctgctgctgctgctgctcctgacccagcccggggcggggacgggagctgacacggaggcggtggtctgcgtggggaccgcctgctacacggcccactcgggcaagctgagcgctgccgaggcccagaaccactgcaaccagaacgggggcaacctggccactgtgaagagcaaggaggaggcccagcacgtccagcgagtactggcccagctcctgaggcgggaggcagccctgacggcgaggatgagcaagttctggattgggctccagcgagagaagggcaagtgcctggaccctagtctgccgctgaagggcttcagctgggtgggcgggggggaggacacgccttactctaactggcacaaggagctccggaactcgtgcatctccaagcgctgtgtgtctctgctgctggacctgtcccagccgctccttcccagccgcctccccaagtggtctgagggcccctgtgggagcccaggctcccccggaagtaacattgagggcttcgtgtgcaagttcagcttcaaaggcatgtgccggcctctggccctggggggcccaggtcaggtgacctacaccacccccttccagaccaccagttcctccttggaggctgtgccctttgcctctgcggccaatgtagcctgtggggaaggtgacaaggacgagactcagagtcattatttcctgtgcaaggagaaggcccccgatgtgttcgactggggcagctcgggccccctctgtgtcagccccaagtatggctgcaacttcaacaatgggggctgccaccaggactgctttgaagggggggatggctccttcctctgcggctgccgaccaggattccggctgctggatgacctggtgacctgtgcctctcgaaacccttgcagctccagcccatgtcgtgggggggccacgtgcgtcctgggaccccatgggaaaaactacacgtgccgctgcccccaagggtaccagctggactcgagtcagctggactgtgtggacgtggatgaatgccaggactccccctgtgcccaggagtgtgtcaacacccctgggggcttccgctgcgaatgctgggttggctatgagccgggcggtcctggagagggggcctgtcaggatgtggatgagtgtgctctgggtcgctcgccttgcgcccagggctgcaccaacacagatggctcatttcactgctcctgtgaggagggctacgtcctggccggggaggacgggactcagtgccaggacgtggatgagtgtgtgggcccggggggccccctctgcgacagcttgtgcttcaacacacaagggtccttccactgtggctgcctgccaggctgggtgctggccccaaatggggtctcttgcaccatggggcctgtgtctctgggaccaccatctgggccccccgatgaggaggacaaaggagagaaagaagggagcaccgtgccccgtgctgcaacagccagtcccacaaggggccccgagggcacccccaaggctacacccaccacaagtagaccttcgctgtcatctgacgcccccatcacatctgccccactcaagatgctggcccccagtgggtccccaggcgtctggagggagcccagcatccatcacgccacagctgcctctggcccccaggagcctgcaggtggggactcctccgtggccacacaaaacaacgatggcactgacgggcaaaagctgcttttattctacatcctaggcaccgtggtggccatcctactcctgctggccctggctctggggctactggtctatcgcaagcggagagcgaagagggaggagaagaaggagaagaagccccagaatgcggcagacagttactcctgggttccagagcgagctgagagcagggccatggagaaccagtacaggtaaagggggccctgagtgaccgggggaggggatgggcaggcatgggggcactgactacagtacaaagaggtggcagcaagagcaggcccaggtttcctgtgggcagacacaccctggtccttgcagctgacccctcaacctccccccacgccaggcactcgggcccccttagagcatactgcccatctgcagcacggccgcacgtggggctctctcccaaggtggggacgtgcaggcacagaggcgccatggcttccaacgctgtctgttttgtttcccatagtccgacacctgggacagactgctgaaagtgaggtggccctagagacactagagtcaccagccaccatcctcagagctttgaactccccattccaaaggggcacccacatttttttgaaagactggactggaatcttagcaaacaattgtaagtctcctccttaaaggccccttggaacatgcaggtattttctacgggtgtttgatgttcctgaagtggaagctgtgtgttggcgtgccacggtggggatttcgtgactctataatgattgttactccccctcccttttcaaattccaatgtgaccaattccggatcagggtgtgaggaggccggggctaaggggctcccctgaatatcttctctgctcacttccaccatctaagaggaaaaggtgagttgctcatgctgattaggattgaaatgatttgtttctcttcctaggatgaaaactaaatcaattaattattcaattaggtaagaagatctggttttttggtcaaagggaacatgttcggactggaaacatttctttacatttgcattcctccatttcgccagcacaagtcttgctaaatgtgatactgttgacatcctccagaatggccagaagtgcaattaacctcttaggtggcaaggaggcaggaagtgcctctttagttcttacatttctaatagccttgggtttatttgcaaaggaagcttgaaaaatatgagaaaagttgcttgaagtgcattacaggtgtttgtgaagtcacataatctacggggctagggcgagagaggccagggatttgttcacagatacttgaattaattcatccaaatgtactgaggttaccacacacttgactacggatgtgatcaacactaacaaggaaacaaattcaaggacaacctgtctttgagccagggcaggcctcagacaccctgcctgtggccccgcctccacttcatcctgcccggaatgccagtgctccgagctcagacagaggaagccctgcagaaagttccatcaggctgtttcctaaaggatgtgtgaacgggagatgatgcactgtgttttgaaagttgtcattttaaagcattttagcacagttcatagtccacagttgatgcagcatcctgagattttaaatcctgaagtgtgggtggcgcacacaccaagtagggagctagtcaggcagtttgcttaaggaacttttgttctctgtctcttttccttaaaattgggggtaaggagggaaggaagagggaaagagatgactaactaaaatcatttttacagcaaaaactgctcaaagccatttaaattatatcctcattttaaaagttacatttgcaaatatttctccctatgataatgtagtcgatagtgtgcactctttctctctctctctctctctcacacacacacacacacacacacacacacacacagagacacggcaccattctgcctggggcactggaacacattcctgggggtcaccgatggtcagagtcactagaagttacctgagtatctctgggaggcctcatgtctcctgtgggctttttaccaccactgtgcaggagaacagacagaggaaatgtgtctccctccaaggccccaaagcctcagagaaagggtgtttctggttttgccttagcaatgcatcggtctctgaggtgacactctggagtggttgaagggccacaaggtgcagggttaatactcttgccagttttgaaatatagatgctatggttcagattgtttttaatagaaaactaaaggggcaggggaagtgaaaggaaagatggaggttttgtgcggctcgatggggcatttggaacttctttttaaagtcatctcatggtctccagttttcagttggaactctggtgtttaacacttaagggagacaaaggctgtgtccatttggcaaaacttccttggccacgagactctaggtgatgtgtgaagctgggcagtctgtggtgtggagagcagccatctgtctggccattcagaggattctaaagacatggctggatgcgctgctgaccaacatcagcacttaaataaatgcaaatgcaacatttctccctctgggccttgaaaatccttgcccttatcatttggggtgaaggagacatttctgtccttggcttcccacagccccaacgcagtctgtgtatgattcctgggatccaacgagccctcctattttcacagtgttctgattgctctcacagcccaggcccatcgtctgttctctgaatgcagccctgttctcaacaacagggaggtcatggaacccctctgtggaacccacaaggggagaaatgggtgataaagaatccagttcctcaaaaccttccctggcaggctgggtccctctcctgctgggtggtgctttctcttgcacaccactcccaccacggggggagagccagcaacccaaccagacagctcaggttgtgcatctgatggaaaccactgggctcaaacacgtgctttattctcctgtttatttttgctgttactttgaagcatggaaattcttgtttgggggatcttggggctacagtagtgggtaaacaaatgcccaccggccaagaggccattaacaaatcgtccttgtcctgaggggccccagcttgctcgggcgtggcacagtggggaatccaagggtcacagtatggggagaggtgcaccctgccacctgctaacttctcgctagacacagtgtttctgcccaggtgacctgttcagcagcagaacaagccagggccatggggacgggggaagttttcacttggag

SEQ ID NO: 9025 - DNA, 6000 bp, Homo sapiens; identical to SEQ ID NO: 949

SEQ ID NO: 9026 - DNA, 6000 bp, Homo sapiens
acttgcacaatcagtcatttcacaaggctcaacttgaaaaaatgtgtggactgatagaagagtgaatgaattattggcctcagcaggagtttattatttcctcaccacaatgccatgaacacttaagccaaagatcaacaagttaggcacttatgaaaaaaaactttaaaaatctttaaatttgtttacattaaatgttattaacatagaaaagaagccaccactttgatggcattaagctcctatctttgctttgttgatgccataagattaatttgtgtggcccggtatggtggctcacgcctgtcatcccaacagtttgggaggccaaagcagacagatcgatcacctgaggccaggagttcgagaccagcctggccaacatggtgaaaccccgtctctactaaaaatacaaaaaatagctgggtgtggtggcatgcgcctgaggccaggagtttgagaccagcctggccaacatggtgaaaccccgtctctactaaaaatacaaaaaatagctgggtgtggtggctcgtgcctctagtcccagctgctcgggaggttgaggcaggagaatcgcttaaacccaggagacggaggttgtggtgagctgagatcatgccactgcaatccagcctgggcggctgagcgagactccatctcaaaaaaaaaattttttttgaagatttattattattatatttgtattatgtgacacaggggttattgcaggccattcaggttctcagtgaatgtgtattttcagatgtcctgctggaatgtgtcttataccttccgtggctggtctcccacaccagattgagagtcccaggagagggtgtgctgtgttcattcccgctcctcatggtcttgctagcaccttgcatgtacatggggcaaagttggtggcaaaagaatgtgaccagtggctatgggagttagtttagcactctgaaattcccatgagcagacaaatggaaccagaaaacgcttggtttattatttgcttatatgcccccattcaggggcaggatgggagctatgggaagagaaaccaagaggctactgggacagaggatgtggtggagcatccttgctttattcggagaggtggccagggtttacggggacactgatttgtcctctgctggttgtgcatcctgggcccaagtcaagaggaggggctggtgctagcctgggtgcagtagccaggcctggcaatatgactccgcagctaccactgctctgaagccactcacctgcagcccctgccactccagcttagggagggtggggtggtgggtggcacccagtctccttcacattgaacagtggggggttggcacttcctgtaatctggtcaatcaaggtgtaattttattacacatcgatgaaattcatccatatttttggcataggttatcagttttttagtgcccatttttcctccatttaaatattatgatggtggtaagctaggagcctggtcccttgcatgtaaagaagtcccttcaacatatgttacctgattttttcctaattgcagctctgtacattggttttattttaactcatttcatgagtgggagaattagcacagccaggttgagaaacaggaccatcccaaggggtacaactggagtccgacctgcatctggctcatgctgtttggtcacacctggagggctggtgggttgtggtcttgctgttacctggtgccacaatgtcatgagcagtgctgaaggggcccaggtaccaggcaagcaggattccctgggtccgtctagctaacttgccattttgacacgtgatattcccttcctgactgtcagctaacttccagattgctggagaaatacatttaacctaccctcaccccctgccccgaccccaaacacactgctaaagagttagtggcatccaagcaaaacaagaaaataaaaggcagggaccccctcaggagcagaagcaaccagaggaaacctgtcaccctggagtgggtgcccagggacccatttgaaggcagcaaacccaagcgtttggaagaaactgtgtgatgaagaatgactcacttacctctcaagagccctttgcctttgcggagccaggatgcttaagtactttaatactgaagtatttgtacttgtttaaaaaaatacaagggaaaagcattaatcctccttctttcagagaagggagaaaatctgaaaaacagaccaaaaaagaaaaaggattctcaagggccaagtgctgtgttatgggatgggatctggattccttcttggactgacgtcacccacaaccctgggatatcacagaaagaaaaccatgtcttcaaggtcttcctcctcacaggttcccaccctttggttccagttcagggcaggagataactctgcagccaagatgcttgggtctgaattctggccccaccttgtcccaactctgtgaccttgaacatgatctaacctcttggggcctcagctggctcatctgggaacaggaatgtaggattacctccctcagaaggcgtcatgaggatgacatgtgataatggatgtaggagttcttagaacagtgccctgcataggcactctaaggtatttgttaaataaaataaataaattgcccataggggtgggatttatcagacaaagaagtaagagagatgaaggactccatgggtggggacaggacattggacccaggtgccgatttgatgactgtctctgtggctttggggaaatcatgtcaggcctgttctgtaaagtgtggcccagttctctgttggtacacggtgatgtgccgagtataagaagagggagggaggaaatatgaaagtgtggactgggggacatttgggtcatggggtcttttattagggttctctagagggacagaagtaataggatatatgtatatatgaaggggagtttattaaggagaactgactcacatgatcacagggtgaagacccagatgggccgtctgtaagttgaggagcaaggaagacagtagtggctcagttagagttccaaaacctgaaaagtaggaaagctcggcagtgtagcctttagtctgtggccaaaggcccgagagcccctgggaaaccactggtgtaagtccaagactccaaaagccaaagaagttgaggcctgatgttcgagggcagcataggaggaagacgaaggcaggaaaactcagcaagtccgcttctttcaccttcttctgccggctttttctagttacgctggcagctgatgggatggtgtccacccacattgtggttgggtctgcctctcccagtccgctgactcaaatatgaatctcttctggcaacacctagaaacacccagatacacccagaaacaatactttgcatccttcatttcaaccaagttaacacttaatattaaccatcacaagtccctgtaggtcagaattctctggtcctttcctgtgttcacccctactggatcgggaaagctgattcccgggtctggggacaaaggaaaagtagctagttttgtttgtgctcagccatctagttacatggaccacccctctcctggtattgttcattcaaaaccctaaccactccacagttgggaggtcactgggcccttcagcacccgagggttctgggagctgtaaacccctgtgctggcttccacagcaggtactcaggctgagaggaacagcagaggcccaggctggtctctctttctccccaaacaggcgtattcatggctgactggctcacagctcacgtgtgatcctgagatggtaaagattagcacttcagaagatgctgcctaatgtgagggtaggtaatatcaaattctcagggcgacacacagaccgaaatgaaagcaaattggaattacttaattctggggagctgtttattgagttgtgataatgtacctgggtatacattagattactctgtaattgaggtttcgctcaattgacaattcggcccctcaacctacctggtccagaccagtgctcagcaaatgcttattcatttgctttgcttctggttttctgagtgtcttcaatttcaaggtgtcttagctggcctcaaggacttgagtgtctgcaaccaaagttatgcagatgtatcttgatgaaaattttctaattcataaaaagtttcttgtcggtggtgatttttaaaccaatctttcaactccatttaacaacctattatgcactcagaacactcatcagtatgagaattagtgctcagaagaaatgtgatactagtgctgttagaggttccgatttaaacactgatgtgacttcctaccaagggaggttgttaggatcaagagtagggattattgttctaaatacacttgagtttccatcttagtcctgctccctggtacctgtgtgattcagcaaatcatgtatttactctgggcgtcattttccttatctgaataatggaggtgaatatatataaataggtcctatgagagggagaaaatataacatacatataatatataaaacacatatatatagcataatatatatgtaacatatataaacagatacatcctagtactagaaagtataaaattatgtctttagtagtaatcatattttttacattactattaaggaatgtttcccaaagacattgtccattgtttgttttcctggattaaaggaatgatattctgtacatactatgaaaatttaaatttagatcatcttaaggtctccctcttctgaaatgggattgaggtcatccaatccaatccattgtttgaagtcagttgcgaaagtgctttacttacattgtactgtcttctctttcctttttaagttttttttcagcatttacaagtttcttgagactgtatcaggcatagctacctggagcctacattttaggatggcaacagtgggctcctcagcgtccctgttttggaagcacacgttccaccgttgactgctgtcctggctggtcccgttttgctctctcactagtctggtgccagcagtgatttgcatttatagcctctagtttaaagatggaatgcctggagtagctgactcattcctgtattcatttgcttaataaaggtttatggagcccaactgtgtcaggttctgtaataagctcatggtctagcaggaagaatcatgcaaatctgtgctgcatggtcagttaatgttagccacctgccacactacctccctaatcctaacaatggccctatgacgtaggtgctgttagcaaccaccttttaccagtgagagcatggaaacccagagaggttctggacctttctaagatcatactgctcataagtggcagagctaggcttgccttgccttggccatgctgtctcttttataccacatttcttgcaaaatccagtatggtagaccctgcattcaggtgtgagctaaaggtgtacagaggttggaacaatgagcgcagtctggaagagtctgggatagcctctccgactggccccatctgagatgggtcctgtggcttggcaagctcataagcaggacagcctgggttagttttgagacactgagtgggtgacatgtttggggctggataagtaggcaaggggacatttgcagagtctttgtaccagaataggagcctgggcttcatcctgtagtagtctaggggctgtgacggaccctatccatggccatggatagtagtgtgcacactcataaggtgggatctctgcatccagctgttcttcctttctctggtcctgcagggaaaaaccattgtcagacagctggctatggtcactggcacagactgcgttggaaaagaagagtgaagataaaaggcacatggcgttgagacccctagaagcagactcagggcaggagttccgagtgcaaggtgcttatttggttttagggacatgagacagagaatcaagggcagcgaataaagggtacattctcaagtgagtaactgctgtgaccgtctggagctctatccta

SEQ ID NO: 9027 - DNA, 6000 bp, Homo sapiens
tgctcgtgagatatttagaaatgttgagtaggtggctggatgtctgactgaagatcaggagagtggtgcaacctggggatgcagacttcgaagtcatcggtagagggaggttatgcaaagccatgtgactagagacctcctcagaaatgaatgtagataaagaagccagagaacgaaggtttgggacattcccaaggtacagaactcagggggatgaggaggaaccagtaaggcaggagcagaaccgagagagattctagaagccagttgaaaaaggatttcagaagggggtcatcagctgctagatgctgggaagaccaggagcagccactatgtgcaggcactgggtagacacaggtgagctgcaatatctactgtacagcaggtgctcaggttttttaataatttaagttctgaggtacatgttcagggcatgcaggtttgttacataggtaagcacgtgccgtggtggtttgctgcacctgtcagcccatcacctaggtattaagcctgttaagccccatatgcattagcgatttatcctggtgctctctctcttcctgttcccccaccctacccacaggccccattgttcccctgtctgtgtccatgtgtttccattgttccgctcccacttataagtgagaacgtgtttggttttctgttcctgtgttagtttgctgagaataatggcttccagctccatccgtgcccctgcaaaggacatgatctcattcctttttatggctgcgtagtattccatggtatatatgtaccacattttctttacccagtctatcattgatggacatttgggttgattcactgatcattagagaaatgcaaatcaaaaccagaatgagaaaccacctcataccggtcaaaatggcaattattaaaaagtcaagaaacaaaagatgctggtaaggctgtggagaaatagggatgcttttatacttttggtgggaatgtaagttacttcaacccttgtggaagatattatggcgattcctcaaagacctagaaccagaaataccatttgacccagcagtcgcattactgatttatattcctttgggaatgggtttggtggcttgggcacttggcagtgcccaaggaatatatatttatattcctttgggaatataaatcattctattataaagatacatgcacacctatgttcactgcagcactatccactgttttttggaaagaagaaaatccttgctttaaacaactcatagtttgggggaggagacagcatgtgggaagggcactagctcagccaggacacctgcctggaaaggcttcctggacggtgaggctcgctctgctgagccttccatggctaagaagaactccagtggatttctgggtgcagtccttctccttgttccggatttccagttctctccctttgaggttcccagagaagcagtcaagcttgagaagttgagcaggaaatagagggagaaagtgaccagggaacagaactagggagtgggaagagatctgagatgaagagagggaataggctagctaccgttaaaaccagtttataattatttcaagtttattttattttttatttttatttatttatttttgagatggagtctcactctcgcccaggctggagtgcagtggcacaatctcggctcactgcaacctctgcctcctgggttcaagtgattctcctgcctcagcgcccccagtagctgggattacaggcaggtgccaccacacccgtctaatttttgtatttttagtagagacagggtttcgccatgttggccaggctggtctcgaacccctgacctcagatagtccgcctaccttggcctctcaaagtgctaggattacaggcgtgagccaccgtgcccggcctatttatttttaaattattatttatttatttatttatttatttttttgagagaggatcttgctccatcactcaggctggagtgcagtggtgtgatcatggctccctgcagcctcgatctcccagccttaagcgatcctcctgcctcagccttctgagtagctgggaccacaggcatgcaccaccatgcccggctaatatttcaagtttagtaaattccactggatttgaagaacttggtttttctgaggaaagtccgttgtaatgcacataacgccacaagaggtctccctttccctgaaatgcactggtttaaaaggcgggacaaatggtagcttgtcagaaagctctgggcaggtaaggccagtaccaaatttggcaaagaatcttacttaaacttttacaaagtcaaagtatccctttaccagtaacttcgttttgcagtttaaaacatgagaataaggagtgcttcgatgtcaagatatttaatatttaggaggggttctctcttccctctttgaggactattttattaagcctgaaaagtaatttagtatgtaagagtaactctcataagagctaacactgattatatgtgtaatgtgttctgagcctttttacagtattaactgtgtaatcctcacccagttagataaggtagatactgttattcttgataccaataatcctctgaggtagggacttttacagatgaataatttgcagtttagagaaattaacaattggtccaaggtcacacagcttgtgaggggcaggactgggatttgaagacatatctaactccaaaactactggattcatgaataaatggattcatgaatttttatgttattaaacagtatcttaatttgaaattttaccttggttttgttgttgttgttgttttctatctatttatttattttttgaaacagggttgccaggctggagtgcagtggcacaaatatggctcattgcagcctccaactccttgactcagcgatcctccttgcctcaacttcccatgtagctgggaccacagatgtgtatcaccacacctggctaattaaaaaaaaaaatttttaattgtagaggcggggtctcactgtgttgtccaggctggtctcaaacacctgggctcaagcaatcctccagccttggcctcccaaagtgctgggattacaggtgtgagccactataacaagcacttacagtgtttttaaccagagatgaaaatcagattcatctgaggagcttttaaaagaattcgactgcccaagtcttctcccaggacaatctaattctgtaggtctcgggtggggctctcggatctctttatgtttttaagtctgtaagtgattcttatgtgtagtaaccctgggtagacagctaccctagggagctgctatggatgaacagtggttaaattcccataggtagaacaccctgctaagatgtagcaatggctgcctggcataaacatatgattacggtattgaatctgcagctcaaactcccctagcttccagtttgagatgctcttcccttgacagcagagctagaaagaagtttgtgattctccaaagacctagtgagaagtggcgaaagcagaactccctgggagtagccctgagatgttcttagaagtgaattgtgcaagcaggctgtcagtcagcctggccagggctcacacctaaccacccagaggaaacagtttttatccactacgtgctccctgtcagcttggcaaacagacggtgacagtgagcccaagaggctgggtgcctctacctggtggtgaaacgcagatatagaaggggctcttgaaggtcagcggctgtgaccaaggatggaaccaagtcctaagaacaggtaacccactggaaggaaagcagggaacactttttacccactccccaaacaggaacaagacttccgcagtgacttcacgtggcctaagttatcatggggtttggaaatatgtcagataagttcaaagtcagataattgtctaatgttctctagtaccttctgtgcttagttctctctttctcttctgtccccatcttcacacacacactcacacacacacactcacacatggaaacacacacactcttaccacacacacatacaaacacacacactcttaccacacacactcacacaaacacacacttaccacacacacacaaacacacacactcttaccacacacactcacatacactcacacacactctctcacactctcacagacacacgttcacacacacgcacagacacacacacacacagatcttcctagtcttggtggctcttacctttcccagaattcctctatactcccattaaccttgggcttagctgggatttacaatcattagctctggccacagcttcttgccatggagatttatttgttctttttactggagtttggtgggaacctgagtggctgggaatccacccaggcccttctctcctggccctgccccaagagctttctgaagtctggcctcacaggctcctaggacactagagcaaaagacagctcagaaagggaaattttaaaaaatcatgacccttgagaatttctgagaggacctcattacaacacaaccctgtgttgacaggaaggggactcctttgaccttcagggtctgctgggtctgcggcagggggcagggagggcgccgaggcatcaaggggtggggagaggaagctagcgggacgcccagtctgtgtctcaggcagagaggagggcaggctcctctcccttctctttgcccttcaggagaaagagaaagggaatagatggttgcttcttgcaccaagttctccccggcttccaggggtggagggagctcagggtggtgagtgagcactggactgagattctgtgtatcttccagaccctgtttccacagcctcccctctctttctgacttccctcctctgctttcggaagcacatgtgaaactgtctccattcctttctctttaggtcactggattccttgatggggctggcagtggtgctgtaaccccaggtccccttagggcatgtgagtggtgatggggctgagatctgccaacctcctcgctctgggggattttcagtgttccaggactgggtgttctgctggtctccctctcccctcccttccccgattccccggtgccctccctgcgcgcagacccaggggactctgagaatggaagggagctctcattcccgggaggaaaagacaccaggttccctgggctgcctgcactcagttctcagcctccttcctcatgcctccagccactgcccgggtctgcggcacgggcgcgatttgaaatacccctccttcccgctttgaagaaggctgggctggctgggggttattttgggagcagcttctgagatccaatggccttgttagggcaacactgacctttccgtcccagaaggagggcaggattggagaagggggcggggcagcggcggggagaccgacagccccgcacacccactggggtggagaagggggccagcgggctgcgggaattcagcctccggcgggggctgccaccgaggggaatttcccctctttgaaaaggctggggacccctccaccccaccctttcactgggcttcttaaagagatcacaccgttttcccttggacttcttggaaggcagacttgggacgctttgtggggactttgaacctttccttcctgctttctttccagcaggcagccttgctctggctggtggagtcggggctcccgggcatggcactgactagccgacccggtgctgacttggcgccggggctctttcagcctctgctggcatcctgcttcccccctcctggggtgcagtggtgagtctgggggcctgcccccgagggcactggaggagtgttgcaggcatcacccacgccctctgcacccacgctggaggacggggaggttgtcaggggctatgatgagatgagtgggggccgcttcgactttgatgatggaggggcgtactgcgggggctgggaggggggaaaggcccatgggcatggactgtgcacaggccccaagggccagggcgaatactctggctcctgga

SEQ ID NO: 9028 - DNA, 6000 bp, Homo sapiens
aaaatagagataaacttctgtgcttaaaaccttgacacttaaagaattaaaaagatttgtcaaactacaaaaccaataaaatcaataatgatgtttatgaaatttgacagattctgttgttgttttctttttttttcctaattctgtcattgattgtgaccaaacgtgttactactgactgctaagtttcagattttttaagtaaagcattcccatgtttcacatcatgactgaatgatatgtagggaactcctcaagttctttcttggaacaagatgagctgtaaccaaggataatacaaattttctcattttcagatcgttcctgcaatcccaacctgatgagctttattacacgcataactgcaccaaccctggctcctggaaattcaactgctgtggtccctacccctactccaccatcaaagagtgggtctttactggattcagataattttattggactgtttgtctttgttctctgcctcttgtattctaggtaagttaaaaggtacttagaacaagattttcatggaggttgataataaagtgaagaagctgttttgctttcaaaaagcagcatgagaaatttaaaaacttcactctctttaatgaaaagttctttacttgcttcagttacagagctgtgtacatatatatttttttgagacagtgtcttgctctgtcacctaggctggagtgcagtggcaggatctcagctcactgcaatctccacctcctgggttcaagcagttcttctgcctcaggctcccaagtagctgagattacaggcacctgccactatgcctggctaatttttgtatttttagtagagacagtgtttcaccatgttggctaggctggtctcgaactcctgacctcaggtgatcctcctttctcagcctcccaaagtgctgggattacaggtgtgagccaccatgcccagcctgtagtaagttttgaaattaggaagtatgagtcctccaaatttgttctttttcaaaattgttttggcagttatgggtcctttgcattcccatgtgaatttcaggatcagcttgtcaatttctgcaaaaaaatatgtagctgggatttttatagggattgagttgaatctgtatagaccaaattggggagtattgtcatctcagcaatattaaggcttccagtctgtgaccatgaagataccttactgaagtcttctttacttaaaccatttatttaggtctttaatttctttcagtggtttatagttagttattagtatacaaatcttaaacttattttgtttttaagtgttttattctaaatacaattctaagtattttattcttttcgatggtattataaatgaatgtatgttttcttagcttaacttttgggttgtttattgctagtgtatagagatatgattggtgacgaggcatggtggctcatgcctgtatttcccacacgttaggaggctgaggtgggaggatcgcttgcatccaggagtttgagaccagtcagagcaagatagtaagagcccgtctctataaaaattagccaggtgtggtggtgcaatctgtagtcccagctacttggggaggtgggaggaccaattgagcccaggaggtcaagtctgcagtgagctgtgattgtactactacagtccacctgggtgacagagtgagacctcatctcaaaaagaaatacaattgatttttgtgtttttttttttttttttttgaagagaagaagtgttgctctgtcatccaggctggaatgcagtggtgtgatcatagctcactacagcctcaagctcctggtctcaagtgatcctcccacctcagcctcctgagtagctgaaactacaggcacacaccatcatgcccagctaatttttaatctttttaggaacagtcttgctgtgttgcactggccagtcttgagctcctgtcctctggcgatcctcccacctcagcctctcaagtagttgggattataggcgtgagccaccacacccagtcctgatttctatatattgatcttgtatcctgcaactttggtgaacttatttattggttctaatagtttgcatgtgtatgtattccataggatttcctataaacaagatgaagtcatctacagatagagatagttttacttcttttctagtctggataccatttatctcttctatttgctctggctagaattttactacattgttggatagaaatggtgagagtaggatccttgtcttgttcctgatctcagggggaaagtttttagtctttcactgttaagtatgatgttagctctgggttttttgttccttttgtcagcctgaggaagttctactttgactgtttttatcatggaaaggtattggatttgtgagatgttttttctgtgtctgttgaaacgagcatgtaatttttgtcctgtttttgtatttacatttttattcagtcatttaacaaacttttagtgaacatctgtagtgctagaattacatagactaaggtcactgttaaggcattctttgaatagcaaggaagataggagtgatatgtgcagtggcagaaggaagcctaggaagctgtgggaagtcggaggagtgtcttgtaacctagccagtgaggggtgatgtcagggaaggccttccagaggacatgacagcaagtcagagaagtgaaggatgagtaagttagttggaaggaggttggcacgtggtaccttccaatcatagaagcggcacttgtgaagtcacggaaacagacacagagagcatagtgtgttttatgaaactcctaagcaattaagccatcacatcaagtagtaactgatgacagtgacgtcagtcttatgatgacaggcagcagttcagaactttaagcaggatcttcagaaagctttcagtctccaaagtaggaacagctcagcagtaagtgtcttgtatacaggccagtggcagcagttcattgtcatggcccctttctgatttgtcttccttgggatcactttccagcatccgcacttccactaatagccaagtagacaagctgaccctgtcagggagtgacagcgtcatccttggtgatacaactaccagtggtgccagtgatgaagaagatggacagcctcggcgggctgtggacaacgagaaagagggagtgcagtatagctactccttattccacctcatgctctgcttggcttccttgtacatcatgatgaccctgaccagctggtacaggtaggagacacagacaaaacagacagaagaccataaaacccttggatggcctataaaatctcatccattgtcctgacctcagaacccttgctcttacccatataatgaagttgggttaaatactcttgactttatcccctctagcatttaaaacccattggaattctttgcaatgcaaatcattgggagctcttacagagttgagttaattgagagagaaaatcatgacataaagcaatctgacccatctttgttcactaattttctgtgtatagagatggccatgtcagagcattctggttcccgtaataatgtactaaggaaggaaagtttcagggaggctatctcaatctagacctttgccagtaactaggaacatttaaagaactttgccctgatagggtctttcatgctggcaagaagaaaagtcatttgagaggcagagtcaatgagctgtttagttcttggtcataagaactaaaaatagcagcttcctctggtccccttcaaccctactggggggtagtgccagccaagtttcactggagaatttcttggccttggctggggggctgcaggaggctgatagaagtcaggtagaccaggcttttctacctgactctctcttgttttcttagccctgatgcaaagtttcagagcatgaccagcaagtggccagctgtgtgggtcaagatcagctccagctgggtctgcctcctgctttacgtctggacccttgtggctccacttgtcctcaccagtcgggacttcagctgaacctctgagtgccaaggacaccactggaactcacaaaggtctccttcaccgaaaacccatataccttttaagtttgtttcaactaaaatattaagtgaatgctttgcaagtttgactgtatgcaggtttatatcagaaggtgagattgaataatgcttgatgcagaatcgaaacttctcatttatctgtatattatgtttacttctaaggatatagcacaaagggaacattttttgtttaaagtgaactacagctgtgctgtgaagagagttctttataaagcctgtaggttcttttaactttggtttaaaatgtaagataggaaaatgttggatatttgaggccatgcttaatatatttatattgcagtatcctttaaaagcaaaaaaaaaaaaatgcatttatattacagttttcctctatgaaagtccttacttatatgatacaagcactgtgttttgtgcttaaactcttcagcggggtagcatcaaagttcttggggaaggatcgtatatgtgggtcccttccctagaagaatggttgctgatatggctactgcttctacatcttgagttttttaatttactttttttacactgtagcattgagactgcttgattcaagtctggtgctttgccagatgtattaatttccataaatgctttgtgagtttggttaaaatgaagattcacttgggaaaacactgcagctttagtctgtgttactatcttgttatgagtatgtaaaagtaaaatgcatgtgaatttatcatatttgcactatgaaggtatttggttaaaatacaaagacttttaagattttaaggccctttcttccaacagcttttatagttagcagccattctttattttctggatagccaggttttatcacgcttctagtcaggatgctcctattccttctaaaaattacggtctgactagtgagcaaagtcttgaatttattcaaaagtcctaaataccttctctaggtaagacacttggtagatgagagacggaaggcattgtcaagaaccattttcatgagaggtggtgtgcaaaaaggtagaataaaagagttctttcaacaaagatttactgtctattctgtactagaccctgtaggttttggggtacagtgttaaacatgatagaggctctgccgtcttggactttaatagcttagagaagagagcaaatgagctgacaggtggttataatgtgaattagtgctgtggtttaggaattggagagaactcaaaggagaggtatttggtgtaatggtaggctttctggagaaaatgatatttaagccaagaactcttagaagttagctaagagagagatgggaaaatgagacgacattgctggagtagataaaactgcatgttaaaggcaggaagatggggaaaaaaagttcagtaaagctggaatggggaaatgtagtcagggactgaattttaaagggctttatcaacctcagtaaagagtttggaccttatgttgagggtggctgaaaacatattcatagtgtcatgaacaaattttatcttcagtcacttgggctgatatatagagaatggatttagagagatgagaccaggtgcagtccatatgagatgtgaaatagagaagtggaatcgtagggacggggagaaattgacaggtgagggctacttagcaattagaatttttttttttcaattttaatttttttttttgagacggagtcttgctctgtcgcccaggctggagtgcaatggtgcgatctccgctcactgcaggctccgcctcccgggttcacgccattctcccgcctcagcctccctagtagctgggactacaggcacccaccaccacgcctggctaattttttttgtatttttagtagagacagggtttcaccatgttagccaggatggtctcgatctcctgacctcgtgatccacctgccgcggcctcccaaagttctaggattactggc

SEQ ID NO: 9029 - DNA, 6000 bp, Homo sapiens
gtcagatcatgtcactcttctgctcaaaccctcttaggggtctcatctcactcacagaaaaatcccaagagagcctgtaggctctgactccacccccacactctctgacctcatctgctgctgcttcccctgcactcactccacttcagcaacacgagacccccgatgttcctccttcccactagacacatgctgctgacctcagggactttgcacctgctgttgcctcagcttgaaaccctcttctcccagctttgtgcacaacccctctgtccctcacttcagatctctgtttaaatctcatcttaatgacaaggccttccctggctaccctgtttaaatgagtatttgtaataacgatgatagatggataaacagcaaatcccgccatccccagaacttcctgccccttactctgctttgctctctccactgcacttgccattgtctgacacgttatttgtttattgtctgtgcccccacctggcaaggactctacctgtttctttttgctgtgcctagaacaacacagagtggaaactcataaatatttgtgaaatgaaggaatgcatatcagatcgtcatgcacactcagtcacatatgtgactgcagacacatgttcgcacgcacacagaagccataggcatatatgtaggcccatgggcagacggacagattataggaggtgaggctgaagtgtggacagggcagagccaacatttattgagccaggcctgggctcagtttttaatcccatttgggattaaacagctctgtgcagtaggctgagacctgaggaccagggaaggccaccaacgtgccccaggtctcatgggaggcggtcccaggagagctgaatgcagctgcaggactccacagctgcctccctggaccaattttgaatgccaggacagggttctgtagtcaccatccattcaggaaaagcagctggagcaggaaaaggaagaagggaggaagggagggaggaggccgacatgtctgtggcagccctagcagggctgtgcagagcagtgaagagttggcaggctgccagggcacctagccaagatgcctgagggaggacctgtaggctgaggtatgaagggccaggaaggggagggagaggtgaggatgggagggccagggctccaccctcaaacagtagtacagattgtgccctcacaaggcggggcaggcttgccctgccagttgtgactccgacactgggttgcattcacctagaggtgcattttttcccattccccaaagatgccttatgcctgaggagtccaagtcccacgtttgaggcactgctttgtcatgatgtatgcttggtagagtcctcctgggctctactttccccctctgtaaagtggggatcttggccaggcacggtggctcacatctgtaatcccagcactttgggaggccgaggtgggtggatcacctgaggtcaggagttcaagaacagcctgtgaaaccccatctgtactaaaaattaaaaaattagccaggtgtggtgacatgcacctgtaatcccagctactttggaggctgaggcaggagaactgcttgagccggggaggcggaggttgcagggagccgaaatcacgccactgcactccagcctgggtgacagaaagaaattccgtctcaaaaataaataaataaaattttaaaaatatataaagttgggatctgactccaggcctttgccttggacagcccttctacaacaagcgtgccttctcctccccaacaccccaaattccacatgtccagatgcatcctgcactttagctgcaaatgccatctcagctcattccaacctctggacctttgcatgctgttccctctgtgtggaactattttgtgcacagctccttctcatccttccagactcagcccaatgccacctcctctgagaggccctccctccctgataccatatctttaacaacgcactcactccattccttccatcattctccctccacttcgtccttctttacttttcttctcaatgtttaccactccctgaaattatactgtagattaattcctctattatctgtgtcccccaccagaaagtcagttccatgagggccaggacttcaattttttttttttttttttttttgagatggaatttcactttgtcacccaggctagagggcagtggcatggtcttggctcactacaacctccacctcccaggttcaagtgattttcctgtctgagcctcctgagtagctgggattacaggcacccaccaccatgcctggctaatttttgtatttttagtagagatggggtttcactatgtttacctggctggtctcgaactcctgacctaaagtgatccacctgcctcggcctcccaaaatgctgggattacaggcacaagccacctcactcggccagtacttcatttttttattgctatgtccccagtgcccagcacatggactggcataagagaggtgctggtaaacatttgtggaaagagtgaaggaataacaagaagaaatgcatctctttgctgatagatcgctgaataactgattgcatcttgctgtcttaaacagaaagcgattgttaacgtatgttcaataaatgaatgagtgaaaggataaaacgctgttctgtctccctgcttgtagcagaccctcatgtttggtgactgaatgaatggatctcttgcctcccatccttgtcaaaggtgttagaaacaaagaaataaaggaaaggagggaaggagagcaacagcttggtgcccgtgaacactggcagatctccccttgacatgccactccatcgacctccacagccctctccagaagtgacagcagcctccctccaaattctctctcccttcagcctctcccctcctctgcatccctgcagggctgtgatgggccctggagctgcttgttggagttgggggaacagttcccatggggcacgcagggaagccatacgctccaggaaatgaaggctttggagctgcacctcctcctcacccataactccagtctcattacgaccagcccaggtcataatgcagggaatcaaagccggatccctggaggtggcagcacagagcagggcttgcggagcagggctgccagggttgggaagcctcgtgcccaggcccatagaagtcataccaggcagggtatgttcaccacaggatcatgggtcctcctgaccccatgagttcaggcttggacctatagggaaagagggaacagcgtgttccagacccctccctccatccctccctatggagtgtggacgttttcccactctcattgcccagaactacagcttaaccccttcaccgtcaccctcaccttccagcaatgactccccaccctgaaactccttccataaagattttccggaggagatgctagaaaaaaaagcactggggaattaggcatctgcaaaataggcataagacaattttcagagttgtgattcccgtgagttaaagggaagggcattgcccactgtgatgctgggttaaagaaggtggtctgcgtttcttcctccctagagttaggccactttctttgttctcaggaagatctggctagggccaggtcagcctcccaccccaacccactacacaccatctgcccaaacacacacccctgctcacaatctaactccccaaactggccagaccactcagccaccatgcacactcctctgcctgaaatgcccatccctttcttcccatctgctcagatgccgcctcctccaagaagtaaccctgattgtctcccgcctactttccctttccaaacacccgagctcagtcccttccctgagccccacaggtctcaggttgtccacacagacacttttatagccccgatcatatgccacctagcatttaggttgttataagaagggtttcaccttccaccccactaaactgtgagcttatttaccttgcccctggcaactggccaaacctggcacaaagttgaagcttggtggaactgagctgttgaactgagctgaactgggatcaggagaaggagaagtggggattgagcccctcacctccacacactcctctctgtgcctgaaattcctccattaagcagcatcgctgtcccctgtaaacacccacattaagccattattcatcttatggcttgagtaggcgttagtccctcagatcctttcctgctgaaagcaggatctgatagagagaagggaagagagatggatggatctggggacggcaggctggtccaagagtggggaggaaagatgtctctcggactctgggaaagaaatattttctgggggaatgtggaggcaccagaggcaagctcagaggggttgtgaccctgcccggagtcactgagggtgtctccaagccaggccctctgggactcaggtgctgtatccctagaagctggtgtgggggtacgagcacatcagagggccttcccttggtgcctgtttcagatggaatgacctgtctgtgctgcgatggataggaaggcaggcatatttggtggtgggctgggtgctggacttctgtgcaccaaggaggcctgggtcttgggggctcttgaagatgccttctagaagcacctagggtgggggatttctgggggctgggcagggctggagagattgtcagccaggtcaggggcaccgcctactagggtctctccttgtgtgggcatgagggctgagcggggcaggggctgtgagaaaggcgtaggagattgggagtacagggcgtatgatgccaggtgaaaggagaggctgcgatgtgcgggagagggcgcctactagactatgggctccaagaagaggggaccactgtgagttgctatgatgcctgtcccaccctgcacagtaccaggcacacagcaggtgtttaattagtacctacaagaggaaagatagactcaacttgccctccccctacacagaagcccctctaatgttttcttgtttctcttgcaggctcctgatggaaagggaaggcccctagtcctggcaggatctgccggccccaacccgcatcctttctgcgcaggaaccatggcgcttccccgactctggagctgtccaggtgctgcctggtgatccgcacgcgacgcggcgacgggggcgcgggcgggcaccccgggggctgtccatgccccggatgcggccgcgccccctccccctccagccgggtacccccgcggctgggcggcgttcagggccgcgggcccgtccgggtgccccgtcgggggcgacatcccggcggccgcgctgaggccaccatgtgacacggcgccgcatcgttgtgcgaccaagcagcggcgccctggtgcctctcgtccatgctcctgggccccagccccgcgcaggccaaggatgaggccgaggcccgaaggtagggggctccgggcgggagtcgcgctgtcccccgcgctactgctgctgctgctgctgccgccgccgccgacgctgctggggcgcctgtgggcagcgggcacaccctcgccgtcggcgcccggagctcggcaggacggcgcgctgggagccggccgcgtcaaacgcggctgggtgtggaaccagttcttcgtggtagaggagtacacgggcacggagcccctgtatgtgggcaaggtaaagtggggccccactccaactccagatcccaggaccctggggacacccacgggtagatacaagaaacccttgttcacctgcccttttaaatccatgtttcatgtgcctcttctgctccctagccaaggactgataagggggcccagagccccattcccactcccactccgccccatgccctcctctccttcccctcccttttgcatcttagaaagagcccagcaggcaatcccattccatcctgtagctagatgcatgtgggatttaggaacgagtttgcaaatccgatcatctcacacacatactctagctgctccactctgcttaaaattcttcagcag

SEQ ID NO: 9030 - DNA, 6000 bp, Homo sapiens
ctgtaactcttcagttggtggcaggaatgagcaaaacaggaaagtcccctgtggtgggtggctgcagtgtatattgaagcctaggaaggctttgagaagaaggtggcatttcaataggatgggaatgtctcaaaggaggagctgtggttgggggggcacccagatgaagcagcaggtatcattacataatgctggacctgaggttcctccaggcgcattgggtggctgccaaggatctgtcacactctggattgtttatctgtgagctgggctctccacattactcttcagcagcagccataggttgtcattacaaagataaggtcaactaggaatgagtcatttacctgggactgggaaaattctccccttttcagtttctctgtggtcagctacccaagagaacttgacagatccttcctcctaggggctcctggtcacatgttgtaatggatccagtgtggactttgaagccagatggaactggtccttctgacaagggccctgtagttccatctgcagcactggaagatactagatattaaatgagtgattgcatttgagaccctatgtgcctggtgagctctgagagccatcactgggaactagaggtgggacttctggcagaggagacacttgggcagggcctgagctgccgctagtggaatttggttgagaggaaatgaagaacaagcaagtggggaaccaggtgagcaacggtgtggaaaaaggaaaatggcagcagaggaagcaggaagagtcagggagcggtgggatcagaaggcttcctggtcaccccctcttagcatgagacccaccagttccatttctttagtatttactctttaatatgtattgactggattatttttaattttgttttcgggggggcggggcacaaaattgagatcccacagtgacttctgtttgtgtcttgcttcttttcacctaatacatatttcccttctctcgcttctgattttgggtaacttcaggtagatgatgccccagtactcagatctcattttgctgtattcgtttattgcatttttaggttctccttcatattattgtaaggagttgtaatataaaaccccttataaaaaccagatctcttgagaaagtgaaggatcacctcctaatttatctttgctatcattccaaatcagttttgcctatactgattagttccaaaaggaactgttgtgagccccatcagaaaagagaccttggcaggatctcctgctgaccaggggtcacgatgtgacattttgcaacttgctccccacagtactgcatctggattgatggcctcagtgcccttctggggaaggacatgtccagtgagctgaccaagagtgacctggacaccctgctgagcatggagatgaagctgcggctcctggacctggagaacatccagattcccgaagccccaccccccatccccaaggagcccagcagctatgactttgtctatcactatggctgagcctggagccagaaacgacggtacccaggagaagggattttgggcccaggagaaacacttacattctggtgccttgtcttttgcttgtacagaatctgtagtgattttggtggccagtaaatgccagccatttctcaaacccacctcggaccacccagagtttcctcttggtccctgtctactaagagtcatgaaggcagggtgctctgcccactccatcaccatgaagcctgggattgggccacgaggaacaaacagcagatgcccttgccttccagtccaagaaactgcttcttgaaatggatttaacaacagccactcaccttttcctcctgagcctgctctctgatcagctggatccccacgtgagcaacagctggcccaggaaaggctgcctgcagaggacaggtgtgttgggcgtgttgagagccttgaagtgactacctgtatcttagatctgagtacaagcctgaggcttttgcttttgtcttttttgatgagggctcactccagcttcatatggtgccaagacgttgctgcttctgaggttggctctaacatctctggtctttagagccaccagatctctctggcccatacagatatcagagcagacggaaatttctccctgcaagcgctcagtctcatcccagcaagtcaaagacctcctggccaagtcctgccctcttaagtctccaggaacgctgcagggaaaacccagctgaggcctgggcctagactgtggtgaggtcactagattctactgctcttcccccacattaataccttttccttcctcagagagaaatctcccctaacctgaattgcagccccctccagtttgctttcctttggccttccagaccccaggaagttggccttcccttcctagtgctatggtttctgccattggccatgatttcagggagctggctgaggccggctgaggccacacctgtgccagtggggcttccctggtgctgcagcacttgtaaaccacacacacagcctctctccctggacatacgttagcacattggcattcagtattggtggcctggcatggtaggtactacccaatgaagagtgtactatatattttcattactataggccatacttatacagacgtgtatatatatttatataagatctacctatcttaggatggaaccttggggaaaaataaaattgaggggaagtaaaaagtatgtaacacttccagttgtgagccaagattgtaaccagagagcagccaggagcttcctgtcagtaaccatgttttcaataaatactctttcatgtacaaactgtggttcctgttaacagctgtttgtctgtacttgccccctgcccaatggtgaagatttcaccttgacaagacttgatctccatgtatctgggagactctggagagctccagctggagcccttagtcaccttccaagagtcccttcctcctcatcattcgctcctcccacacatacacacacacagacacacacctgctggttaagagtgttcacagattgctgcactgggacgaagcgttttctgctcaaccctgctgggtacagcaaggtaaggcatactgtacacccccatgaacacatcctccctcttctccctgccagggacacagccagggaacagctcgagtacttgtgccttacaaagaagacacgctctttaccctgtgtgttgcctgtgcatagtgcccagccttccagctggtgttttaggctgttgctccaaaccttggccttggtagctgggagacttaaatgagggtggtgatgaaaatagatctcttgcctctgagagagaagggtgtgaggacaggctctttcaaaaggcatagaaagtgcatgcaatacaagcctgaggactgaataaagccaagaccttgggcagtgatgggtaccattgtaggtgcttggtaagcactgaatgaactaatgcctgcatgatgccagctggcggcggtgacagccgcagtttgcataaaacactgcttacactctggccttgagccttctgttcagaggggccagggatcccagctgagtcacttgtaaggatccatgtttgcagctggtcttactgccagagagcccaggaggaggctagaggagggcgaaaggcacaaaactgggtctgaatgtgcaaccctagcttgccctggcctaatgttcttgactgcaaatgctgcccttttaatccatcccgcaagatgaagaaaatctgaactccctaggctggcattttggggccactgcaacctgcctcttggctactttaaccaccacagttacaaacaacctgtgagccccaggcacggctggagctttctcaccctcctttaggattctcccatttcctctatctgggatgctctctccctactcaacctattgaagttgagataattcttagaaagtttcatacagaaaatatttcacaaatgtttcgtattacttctggatcgcccaagttttaagttgtaatggccccagctggcctgagctcccagaagaaaaagcccatgagatacttatcttcgtggttcattccatggttgcccagcattagactggacataagaaaaacaatttgttcagtaaaagtaaacaagttaccattttttggatgctcactgtatgcagaacactagcaggcaccggggttccaaagcaagcccctgattgagcgcgggagagacgcagacaattacacggctgtgctctgagcctgagggacttcgcggaggacaaaactacgctgtacctcagaaagaccagaccacctcagaacccgaccacaacagacgccccgcccccgtgctgccccgccccgccttttcgccccggctccgcccagcccctgggtagcttccggcggaagttaccgcccgtgccgcggttcggcggcggcatccggcctcgcacttccggtggggagattccggcctggagctcccagggccgaggtgagtgggtgtgcggccggcctcccggcgcactcccagaggctggggggccggggctggagaagggaagcgggctccccacccgggatctgcgcgggttgacatggggcacgccacgcccctgcccctccccgggcctcagtttcgccgtctgtggagggggcaggggtctccaagcgccctcctgcaaggcacctgccggacgccggctcatctggtatttcctgagcacctgcgacgtcctgggtgcgggacccgggccggaatcggacacggccctgccctctgaggggctgcttcccgcggtgggattggggcgggcagtaaacacgtgagcaaacaaggaaacgtcagaggtgggagtgccacgaggattgggaggggtggggcattggagaaagtattcagccaagcggaggtctgcggaagggagctgaaggcaggaagagcagcaagtaaagaaaaacacaggtttgatgtgtttgacacgtggcagggggccgctgtggcgggtgctgggaccagtggcagaagaatgaggttacagaggccttccttgtggaccaggctgaggagctgggcttagccttagggcatgatctgtttcgtgtgccatctctctggctgctttatagattccaggccttaggggcgaaagaggaaacagggagaccagttagaccagtggcagtcagcaggtgaaagataattgtggcttagactgtggtagtgggaatggagaggaagagaagtagaggggtcaagaagtgtattgaaagtggaactgacagggcaggatttgagaaatgacagaaataagtggtcaaagatgacttcatcatagatttttggttttggcttaagtaaccaagtgtattatgctggcatttactaaatgactttgggatagattgggagcgtgagaaataattacgaaatcttcttagggcatcttaagttttagatatttggagtgcagctaccaaataggcagttagatatatgagtctgatacagaaaaggtcagggctgatgtaaagaatttagaaatcattggcaagtggattgggtaggatgagattatgtagggtaagatttaagagagaagagaagccaggttccaagctttaggcacccaatttttatagattgagttgacaagaaggtgccagcaaaaaagaccaataaggagtccagaaaagcagaagaaaaaccaggagaatgtggtatcgtggcacccaagagaaggttttttctaggaggaggaagtgatccattgtgtaaggtaagaatagagactaagccggcccggcacggtggctcacgcctgtaatcccagaactttgggaggccaaggcgggcagatcacctgaggccgggagttcgagaccagcctgaccaacatggagaaaccctgtctccactaaaaatacaaaattagccgggcatggtggcacatgcctgtattcccagctcctcgggagcctgaggcgggagaatcacttgaacccgtgaggcg

SEQ ID NO: 9031 - DNA, 6000 bp, Homo sapiens
tcgcgacagttttcagagacagctgatcggttggagctgttgcgccgagcagtcatggcggcggccagagctactacgccggccgatggcgaggagcccgccccggaggctgaggctctggccgcagcccgggagcggagcagccgcttcttgagcggcctggagctggtgaagcagggtgccgaggcgcgcgtgttccgtggccgcttccagggccgcgcggcggtgatcaagcaccgcttccccaagggctaccggcacccggcgctggaggcgcggcttggcagacggcggacggtgcaggaggcccgggcgctcctccgctgtcgccgcgctggtaaggtgggccgggatcccggcgtgggcggccccgaggctctggggcctgggcgggtgagggactcccctgcgctccgaagctggatttccctcagtttctccttctgtgccttctgcggtgtccggcctttcggaaatgttattctttcatcccttttttcattcgttaagtcttaagaaaccacgtggccatgcagcgtcaagcttttgtcctgaggccgttctgcctggttcaaatctgggatctgtcattattgctcaatgttgaacatgtttaacttccctgagccttggtttccccatttgactcgtttcaattttcgatcattatctttccatttattagttttaagaaacatgtaatgacaagtacttgccccactggagccaggctccctgggttgaaatactaactctgctgcttgtgtagcctttcaacaagttatttagcctctcagcctcggttttctcacctgtaaaatgggagacatagtagcagtatccatgtcatagggatgttgtgaccattagaggaggtatgtgtgtcacgtattatgttcaaatgtgtgcctggcacatagtgcccaataaatgttggatttcattaaattgcctattttttcattaaacatcattgtgcgccagcaccataaactttgtcctcagatgagaaagtgacactcagagagaagtaacttgcccaaggttacacggttactaagtggccggtccaggccctcagctccttatgcctctgactcagaagccctggctttttacttttacgcttcttgcctttcttttatcagtattttttaggtaccagtgggtaccaggacattgttaagtgctgggagatctgggtgggggatattcagtagccaacaagcggacacattgctgccctttcagagacttaagatttcatgaagttatttgtgtattcatatttctgttttcagcctcatgatctgtttcgttaagcagagattgtattatagctggcttgtttattgctgtatccccattgataacatctctcagtttctagaaaagtatactgagcctggttgactttcagtaaagattcattgagtttattggagctattgttccttgtatagtagcagaaactgaggcttagagaagttaatgtaattttaagattagattagacaactaataagaaaagcagctgggatttgaaccctgtcctctctgactacgaagatgaacctcgaagctagcacactgcttggcctcctgtttgtgtcctcatcagtagaaactgctctgactgggctgtgccttgctctttgtttttgttttttgagacagtgtctcactttgtcacccaggctggagtggtgcagtggcacaatctcagctcactgcaacttacgctccctgagttcaagctattctcctgcctcagcctcccgagtagctgggactacaggcgtgagccaccacacctggctaatttttgtatttttagtagagatgggggtctcgaacttctgacctcaagtgatccgcctgcctccgcctcccaaagtgctgggattacaggcatgagccaccacacccggcctttgttttgtttgttttttagagagtgagtgtgacaaatgaagtccagtgagaaagggtggtttggaagggaggaggaagctatggcctcctcagtttagctgtggggtgttcccaggcatagtcctgcagtgggcatgagcaggggaatattccagatgagttcagttgtaccatttcctgtagcattcctcaatagtcctgaaataagtagatatagatggaaaaactggcttaatctttgaaaattaagtttacccgttaaaaaaaatccaacccaataaccacttatgtcttgatttcaggaatatctgccccagttgtcttttttgtggactatgcttccaactgcttatatatggaagaaattgaaggctcagtgactgttcgagattatattcagtccactatggagactgaaaaaactccccagggtctctccaacttagccaagacaattgggcaggttttggctcgaatgcacgatgaagacctcattcatggtgatctcaccacctccaacatgctcctgaaaccccccctggaacagctgaacattgtgctcatagactttgggctgagtttcatttcagcacttccagaggataagggagtagacctctatgtcctggagaaggccttcctcagtacccatcccaacactgaaactgtgtttgaagcctttctgaagagctactccacctcctccaaaaaggccaggccagtgctaaaaaaattagatgaagtgcgcctgagaggaagaaagaggtccatggttgggtagaagaatgtgtatgacaaccacacacagtgaagctcttttttcaaagtaaatttgaagaaatgctacaagtatgagatgagatctaagtaaaggtgttaagatatttttaagtggtatgtgatcgtgtcattatcatctgcacttcactcaagagcttactatgtgtctaagtcatgttctaggcagaattgggtatttaaagtaaattgaggacaggcttctcccagattgtgacatgtatatctcagatacatgggtgtggcattgaaccacataatgagaacattattctctttttagtccttgtgagacaaggatgaagtctcagttgctgatactcgctgagcttactggccctctaacccagtgtttttttttgttgttgttgtgtacatgttatatttattttgaaaccagtttaatgggatacaaccagcattttaaaaaatgaaatagaatacagcatggaaaatatcagtgtattgttttatgaaactttcacgtgtatatatagaccaaggatatgtgctgagttttgatgtcaaatatatttctctttcagggtcatgatcaaaaaatgaaaagtctgcttaactccaatttctcttttaaaaaagcagacttacagctttcaggcaactgaaattcatgttaacatgtttttatttttattgctttgtatttttgtggttaccttctaagacaagtgattgatctaaagttccttttaagtttataccgctaaacaaactgagttgatttctatcacaggcagtaagtaggtagagcaaaaatggtgaagtgacttgtgaagactgaagtttgatgaagtctggtttaaggcacaggtaaactgagtgtggatgcaaaagtaccaggagctagcttttaaccttgcccagcctcagtttcttttcttagaagaagctatgtttgggtgggaagggaagagagggataagaaaatacctttcttccttgtaaactccaatcaacaaacatattttgagtgccttttgtgttccttggcaccctgttgggtattgggtacttggcaccctgttgggtattgggtacaatggtgagccagacagacacagcgcctgtccttttgtaagaatatttatttttataaaaaagtataaagtatacagtgggatgttttgatatacattatgaaatgattgctacagctgagctaattaacacccatcacctcacatagttactgtcttgtttcttaatatggacatttgcagctatgaatttccctctgcacactgttgtcatcacacactctcagttttggtattttgtgtttttgttttcattcatctcaaagtattttctaatttcccttgtgatttcttctttgaccccttgattgtttagaaatctgttaatttccacacatttgtaaatgttccaatttttcttttgttattgccagcttcattccattgtgttcagagatgatacagtcagtgcctgttcttatgaagcaaacattctataatagtaggaccagtaccctgtctgtttcattcaccacagtcagcatgccccaagtgcccagcatggggcggatggccaggaatgagtgaaaacttcccttcctgggtagttgtgactagtagagaggaaaaataatataattgcctgcttactgcatgccaggcattgggctgggaatttttatattggatctaaaataactcttaagttaggcattatccccattttatagatggagaaactggccccaaaaggtgggaacttgtccaagacgtcacaggtagcaagaggtacttttacctggctccaaatctgtgttctttccactgacaaatgagatatgggatatggtgcatctttacagtactataataagtattggcgtataacattattttcaaggaactccaagggccacaggagctgacaggtttttcaattaatattcccaacatgaatgagatgcctcattcctcagtttcctcacgtgtactataaggctagtacctgctttgttggggtatggttggctcgtgtgcattaagtcaacaaatccctagttgatagggtttggctgtgtccccatccaaatctcatcttgaattgttcccgtaatccccacgtgacatgggagggacccagtgggaggtaatttaatcctcggggcggctacctccgtgctgttctcgtgatagcgagtgagttctcacgagatctgatggttttataaggggcttttccctcttgttcggcacttcctgctgccacgtggagaagggtgtgtttgtttccccatctgccatgattataagttttctgaggcatccccagccatgctgaactgtgagttattaaacttttcctttataaattacccggtctcgggtatgtctttatcagcagtgtgagaacggactaatacactagtactcactatgcgccgggcactggagatctaatagaggggaacatgaagcttactttcctggggaacataagacagtttcagacagtgatgagtgaagatgtgaaggaaaaccagaaacacaggagatgaagagagtatatcccaggcaggctgtggcgtgcgaagttggcgaagaagaaacatccccgacagcaaggctggtgtggccggcattagtgagcaagggggaggagcagaacatgagatgggagaggcggggccggatcctgcagggccctgttacaaggttgggttttgttcttaatgggactcagggtttttaacagggtgatacctgattgttttgaaagggttgcattggttgctggcagaaaaccatagagggcaagagtggaagcaagaaacctggaagtgaaaaggcgaccgaaaccagctggtccagtaaaaacagtagccagggtggaagctgtggcgagcatgctccaactgcttggcacaggacctggcagccactgaggcagggaacgcggtggagaagcaggcttgtctgggggtaacacccgaggctcgttgtctcatggtcacggagatcaaggacagggacccacaaagagtgaggtgaagagcagaaatttaatagttgaaagaaagagaatagcgctctgctacaagaggggtcctggaaaaatgggttgctggatctgcagtgaaatgcaagggagttttatagatgagctggtgaggaggtgctgtctgatctacatagggtgtgaaaaactggttggacccaggtgtgccattggcacagggtatgaatctcggcacccccaccccagtctttt

SEQ ID NO: 9032 - DNA, 6000 bp, Homo sapiens
caaaacaccaaacacagttttcaagaactcatacaaacaaagcaatatacaggccgggcgcagtggctcacacctgtaatcccaacattttgggaggccgaggcagaaggttcacttgagcccaggagttttaggttgcaatgagccatgatcatgccactgcactccaacctggatgacagagtgagtcccgatctctaaaagcaaaagcaaaaacaaacccaaacaaaacaatatacggttgacacatgacaaccatttcctatgggctagtgggaggggaatgcagataaaagggaatttaaaaatgaaaaaaacaatacagaagaaaaacaagtaacaaggttttctgtctgttcctggccttggcaagagaggtgtgtggctccacgaggacagggaccatataaattactcaccctcaattcccagcaccaacacccatgctgaggcacacagtagatgctcagtaaacatctggaatgattccattaatcaataaatgaactgatggagaaaggactttgcagagaggctgctctggtatttggatagcccgttgattttggagtcaaacaagagattcccatatctggttgtgccagcacttgccagcaagatattgggcaagacaccttctctcggagctttagcttccacatctataaataacctcatctcttatttacagatgtggaagctgatggatgttataccttcagaggactacttgtagtaggtgcccaacaaacatgcatctccactccttggttatatggagtagagaagaaccgcacttctaggtgttattttagctgtacctggaaggcaccgtaatgcctgcagtaatgcctggaaatttcaccattatagagtcattttttccctctcatcaggaaggatttattgctttctgaaacctcctgtgggaatgcccagatctctggagaaaagttgccttcaacagattaggcttacagaggggccagctgagaaccctttctgaccctaggaacaccagactgaagcaggagggaatgtgattgttcactgtctctcacaccccaggtcatttgcacttgctgtttcctccacctggaatgcatttccctcattctccccatggctagtcccttcttatctttcaatctctattaatctcctctgagacacccttcctgaccaccctgtgtaacactagcagcttggtctctctttttccaccccatcatgatgttccatttcctttataacaatcactgtagcctgaaactctctctttaaaaatttacttttttagttacctgtcttcctccactggtctacaagctcagaaaggggggcgggctgaattagggcaataggccagaagtttaggttttagtctaaagcaagggaaagtcttgggaaggttttaagcagatgagaaacatggtccaacatttcatggtccatgaaatgtagcagttgttttggtggccatggggagaatgaactgtaggaggccaagatgggagccaggcatgggagccagggatgaggccaagatgggagccaagttgcagggaggttgcagggagacaagacgatggtaccttggacaagggtcatgatggtggagatgataagtggacaagtaaaaaatatataataatattatgtgcaactctatggaaattatggaaatgaaccccttaattttagaaaggaagaaaagggccagagaggaacctgtgttggaacactgtatcttgttcagtttttgtcctccagggcaggggagctcactgctgtacccatccccggcacttttttttttctttttttttttttgcaacagggtctcactttgttatccaggctgaaatgcagaggtgcaatcacagcttatagtggctttgacctcctgggctcaagtgatcctcctgcctcagcctcctgagtagctgagaccacaggtaagcagcaccatgcccagctaattttttattttttggcagagatgggtctcactatgttgcccaggctggtctccaactcctgggctcaagccatcctcccgcctcagtctcccaaagtgctgagattacaggcatgagccactgtgcccggccgctgacacctatttacttatcatgcagtaaatgaatatttgaaagaataaatgagtaaacacaaggcccatctgtggcatccttagagaacccttgcctgcctctccaggtacctcctccagttttcatttctgggattatgtgatgggttttgcctcccccactggatggggagctccagggggaagactttcccttcacggagcctggcattctgcttgcacataggaagctgtcaataaccagatgtccaacttaacatgaataaatgaatgaatgaatgaatgaatgaatcaccagactatataaaccagctcactcttcaccctctcttccccatacctcgctttatttttcttcttagcggttatcaccacctgccacattgcatatgtactgatgtattcattgtccgcctccgtcccccacccccgaccccccgctaaaatctagaatggaagctcatgaaagcaagggctatttacagttccgatctgccccctcccaccctctgacccttcctcctgtttcattatttcccccagcgcttgtcaccgcctcatatatcctttcgcttttttgtttatgatctgtttccaaccagctccacgagggccggatgtttgtgtttgattcacagctgtatctcagacgcctgtcaccgtgccctgcaccgcggctcgcgcacaggaggcgttcaacacacgttgttgacgggacgaaggaaggcgggatcgcgaggccagctgtgcaggtggcctgggtggagagggatgcacggccacgcgcgtctccttggcccgatcccggagcccgcccccggcctccccggcaggctgggccgggcaggcaggagttaagccgcgctcgcttccgacccgcaggtggcgccgtcctgccttggtgcccggctccgggcgctccgaagtgcgggacagaatagcagcgagcgcggagccgaagctcagccccgacttgttgatctcgcccaggcagccgccgccgccgccgccgcgggagcaggaggaggaggaggtggaggaggtgccgcgcggccgcggtcctgcccccgcgcccccggcgcccgccggcgccccccgcctcggagagcgcgccccggccccgcggcgcctgcagcccgggcgagttgcctgcccggccggggtaggcccggctcagcccggccccgggaccgccgctgcccacgggcgggggcgcccgggcggccgggacgatgcgcggtccctggccccaggaggcggccgccctgggggtgagtgttggggcgtacggccttccgtgggggtgcatggggacacggacagggggtttgcctgccgcagctcggcctgttggtctgctcgggctccgcagctccaggctggaggggagcggggtgggaggcaggcaagggctgaggcctgaggggacgcgcaatccccattctggggctaaggcgtgagccctacatgcagggggtgctcaggggaaccccccgaaatcactagtgcgcggtaggaggatggcaccttttgaaaaggccagaaaatttagctcatttccccgcctcccacctcccccaccccttcccttccaagcccggggaaaggcgcagaacccggagttataaaaagccatcgcgggagaggaacgaggaggaggagtaggaggaggaggaggaggaggaggaagaggaggaggagggggagaaggaagaggagggggaggagaaggaggagaagggggcggggaaggagcgaggggaggacggagcaggcggatcccgaggactctgcccgcccctcctgcggtagggttgggggctcagagggagaggcgagagcgggcttttcctcctcgcggctcaccttgtcgctggagcaatctcaggagatgctccagtgtttgggaagaggggtcgctccaggacagaggggctgttgtgcacaccccgtctgttgtgacctcggacaggtgggcacctggaacccccggaattcccccaaatcttttaagatttggaaaaaagcccgctgccattcccccacccccaaaatcttgattatctcgagaaggggaaggaaaagaagagaactcgttaaaaaaaaaaaaaagaaggaaagaagaagaagaaagaaagaaaaagataaagaaagaaagttttcatgcagctccccctctctccccatggcggggccaggttcgggactcgatcgggagacccataatgaagagagtttcagcactctaaggggcggacagcgccccgggcggctgggtcgcgcctgggccgcagaagcccagggtggggcctcccgggctccaggggcatctcttggggccctctccccgccccgaggggcggcccctccctccatccatggggtgcggcggacttcagcaccggcgggagggacagcgaccatccgtcctaccccactgagccgcttaagcgcgggggaaggtcaaggccggctgggagcctggtggagaggtggggggcggggggacagcatgcccagctccccgtttgctgacccgcgtccgctttcgctttctgcctcgcagccgtcgggatggaggtgagaagacggccgtgacgcgcgcccgcggggccccctgcacccccagcagcccacagcgctccctgcccccctcccccgcagcagcgggccttgccgtcgagtgacagcggcctgggggggcagggggggcgggggcggccggatcagcgatgccggcgggcatgacgaagcatggctcccgctccaccagctcgctgccgcccgagcccatggagatcgtgcgcagcaaggcgtgctctcggcgggtccgcctcaacgtcggggggctggcgcacgaggtactctggcgtaccctggaccgcctgccccgcacgcggctgggcaagctccgcgactgcaacacgcacgactcgctgctcgaggtgtgcgatgactacagcctcgacgacaacgagtacttctttgaccgccacccgggcgccttcacctccatcctcaacttctaccgcactgggcgactgcacatgatggaggagatgtgcgcgctcagcttcagccaagagctcgactactggggcatcgacgagatctacctggagtcctgctgccaggcccgctaccaccagaagaaagagcagatgaacgaggagctcaagcgtgaggccgagaccctacgggagcgggaaggcgaggagttcgataacacgtgctgcgcagagaagaggaaaaaactctgggacctactggagaagcccaattcctctgtggctgccaaggtgagtctgggatctgggggctgctggtctggggggatctgcttgcatccccatattgaggaccactgctggaggactctggctttgttcccaacgatgaagattagtaatggggaggggctaggactgagtccccagaggtgaggaccaaccccctcagacttttcccatgtggcactggtcactccatctttttattatccaagacgttatacccctacttggttggagaggtttcacagggacccataaaaagccacagcaagaagatggacactgacgaataagagagagagcacagagagacaacagtggcttgctggggtggagtagggtttgcttccctgtgaagtcccagacctaggctggattggatcaccctgtgattttaatatctccatatttataacctcactctgccccagcaagggaaaaaagcagcttacagacatgcttacaggacattgagatactgtcagatagtttaaacataagtaagaagggaccccgaggggtgggtgtggacccacacgacacatgcagttggttgtggatgcttgcgggtgaggggtcaccccctggtta

SEQ ID NO: 9033 - DNA, 6000 bp, Homo sapiens
tttggcggagtgagtggcttaacagtggaacaatttcggaaaatcaatggctttcctaatgctttctggggttggggtggagaagatgacgacctctggaacaggtacctctgccgttctttcggtgtcttctagaaatgctaccttagactgcagaccaatactatccgataggaatataatgcaagccatgtgtgtaatttaacatgttctagtagctacagtttaaaaggttaaggaaaaaaatgaaattgaccagctgtgatggctcacacctgtaatcccagcactttggaaggccgaggtgggaggatcacttgagcccgggagttcgaggccacagagagctgtgccactgcactctagcttgggtgacagagtgagacctgtcttaaaaaatacacacacacacacacacacaccacacacatccaagtttttagaaaatatctttaatcttaatttaaaaatatcttaatatcttaaaaaacaaactgtatatcccaacaaagcagctattttcatttttctcctttgacatgcgaaaatcaacaaattataatttagcaattttttcttctaataaataatacgttcattataaaatacaaatgagtataaaaataaattacccacaacaataagtaacatgttaccatttcattgagtttattttgtgtttaaaaagtggcaagtgaacagtaatttaaaatctctgtgtgtcagtttttaaaatcacaaatctcaggattgtgaggattaaatgatgtaatgtgtatagagctctggcatatctgatatgtgataagctctcaataggtgttactgtttttatatcaacattaaatactctgtaaacaggatcttaagtggctccatttaattcggttatatagatgtactgtaatttatgtaactatttcctggtgtatatttagaatcttttccattttccactatttagagtgtgatatagtagataattcttttgcctgttattcctatttaggaaaaattcctataagcgaatgtagtcattttaaggctctttttttttttaagctctgtcctttaatggatgcaaatagggtttttaaggcatattataactaagtgcccctcctgctaaaggttctaacaaaacttttcacttcaccagtgttctctgtactaaatgcccatttcattggaaccactccaaactgaagggtggaatattagtgatatgtctacatagatttagctgcgccatcacataaggcttgtactgtacaagcttgggtgaacaatcctgtgtgtgagtggaataaagtaatatttttatggagtaagtaaacagtaacctcataaggaacaaatgcaaaatactacctggtatctgtttcctttgtagcttggcttttgaaaagtatgtgtttgttgttaattacaaggactattttgctaataaaaattcaaatgataggctgagcactgtggctcacacctgtaatcccacctcttcacaaggcctaggcttgaggatcacttgagcccaggagttcaagaccagtctgggcaacagtgagaccttgtctctacaaaaaataaaaaaaattagcctgttgtggtggcacacgcctgtagtcccagctactcaggaggctgagatgggaggactaattgagcctgggagattgaggctgcactgaaccatgatcacctcactgtactccagcctgggcaacacagtggaccctgtctcttaaaaaaaaaaaattagatgatacaagtgtctaagtattaatccccattttgattctattttattccctggaagtaaccatttctttccgtacttttcttttcttttttgagacagattttctttctgttacccaagctggtgcaattttgctcactgcaacctttgcctcccgggttcaagtgattctcctgtctcagcctcctgagtagctgggattacagacctgcaccaccacgcctggctaatttttttttttttttttaagtagagatggggtttcaccattttggccaggctggtctcgaactcctgacctcaaatgatctgcccacctcggcctcccaaagtgctgggattacaggcacgagccacctagcccagcctattttttccgttcacataaaaactttaattcagttaaaattgagttttaactcagtttttaagaaatgacacaatgagtcagttaagcgggtgagagcttttgctgtgtgtgatttccagggtaagcttgtaacatgtcttgtaggctttggtcactcctgggctattaccgttgtatctaaaagcctgttctcttggtcttggacagagtacagaatgcaggctattctgtgagccggccagagggtgacacaggaaagtacaagtccattcctcatcaccatcgaggagaagtccagtttcttggaaggttggtggaatttatctctgtctcttagaagtatcccctatactttcatgtccggatatcttagagcatattacagccccttctcctactccccaccccgaggccctgttctgacagctgtttgacagctgttgcatgtattctaactctgaggcagaacagtgtggggatcagaccgttggtgaacattttcaatagtaagattcttcgaaggaaatcacttgtcctatgtcttcagccttgtggtctccacagtagcctttggggaatttgggaagaaacagcttggatgaaggtccctgaggtgacagagcagtggcgccctttccgcaggctcccgttccgaatggtgtcctgagcttctgtctgggtggctgcagttgctgtgttaccttttctttctttgtgtgtgtgtgtgtgtgtgtgtgtgtgtcttttctaaattgtggggaagactgtgctctagacaaccaattctaattgctgaaattctgttttcatgggagtaaaatggcactgaatacagagtatgaactttctcatctgttgtatttttaatgctttacctcccacttccccactctctgaccttgggcaagttacctcacattattaagccttggcttcctcatttgctagcaggggctggcgtgagcattaaatgaaataattaagtgaagcacctggcatgaaacacaggaggtgtttctgaccacagcactcagcctggcatagcagaattggccgtgcgcccaccttgtgctgcagaagtgctgccatgggttgcgtcctctgctgtgggacgccctgctccatcctctggctgcagaggcatggatcctcactcagagccacctcttctctgttccctccctaaacaggtatgctctgctgaggaagtcaaaagaacggcaagggctggatggcctcaacaacctgaactactttgcaaacatcacatacgacgccttgtataaaaacataactgtcaacctgacacccgagctggctcaggtgaacgagtactgagaggagagaatgtacgtttgctttacccaccgccaccaagaaagcagtccgatgagatttttttttggaggggggagggtctacacagcaagagaacagaaatactgtgtctcatgaaggatcacagagttcagggggaaaatgtgacagcacacgcacaaacgccttcactggatcagccgctggaactgagggagtgagcttggggacttccttcgtcagcactggctttctgttttcacaagacagacgtctgtcccgctgctctctccccatctcctaccccacatcctgtcttagccgcagtctccagaacccatgatgaactgtgatctgccgtggtcctgccgtggtcctgccgtggagcctgtccctacacatgaccttggagcctcttggccttcagagcagaggcaaacccaccacagggcagctgcgttttaggaagagcaaatgaaactccacaccattcttctagatctctggtgttctctttggtttcatttttttaaaaaattaccttctttgggtggggattgagggtggaggggagggtgtttgggaaagataaatagacataaatatataacaatcacttcttgaagaagtataattgtaaataagccatgtaaaatgcctttttaaaatttaattttctagctggctccaattcaaattgaggatttatgtattaggccacttacttggttggcaagtgcaggaactcagttaaaatgcagttgaagaatgtcatctcccgaattgctgtcactttggcgagggagtggatatagggcatgtcacaaaagaacaaaataacccgacctttattgctgggagctggcttctgtccctttcttcccccccccacgagtcttgcccttgacttctgctctggattcactcttccctgtcggccgcgcatgtgctcatcccactctccgctaagcgggaggctgctgttagagcaggctgcttcctgcctaaagcaggcccttcggggctcgctgcacacacatctctggctctccaggcttcgtgttctgtcttttcatcagcatggcggggcggggggcggggggcgggggtgtgtatgggaatccctccccctcttactttttctcttgtggaacttggccacagtttctgaacaatgtgcctacattaccagctggcttcagtgattcctctgtgtccctttttggtttctggaaagattctttgtcaacattagtaactgatacatagaaccaaggagcactcaaatagggagccaggagccagggagctggtgacacttgtgtgctgtggggcagctgggatccaggtaagaccggattgaagctttgaaattagactaacaaagctccagacagcaagagcccaggtgcactgctcacacccccacctgcattttgaagtcatattattttttgttttgttttttaagacggtctggctctgtcgcctaagctggagtgtggtggcacgatcacagctcactgcagcctccatctcctaggctcaagccattttcccacctcagcctcccgagtagctgggactacaggtgcacaccaccacacctggctaattttttgtatttttagtagagacaggggtttcttccatgttgcccaggctggtctcgaactcctggactcaagcaatccgcccaccttgacttcccaaagtgctgggattatgggcgggtgtgagccattgcgcccagccttgaagtcatgttctaaattgtatttgaatttgtgcctctttgtttttccccaaaccaaagccctcaaattgtagtctctgtcggcttctgcagaattctggaaaatgccagttttcctcccccgcccttgttttccataaaacatatttatatattgtgatgaggagtactttctgaagagtacttcgtatttttttttaattgccttgtttgccttcaacttccttgattttcatagtttacatgggtgtgtgtaggggtgtgtgtgtgtatgtgtgtgggttagggcttttttcgttgcatgtgatggttctgtggacatatgatccccacaaactgtgggagtgattggccaggccttgttttgtttgtttgtttgtttgtgtttttgttcttttgaagaatagagtggtatttagaaaataaattgcattgcaaagctcttatcggctcatatgagagagcaggttcctgcccttgaaaatgccggtaagctatagcatatgttttttaagacttaagcatttcatgctttaaaataccttcacaagtgaacattacacacagaagttcatttggttttcctttgttttatggtgcatatagcaataaagacccccctccaccctgcaacccccatcccccaccgggcctttgtccctgccttggcttttctccccttctcattctcctctcccctttcctcactgaaggctgtgagttgctttcaatgtgacaacactatgatgtcatttggaaggatttgccaggacagactgattctgagtcctgggt

SEQ ID NO: 9034 - DNA, 6000 bp, Homo sapiens
tgagccaccgcacccggtcgagggctggtgatttttaaaagcagagtatttgactcctactaacttctctatgcatcggcttaattccagagagctctgtggctataatctaagggtctcaaactcaaatgcctatagggccgggaaggaaacacacatgagtggaatagagtgggtgttaggaagacaatagttgggggtggggactgtggtggattggagcatgtgctgcctaaaggggtagccatttctcagttggcgtttgggccaagtgttgccagatatcctgattttttaaaagaagccaaggatatggatttttacatgaaatttctcaactttcaaaaacttctccaagccaagcaaaatatttgtgaaccaaattcagcccatgagctggtaatgaataagcaatcttgttccagtagcacaaacccttagctttgagggttgggaaggaaggagtccatgcaagttgatattttgacctgagttccccagaagtcgccttatcatgttggtctcgtcaacaagaaatgtactcatttaacaagcacctctttgaggctttacagtgctgagcatagggattcagagatgactaaagcacgtttcttcccccagggagcaggctgcctaatgaaggagccaggcttgcacacagacaattctagaactggtggtaagtgccgtgaagacgggtgcaccagttgtaaggggaggggtgctcattttagctggaagagccaaggaaggcttcctggatgaacatggctgtccagttcagccctgcatcctcaaggtgatgtttgctgacccctgagcaaacgtggcattgctttcatagttgtgcatttctttgtccattgcttctgatttatggcaagtggtatctgttttccattaatggaaacaatattagttgtccctttaagataaataataataggccgggcgtggtagctcacacctgtaatcccagcactttgggaggccaaggtgggcagatcacctgaggtcaggagttcaagaccagcctggccaacatggcaaaaccatgtctactaaaaatacaaaaattaaccaggtgtggtggcacacctgtagtcccagctattcgggaggctgaggcacgagaattgcttgaacccgcggcgcggagattgcaatgagccaagatcgtgccactgcactccagcctaggcaaaagagcgagactctgtctcaaaaataataataataatagacaatagttactgaatacctactatgtgccaggcactgcattaaatgctcctatgtacataattcacttaggcctcccagcaatcttatcaaatcacgtggctgtacccattttacagacaaggaaattaagacacatcaaggttgagtcacttgcccaggctgtgtggctccaaagtctgcgttcataaccattaaccaggcttctccacctcagcattaaggacacttgggaccagacaagtgtctgttgtggggactgtcctgtgcattgtaggacatgcaacagcattccctggcctctacctactaaatgccaatagcaaccccagtcatgaccagcaaaaatgctcccaggcattgccacatgtcttttgggagactaaatcagccctatgagaactgtaggtctacactaaattgtttttccaagccaaataaataccaaaaaaaaaaaagttaatttaaaataaaatgttaagtaaataacagtacatgtgtcacctgaaaatccactaggatgtcagctgcctgggatcagagaccccttcacattctgcacacggctgcatccccagtgcatagatggatatgggagaattgtgaaggctgggagatgctgaacaatgttgttgctatttcactattaggtgaatgtctttgtcagctcaggctgatgtaaccaaatattaataccacagactgggtggcttcagcaacacttatttctcccagttctgccggctgcaagtctgagagcagggcgccagcagcactcttctctgggtttcacacttagatgcctccctgagtgctcccatggcagagagaaagccctagtgtctcttcctcttcttcttttttttttgttttgttttgttttgttttgtttttattttttgagatggagtcttgctctgtcacccaggatggagtgcagtggcatgatctcggctcactgcaaccttcgcctcccatgttcaagcgattctcatgcctcagcctccctagtagctaggattacaggtgcacgccaccatgcctggctagtttttgtacttttagtagagacagggtttcaccatgttggccaggccagtctcaaactcctgacctcaggtgatccacccgcctcggcctcccaaagtgctgggattacaggcgtgagccaccgcgcccggcctgtcttcctcctcttataagaacacgaatcccatcgtgggggcgttgctctcataaccacatctgaaccaaatgacatctcaaaggccccacctcctaataccatcccattgagggctagggcctgcaacctatggatgtgggggacaaagattccatccctaacagtgaatatctgcggaatctgcattctcagcaaggtgaagctaggggtggtcactgagggtcttccctcccttctccccacaggcccgagagggatgtgaaggcccaaaatgaccctcttaccgggagacaattctgactacgactacagcgcgctgagctgcacctcggacgcctccttccacccggccttcctcccgcagcgccaggccatcaagggcgcgttctaccgccgggcgcagcggctgcggccgcaggatgagccccgccagggctgtcagcccgaggaccgccgccgtcggatcatcatcaacgtaggcggcatcaagtactcgctgccctggaccacgctggacgagttcccgctgacgcgcctgggccagctcaaggcctgcaccaacttcgacgacatcctcaacgtgtgcgatgactacgacgtcacctgcaacgagttcttcttcgaccgcaacccgggggccttcggcactatcctgaccttcctgcgcgcgggcaagctgcggctgctgcgcgagatgtgcgcgctgtccttccaggaggagctgctgtactggggcatcgcggaggaccacctggacggctgctgcaagcgccgctacctgcagaagattgaggagttcgcggagatggtggagcgggaggaagaggacgacgcgctggacagcgagggccgcgacagcgagggcccggccgagggcgagggccgcctggggcgctgcatgcggcgactgcgcgacatggtggagaggccgcactcggggctgcctggcaaggtgttcgcctgcctgtcggtgctcttcgtgaccgtcaccgccgtcaacctctccgtcagcaccttgcccagcctgagggaggaggaggagcaggtaagagcccacgccccgcggggaaacgcgccaccacgagggaagggactctgagcattgtcacctcctccagaaagcctcctctgattgcacactggctgaatagcatccctggtccctcctgacatcaggaatgtttgtgtgcatggtctgcctccctgttaatatgtgagcatcatgggggtccacgcctgtgcctgtcctggcctccactgtgcccaccactgccctcccccttgccagtgtttagaacagtgtccagcacaaacaggcactcaaccactatttgttgaatgaacaaatgagtgaataaatgggtggtgtgatttttgacgtgcctggccctgagcgaagcacattacatatatcatcaaatttatctcaaccattcggtcctttctcaacgttcctaatcctttgcatcatagtagcccagacacattttctgggtcctgaagataatttttattgataggtatatgtgtgtctacaaatggtgagcatttctttttgttacataagagaatgaatggaaagtttatttactccagggcctgacacggggtgtgtgctacagtctaagggctcccactcatctgggagttcacgggagccggagctgggctgcatgtgccaactacgtcttatctccctagggaatgctccagcaaccctgtgggggaagtgttttcacacccactaggtatttgaggacactgcccaaccccaggtctaagtccagtctgtctttgtaagcatggaaatatggtgtccacgtggcagcttggggacctaatatagccccacaggactatgtgattggcccacacaaggtttcccaaaaatttgacttggttgccaacaataaaagtgaagttttttcatataaaaattcaaaatctcagcttcttttaaaaaaaatcataagatcaggccaggtgtggtggctcacacctataattccaacactttgggagctggaggcagaaggatcgcttgagcccaggagttcaaaatcagcctgggcaatgtagtgagaccccgtctttacggaaaaaaaaaatttaattagccaggtgtggtggcttgcacctgtagtcctagctacttgggaggctgaggcaggaggattgcttgagcctgggaggtaaggctgcagtgagccatgatcacgccactgcactcctgcttgggcgacagagtgagactccatctctaaaacacaaaatttttttaaaaattgtgaggttgggtccctcccctccccctgccccgccaccaacatatacaccagcctgcggtcctacatggcacctcctggggagatccaagtccacaggggcccagttcagtctccttgtgtatgagatcatgggcctttgagttggtgactccttccctgtatatggggattctggaagcttcaagaaagaccaaaagttttcagaggtacaaattgtataggcagtggagaaataggtatggcggtgtgaactgaacgtaaatatcatgccagccaatatttattgagcactgactgtataccctgcatgtgctaagtgctttacgtgcactctcgaatttaacattagaagtactcaccatgtcaggatttttccacttatgtatgtggaggaagtagcagtagctgttgcattaataatccacagaggcttactggtacttttggtatacattgaatttatttatttatttttaaaagatggggtattgctttgctgcccaggctggcctcaaagtcctggcttcaagcgatcctcccacctctgcctcccaaagtgctaagattacactgtactggagtacagtggtgcgatcttggctcactgcaacctctacttcccagattgaagcgattctcatgtctcatttacatgcactctcgaatttaacattagaagtactcaccgtgtcaggatctttccacttatgtatgtggaggaagtaggccctcatgcctggcttataagttgaatttttaaatgggtattaagaaaatagcattcaaccagtaaggttaactttttaaacttttttaaattaaaaaaaacaattttaggccacgtgtggtggctcacgcctgtaatcccagcactttgggaggctgaggcgggtggatcactttaggtcaggagtccaagaccagcctggccaacatggcaaaaccccatctctgctaaaaatacaaaaattagctgggcatgttggcactcgcttgtaatcctagctacttgggaggctgagacatgagaattgcttcaatctgggaggtggaggttgcagtgagccaagattgcaccactgtactcaagtctgggcaacagagtgagaccctgtctcaaaaaaaaaaaaaaatttagagatgggggtgttgctatgttgcccaggttggactcgaactcttggactcaagcattcctcctgcctcagcctcctgaatagctgggactaaaggcatatgccatcacacccagctggtaaaatcaactttcaataagcatga

SEQ ID NO: 9035 - DNA, 6000 bp, Homo sapiens
cagcagggcgtggtggcacacacctgtagtcccagctacttgggtggctgaggcagaagaatcgcctgaacccgggaggcgaaggttgcagtgagctgagatcacgccactgcactctagcctgggcgacagagtaagactccatttctaaataaataaataaataaataaataataaaaaatgttatgggaatgtagagatgggggagtgtcagcaccatcctaatgtggggtggtggcagatttctctgacctcagtagtgattccaggtactcttgggcttgtccagcgtcagccactgtctctagatggacaagcctggtttcatcactcttccatgctgacctcacttgctttgccatatcagttaatttcttcccaattgattgagccacaagtccctgcagggccaccaagatgaccccatgctatgctacggaccccatcgggtgctgacacgggctttaattcctgtctagaaacctgtttctagttcaactagaacttgcaacacgggcacggttcagatgatccagcattttctgtgttgtgctgtggatagattctgaactctaatcttggtttcccccgcacggggcaaactcaagccgctatggctttggaacctcagggccaggggtcatcctgaaagtctagctggtttagcagacagtcctctttacacctctttcctcctcagtaggagcatttaattttctgtctgtgttattcaaacaaaaaaccctcaagagtgatactgtttctcctttatcagctgggggagcagggcccggaggctgcttctctgctaagaagctcatgtgtgttcaggattgcaggatagactctctctgggggaaactttcagttaatgacaaccccctcacgccccatcctccgtgggaaacctgcagggcccaggctctctagcaatggcccatcccttgctcctttacctcaggccttctcagtgggggtggtgtggaccccaccgcctggggaacaaacagtggtctttggtggggtgtgaacaaaccctaaccttttacgtataaaggagatgtatatataatattataaacagatacacagtatacctgtgacattaacatgtcatggaggtggtcaattaggagaagaagaaaagtctaaaaatgttccttaaggggcaataacaacaaaaaggcagagaaactcgaccttaccctggaagcatctttgatcgcggctcttttgccagcttccaaagctccttaggaaggttttagtaaaggtaaaagaaacatcccctgaaaagtaaaggtttcacagttgcagccccagtttctagaaaggatttgtgagcatttactgtgcgctccaggaactaaaggagcatccctgtgaacagtggagttttaaagcagtttcacccttgtcactagtctctagaaagcgttttgtgagacctagtatgtgctcaaaggcttgggcctgaggtggtcacagagatgtggcccctgctcaggaagctcagcttgtttgtgatagggacacaccacaggaccgggtcagaggtgtaggaaaaccacagggtgagttgagccttgggcctggcacttagtaggtgctgcctcagtggcagctgcatttcagcatcctgtgctcagaaagtggagaaggggcttattctggcttctgctatattgaaagccacaaactgtcactcctctcttaagaaaacctcataaccgggtttataatcctgcagcaggaaaggcagtacgcccgccccccccaccttccatcagagtccctgagggtcagcttaagcctttctctgacaagggggtctgaacactttgcaccatgacccagactcatcctgtggctttctgcgaccatcactggaagcagagggtgcatttgaatgtcattttctgctcgccagtggccgggacttagaaagactctccaactgttagacaacaccaaatcaaaagcatctctgagttttcttcccctgtaattttctttccttctttttttctcttttttttgagacagtgtcttattctgttgcccagggtggagtgcggtggtgcaatgttggctcactgcagtctcaagctccccgggctcagatgatcctcccacctcagcctcctgaacagctgggactataggcatgtaccaccatgcctggctagtttttgtattttttgtagagacagggttttgctgtgttgcccaagctggtctcaaactcctgggttcaattcttctgcccgccttggcctcccagagtgctgggattaaggcatgagccactgcatctggtggcccccatagttttcttctcctgggtgttaaaagtagcatttcactgtcaggaagctacagaagagagagcgaggaaaatcaagctgcggcgctgtgtgctcttagccatggtaccttcccttacagtccatggagaaagagggccaatgccaggaggctgtgggtttgtgacgggagatgactttccctttgatagttgtgacgcctgtttctggaccccatgcaccttccggaatattcctgcctgctcactgccgtcttcccctttccttgcagatgtgtacttcatcgccaccttgtcattcttgtggaaagtctccgtcatcactctggtcagctgcctccccctctatgtcctcaagtacctgcgaagacggttctctccccccagctactcaaagctcacatcataggccgtgcgttcgctggagggggccctggtcttggcgcttccctgatggacagagctcaagttccatttatattaaccgccacctgtggattttgcagtaattgctaacacatgcagttttaatgggaagtggctctgcgcctaaacggagtcctaacgctgcatcaacgggagggagggtcctgaaagagacccatctgggcctgtctgaacccctcgttcttcatgtttaggtgaatatgaatatgttaaagctggtggctcagctgggagatttatatgggtcactgtgcgagcttccttatgacttgaattttgttgtcacatgataaaagtttctgtgtagctgaaggttgtagaaggcttgtgtgtgtgtgtgtgtgtgtgtgtgtgtgtgtgtgtgtttttaaagagtcctaatgtgtatgtactctttatgtctttcttgctcttacaaagaggtgtcagaaaaatagaaagctcttggtgtcggtttgggaggaaaagacagtgacatttggtaaaaagttatccacacaataatctccattcggaaatgctcagtatcgtctccagccagccctgcttatccaggttacactggattcctgggatcgtaaccagtaaatgagaggagagggagagagagtgtcctaagtccaatctgttatccttgatctgattcagcatccatagtgtgtgagttaacttcacctgccacctcgtaaaagaatttcagaggtgtgatcccgctttattgggacctggtaacaatcacaaagccagtggctgtttgagaaggacctcagacattttcagcagagttgttttagcaggaaacgtgccactgaatggcccctaaatgtgtcgacagtgtgataagagactcaactaattctttaggcaacatggcagatgtgactcagatcctccaagaccaaagcggaaaggtcagggggctgggactcttctcttccatagaagcctgtttcctgttaggaggcataatggaagatgaccccacaaaggcagaggcatctttcggaacaacactggtggcagctttcagaacaaggaacccctggtgggaggacgcccaagctacagcgttgggatctgggatctgttccactgccggcagatttcaaggggaacttgctgaaaggcagccagtggtgaagatttctcccctcccaggatggactacatgccggcatgtttcttataaagctgtggctgcttgtttcagaggaagggagtttgcagtcgcgggacgtggtagagcaaggcattcttgggttttcaagttgcttcttgcagaagccacatatgcatgccataagggttaagttggtggatctttaagagccaagtgtggttgagatcttggatttgcgtttacttcttgatgaatacatatccttcaaaccctctgcctggcgctacttctgtgtgcttcagagatgtacatcacagcctggtttctgatgcctactaactcctgctcttggagagctggagacacgaggatcagatagtcccttgcctttggagcactcttgataagcttttgtattttgtgttgtccttttaaaatgttctagaatgactttacgttgcaggtactggttaattggctgttgacaccacatctattttgtcttatgattctgcagttttgcagtacttttctctatctgattcagccatttctgccagagggaaaaggtcggcagaaaagatgtattgagtgaatagttaaggataggatctttgtccaaaaatttcagaaagattgagcaaatctgacgtattcattgagtgagtttctgtgttttcaaaggtggaggagaaatttgtgctggaagtttttaagcctccgttttcttggaaatcagtctgtaacactggcaagtcttaagatagtcccatttagactttgcagatgctgaacctggctctgtaacgctgggaagtcttaagatagtcctgtttagactttgcaaaccctgtacctggctttgctcggagattcgggatgctggctcctgcaggcagggcgtgtgggagcctcgtcagaaagttttagaggtttccagcagaagcagaatgaagatggtctccctggccttttccttaattctcaattttgattgaggtgcacaagttgacttttaaagccaacgcttaagatactgattgacatcttcaagggagaatgctcccaggaggggctgaagaagccatagttggaagtggaaggtactcgtcagtgttctccacaaacctttttactctgttgtctcagccgcactggggcggaggcggtcaagggtgagaagtaccgacactcaagtgcaaactgccacgtcgttggcccatcccatcagtgggcagctggctgacgccattcactggacggtccctgaacacctaggaatgcacacaccgtgcttctcagacactggagacgcaaaggcaggaggatgcagtccggtgagaggacacgatctttacctgcacaatcagactgtaagcccagcagagaaccccaggggcgcctgggtacttctcggaggtcatcttagttgtggtggggaagacaaagaaataagcaaacaagaaactagagttactatacaagaaactctcctgagtttgtaaaccttaagcataaggattcagttgacctttttcttggttcatcaatctggaaagaacttacataaagcgccattgacactgtcacctgggagctccatgggccgtaagtctttgacagccaatttaatttgaggtcagagggccttgaggtacacagtcagcactgtttgaacacttttcctgaaagcaaaactcacagctccctgcgccctctgacaacactagctatttctgccagagtaagaacttctattactattttattattgttcatatgtcttttgatgatggttgtgtgacagggggaagcaggatctatttggtttcttcccctccccccaccccttcctttttgtctctctttttttttctctaagaaaatcaccagactagtttttccatcttgagtaatttcttatgtgggacagttttgatcctcattttgaaagcatgcgtgtgcacatgtgtgttgcctgtggtgccaggtgagacaggtggcactaactccagctgcttggaaggcatcccaagggcgcatcttaaagttggagcagacctcccttttccagcccctggggccattagaccacgtgctggaact

SEQ ID NO: 9036 - DNA, 6000 bp, Homo sapiens
gggggacggtgccaaccgagtccagtgggacggccaggggcacagtgccaaccgagtccagtgggacggccagggaggacccagtcaaaggcagtgaggagggagacagggtgcagaaggcatcatttgctgaggccagcccatgggctttagggcccaagtacctgattcacatcccagctccacctcatccttgggtccctgagcctcagtgtccccatctgtcaaatgggaataatatcagcttggacctcagagggttgtcgtggggatccagtgagctcatttctggctctccgtaggatcccaatgcatatttgtggaatgactaagtggaagaatgtgaagtggttagaacagggcctggcatggcacatgggcagtgcccaataaacattggctcttactagtgtttaaaagtaaaacaagacaaaaaaaatgaaatccaaagttgctaacctgtgaaagttgacagccccaattaaccccaacctgaggaagaaaatgaccctgctggacggtgtttccaaaggtgctaagttgggaggggaggtcattaatctgcctaaggtttcccaagactaattctgcagaggcagctccgtccaggcaggccgggggtggcaggcagacaggggcacggctggccctgaggagggcctctgccttgtcccctcaaccggctccccaagcaggacttttgttggctcagtcaggcactttccacagtggccagccaccctcggccagcgggcacagtcagaacactgccagccaccctcagctgtggccaaaacccacactgacttccatggggtcccaactggctgccagtgtgggcctggcatctgagcaggactggttacagatttgcaggcccccgtgttcagaaactgttaactattaggaatttcacgatgtcaacagtagaaaaaattaaactaaaaaataaataaataaaataatacaataaacccccgacccttcagagcatggggccctggagagtgcaggggggtcacactcccacgaagctggctctgcacacaagtccagcagagcacagatgcgcggcgctgctgggagcaaagccccttaacctgctgaaacaggacgtttcctctggaaaatccccccggccgcggattcaacccatgggcagggcggatggtggcacacgctgtctggagtcccagaaaggcctgtctctgcagtcacccatttcacaatccatttgcttcacacacccatttcacaaccccatggccacagccaggctgagaaatgtgtcccaaactccaaacctgctgggaccatgagagtctcccagttcctgatgcccccactggcctggcatcccctctctactgtcccctacatgcccagcccacatctccccagagaggaggcccaaccctttgggctcaagtcgcctccaaaccctctccttttatattcttcccaggtctcgtccctctctgaaattatcacctggactcatctttttacacatgtgatgtcagcctcacctgtgagcctcagtatggctggggctgcacctgtgggtggttggtaactgcaggtggaatgagatgccacctcctcagggagggcttccttgatctcaccccaactctggcctttggcctgttatcaccatgtctgaaatgacctcctgacctcattgagctatgagtttgcatgtgtgtgtgtgtctttagtccctttgtcccccacaatgtcacacgaggtcagggagttggttttcttcccagccctgtgccccatacccagcacagagcttcacactgaataggagcagaatgtttgttcaatgagtgaacaaaacctttttttttttgcctctgacttgtggcattcttcccagggactcaggcctgcccaatcgcggtgccccctccccactcccactcccagcagtgagccctccctcctcagcccattaacaccttggctctgcccatttctcctgggtagaatcagggagttgtgaccttctctgcctgtgcctgacagtgggctctgcccttcatgcccaaaatgccagcatcacagtccctggcacatctagggttatcagatttcgcaaagaaaaatacaagctatccagttaaattgagatatacttacactaatcattattcatagtttatctgaaattcaaactgaactgggtgtcctgtatttaattctcgcagtcctgggcacacacgaagcctcctatgagtgctggcagtccagcctatgctccttccaaagcaattctcctttcctactgccccgtcaggggccctgtctgtgctggaatcatcattgtcctcaactgcaaaatggaaaataaaatgatagtggttcctccctcccggggttgccaagatgattaaataacataacaactaagatgtatccggccccttctcctctacttgcaaggcatcgatcccttcattcctcgcaatcacaccacgtgaaggtgccatgaagccaccccattttgcagaagaggaaactgaggttggagaggtgaaagcactcagccgaggtcacacagctatgtcccactcatctttgggtgaccctcaggttcggaccctgaggtctgaacactgcattaagctctccagacagaatcaacttcggaactagcgccagagaccactaagtcaatcccaggtgacaccatcagcactcaataaatggtagccactgccggtgtcgcagatggatcaatgggaggtcaagcgttgtgggtaggtttggtttctttaagccactgaattaactggttatttttgcctgctggcagtgcagcctccattgtgtaaatgccatctcacttccaagacaatcaacgtgtgacttctcccagccagactagccaggtctcccgagacttcccggagggcaggggctgtgtctggagtggctgaattccccggctcagggttgcagctcagccagtttgttgattgaatgaatgaagaaatggctgaaagcaggggtggtaatgatgacctccttcaccctaggaagtgaatgggacccaggtcatctccaggcccagccagtatttgcagtggcaccccaagggatgctgggggaccccttagcttttctcttaagttgcagcggccaaactgcagcaatatcttccctgataaaagacacgctggtggtattgccccttcctcaaggcaggggctgagggcgcccagttcacagcagggtgccatctggggtagacgctgggtattgccccactcctgggccggggcctgggtcctgacctagtgctggctgtggctccaagagtgagcttctcctcccaaacagaagacggtcagtgcctctgaacctccctctgggctgggcacgcttggactcctccaaagagcttggaccagcctgagccacatccctgggcttgacttctccagaacaagcctcctggtctttctgggagagctctggcagcatcactgtgcctgtgcagggagagcgggaacccacttcctgcaccggctttctctgagttcttcaggatgaattcgctctggtctaggtaagttctaccccgaggccaccttcacttcccaaattccagcttttccttctctatccaaactgttacaaacacagtaacaataatttttaaaagctttttttttctctgaacacactaagtccctgctaattactgaaactccaggcattacaggaatatgtggacacttaaagaatcaggactacgtgggagagggggaggcagctccccagggtcctgggttggcacacaggctccaccactgtgtgactttcaacaagcgacttccttgaccagctgcccgctctgtaaaatggggagagtaatattcggccacactgagtcggtgtcaggttgagttaatatttggagagtttctggcacaggtaggtgctccttaagtgcctgttaaataagtgaagctttgagaaagtgtctaaaaggcgacacactaaatttttaagaggctggaggtgggccagggaggggaggtctcttatgtaatattttaatatctttttaaacctgaagaatgtgttcttgtagcactcctgtaattaaaacttaatgaactaaaagtacacccctcctgctcataccccttttgaactccgcagccgcgccccccagccggaggccccttgggcagcagacaatgggtgtggattcgccccaggtcccgccggctggggcggcgacaatacaccagtccccgacagctatttacatgacaagggcttccgggcgtgtctacgcgagttcccgtctttcctggtcgtcctccttgggttcgggtgaaagcgcttgggggttcagtgggccatgatccccgagctgctggagaactgaaggcggacagtctcctgcgaaaccaggcaatgggtgatccatcttgggggcttcctccccctttctccaatttctcttccctgagcccccagggaccttgtgctcctcagaagataggctagccccaagagcctgggtcaaggaccccagggacgggggcgaggggagggcgcaccagcaacccgcccgggtgcggctggcaccgagttcggctccccggccccgggcgtgcgccgggcaggcgttccaagctgaccgccgttggggagagggcacagcgcccctcctccgttgcgcgggtgccgggtctacgtgggccgcctagctctggccctttaagagcccgccccgtttcccgtcaccccgccccccggctcggggagggggtgcgggggaacctcggcggggattggcgcagcgcgcgccccctccccggcccccgcgcggtgggaaccggcagccccgtctagcgctgacgtcagaccgtctgcctgcctccgaccgcggtctcggagcgaaacccgatctccttggacttgaatgaggaggaggaggcggcggcggcggcggcggcggaggcgctcggctggggaaagctagcggcagaggctcagccccggcggcagcgcgcgccccgctgccagcccattttccggacgccacccgcgggcactgccgacgcccccggggctgccgaggggaggccgggggggcgcagcggagcgcggtcccgcgcactgagccccgcggcgccccgggaacttggcggcgacccgagcccggcgagccggggcgcgcctcccccgccgcgcgcctcctgcatgcggggccccagctccgggcgccggccggagccccccccggccgcccccgagccccccgcgccccgcgccgcgccgccgcgccgtccatgcaccgcttgatgggggtcaacagcaccgccgccgccgccgccgggcagcccaatgtctcctgcacgtgcaactgcaaacgctctttgttccagagcatggagatcagtgagtgaccccacgcccccctccccggagactccatcgggctcggaccctatgtcggggcacagctgcgagcgggggtccgggccctgcgcgccccctcggaccgaacgccctgcgcccgggcagcgcccgccgcgccccgggcgcgccctcccggctcgcggcagctggcggccggcccggctttgtcccgcggcgctgcgagcctggcacggcccccgctgtccgcgccccgcccgcccggactcggacccggggctcagcggcggcgcacggcgcgggagggttggggcgggcggatccgtgaagtttccattttatttccctgagggcagtcgcgatggagcatttaggccggctctttatcaactttgggcgggggtggaggggcgtgtgagacactgtctggtctgcgaggtgtctggggctccgggcgtgtgtctggagtgttcgcggcgctgtgtctcgggctctgagtggatgtccgtgcgtctgtggagtgtgcgtggctgcgtggctctgtctgggtcttcggcgtctctcggggtgtctgggggtctgagtcgc

SEQ ID NO: 9037 - DNA, 6000 bp, Homo sapiens
aatgattctatggtgacttgtgaggctgggtcataaaggcaatgtggcctgactcatgggagtcctgagctacagtgtaagaggtgtcaacactctcagctgccatgctgtgaggaagcccaactggctcatgcagagagacaacatggagaggccttgaggctatatgaagagagatgcttggccagctcccagctgctccagctccccagtgctccggcttccactgtaaccacaaaagagacaccaaggcagaaccacccagatgagcccttcccaaattcctgacccacagaaattgtgaaagatgataaaaatcattggatttggagtggtctgttatgcagccatagacagccaaacagaggcatcttaatctgcttgggctactataacaatttagcatggagcaggtggcttgacaacacacatttattcctcaggtctgcagggtgaagagtctaagatcaaggtgctggcaaattccattctgctggcaaccaagggcctgacttctggtgtacagacgaccatcctattgtagccccaaatggcacagagaagaagcaagctctcaagtctcctcttatcaggctgtaatccctcccaaaggcccacttccaaataacatcaccttaggacttcaacatatgaatatgagggagatacaaacattcagtctgcagcagagggcttcgttagagctctgacctgagcacgcttcatctcaatgtcattgtttttgccagctctacatccactgccctttttttttttttttttttttttttttttttttgagacagagtctcactcttatcacccaggctacggtgcagtggcacgatcttggctcactgcaacctccgcctcccagcttcaagtgattctcctgcctcagcctccggagtagctgggactacaggtgcatgccaccacacccggctgatttttgtatttttagtagagacagggtttcaccatgttggtcaggctggtctcaaactcctgaccttgtgatccacctgcctcagcctcccaaagtgctgggattacaggcatgagccactgggcctggccccactgccctttcttacagtaacagtatttcaatttccctttagggaagctcttcaagcaggttctcagtccaagaggtttctctgggttaagcactgccagccacccaaagggtgagcaagtaaccagccaatcagagacactccagtgggttcagtaaatgacatattatctaactggggtgaggggaatcaacatcagggcttttcctgagactataaggagaaacagattcttttcccagcagttaaatttgaagtctgtggccattttgctaccatatagggaaaatctgcctgacattgaagccaacacagatgagggaagagccaagagataaagagaaagatcctgagcatctggatacagccatgcctgaagccagtatcccttgacttctcaattatgtgagcctttatattccctttgtttaaagccagttcaagtttaaaactgccatttccagtgagaacaattccctatgttgtatctaaggccaagaccttgcccctgactctaggccagaatgtcctgtacagtgccattcaactctgccaaaagcaaagggcatcaacttctccacaacctggctttccctcatctattttacatctctgttaatgggagcatcacccacctgacctataaacataaaagtcagcctctatcctctctgtctctctccctctctctgtctctctctctctctctcaatccctgtcacttcccttacttcttagtaaccaagttctgccaacttaactttatggacatttttcacacctgcaccctcctttccatttttcctgcccactccaattcttcatcatttctcacctaaatttttacaaaatcaatagataactaacatagaggtgtatagtaaaaagtgaatttcggccgggcacagtggctcatgcctgtaatcccagcactttgggaggccgaggcaggcagatcatgaggtcaggagatagagaccatcctggccaacatggtgaaacctcatctgtactaaaaatacaaaaaaaaattagctgggcatggtggcatgtgcttgtagtcccagctactggggaggctgaggcaggagaatcgcttgaacccgggaggcggaggttgcagtgagctgagatcgcaccactgccctccagcctggtgacagagcgagactccatctcaaaaaaaaaaaaaaaaagtgaatttcattcccacccttgccatcagttaccctcccccaaggcatctactgttacctctttcttgtctattttcccagaagttctctatatgtgccatctttttgagaatttcaaatggaggcatactatcaagacttttcagaacactgcatccttcttcacttgaagtgtgattaatataaataattatagactaatttcttctttctaatggatgcatagtattccacaaagacatataatgtacataactcgtcttccattgatggatatttaagtggtgtcccagttatctgttagcacagaacaaaaccccccaaacctagtggtataacacaataaccacttgaatatgcttgtgggttctgtgtgtcaggaattcaggcaggacacagtgaggccagcttgtttctactctgcaatgtttgagtcttcagctaggaagatttgaagatttgaaggctgaagctgattcaaatggctggccactggaatcatcttgttcttccccttccccttcgccttctacagtgcaatggcatgatgtcggctcactgcaacctctgcctcccgggttcaagcaattctcctgcctcatcctccctagtagctgggattacaggtgcacgccaccatgcccggctatttttgtatttttagtagagacggggttttgccatgtggccaggctggtctcgaactcctgaactcagggtatccacccgccttggcctcccaaagtgctgggattacaggtgtgagccaccgtgcctggcctcatctggttcttcttcactcacttcttttatgcttgaactgggatgactcaaagctaagcttagctgggactgtggtgccttcatgtgtcctctcctgatggtcttggcatcctgacagcatggcagcctctaagcagacatggagccctaggtaggcatggtgcctcaggctccaagagctagagttctagcagaagttgcctgtacttttatgtctggaccttagaagtcagagtgttacttccaccgtactccattggttgaagcagtcatcagctcacccaagattcagagagggtacaaggatcccacctctctacagaggagtgctaaagaatttgtagctatattttaaaaccaccacaggttgtttccaatctgtagctattcctgtagttcattttacaggctaacatctcttgaatgtcttcatttctctgcaccaggccaagacactgtcatctctgatctctttgctgatctcttgctgtcactcttgtgctcaacatgctgttctcttgacagcagccagaggtcttttcagaatgaaaatcagatcacatcccacccctcttcataacccttccatggctccccactacccttgggctgaagctcaaactccttaccttggcttatgaggccccacaaggtctcacttctgcctgcctctccaatgccatctcctgtcaccatttggggcctttagttttgagctgcaagagttcctcccatcacacacacacacatacacacacacacacacacttaaatgagtaagtaaatagaacatacaaaacgcttaaacactttgcacatagtgagcataataagtttgctactattattagactgtcttcagtaaatatttactgggctgcctactcagtgccaagcactatgggaggctcacagatacaacacgaacaagaaatatgtggccttggccagacgcggtggctcacgcttacaatcccagcactttgggaggccgaggcaggtggatcacttgagctcaggagttcaagaccagcctgggcatcatggcaaaaccctgtctctattaaaaatacaaaaaattagctaggcatggtagtgcgtgcctgtagtcccagctcctcaggcgactgaggtgggaggatcacctgagccttgggagatcgaggctgcagtgagccgtgatcatgccaccgcactccagcctggacaacagagtgagacgctgtctcaaaaaaataaaaattaaaaaaaaagaaaaagaaaaactaaaaaggaagatgtggccctatcttgccgagctcattcttctgtgtgtccccagcccctagcacaaggagaaacagaatagatgctcaagacacaaaggcatgtctgtgcaagggtgcttgatgacggttggaggggcacaatgactttcccaagatcacacagcaaatgtgggacaaaatcaaggctgacagctcatgacagggtgggaggcagatgcagctgcctggcacaggctggctctccagggagatgggcagtgggcacgcattgcccagggcagaactggggctaggggaggaaacaacaagggaggctgtcattagctccttccaaagtggaggtcacttctctcccaaccccgagtcctccacccaaactcccttctcaaggtacaagggctgatcccgtaccagggatgggtagggactcaaagaggaaaagaggatgaaaagaggatggggactgagtgagatgtgaggactccagagggattagcggctctcaaggcaagtgggaggggacttcccggtaggagcccggagacagatgggagcctgtgaagagggcgggggcccggcgaggagaagcggtttctacgctggggtggggctccatgagggggatggagacctggaaaagggactgacggtgcagcgaggagaggaaggctcggttaagggatgggtcttccacgggaggggtggggaactgcgggagtgacggcagcttcggtgaggagtctgaggggctgcgtgaggggctggggcccagggagtccgaggggtctctgtgagggcgctggggtgtccgagcgagcagggaactctggaaggggacaggagccgggggagctgcaggcggccgccgtctgcagagccaggccctgaggcgggccggcgccccctcccccgccccgaactgcggcgcaggcgcgaaccggacccgcctttgctcggcggagacagcaggcagagaggtgagcttagccctgccccacgcgcggccaggccccagccccagcccctggagaacccccgcgctctgcccgcatcctcagcccgggccgtgtcccgccagggccgggacctttgcgcctgagcctcggctttgggaggtgggggtcccagggaagcagcaggggcgggagacagaaacagccccatcgcccctcgacgcctcagggttgataggctgggtagaggcttcaaaggacacccccacccccgccaacacttcaaaaacccattcctacccctctctgcctcagtttctctctagggaaaaggacgcagttggtgtggagcagggcatcggtggtcctgtcaggaagagtggcgcgggtgccggtggggaagggaggcgggaaatggcctgatttccccggccgacaccccctacccatcccccccgggagggcgccccttctcccccgcccgggcagcgctggacgctgtagtgggcgagtctgagggtctgggaaggacacaactgaatgaggctgtgcagaggcgacagattccgtccatcttcgggccctggcttccgtcacttccgcccgtgcctgccgcccctcgcctcctccctccgccgcagtctccccacgtcggacagcgcagccccctccgcctcccgctcccctcccaccgagctcctcccggctcccgggctgg

SEQ ID NO: 9038 - DNA, 6000 bp, Homo sapiens
aattgaatgtagatctctgtttagttatctgataaatcttcatacagttttccatagaggtccagtctacaatatagttttaaaggtaaatcacatttaggcttgtaatggaagagtcggctctatgcctttcccaagccaagcacttttagttctttttgttatttctcctgtctttatctctatgcttagatttcttgctatttccttttttttcttttttcttttcttttctccttcttcttcttttttttaaaagacaatttcttgctctgctgtccaggctggagtgcagtgagctgaggctcactgcaacctctgcctcccaggctcaagtgatcctcgtgcctcagccactcaagtagctgggattacaggtgcctgccaccatgctcagttaatttttgtatttttagtagagatggggttttaccatgttggccaggctggtcttgaactcctggcctcaagtgatctgcccacctcagcctcccaaagttctgggattacaggtgtgagtcactgtgcatttcttgatttttctttatgtagttgttatctgtggatttctgctatgaaattaaggcgttagtttttctaccaccctcccctcaatacacacatccagatacacaaacatacactccctccttccattttcagtaaagctcaattgctatttggaatcaatattcagtgcttttgttatgactatgtaaatattatgtttaaatttgtgctacctggagttagtaattactttgtttttatcatttgcttagttttctaggcatcactcattaattcaatcgcaaagcttccagtgtaactgaacatttactcaatatagccaaacatagctaataatcagttgatttcattttcctctggagacatcgctcctagagcacatcttctgatttcaggctgggttggttactttctttacccgggggtatagttgacatcccaggcctttctcatcgtcccttttctgtgcttaatctcatttattgaatgccatattgctctctttcttagtttaattctttgttttgctgaagcacatcctccagtagctttctaagaaagggtatatgcaaggtcaaatttctgagaccttgtatgattgaaatgtcattattctaccctcccaattaataatcattcagacctatacatttctatattagacatcattttgagggcatttattgtcttctagctaccagtattggtgtttagaagtgtgataccattcttgcttcagatccgatgtatgtgatgtttttatttggtggaagctcttaggattgtctttttatccctgctaatgtgaatttcattatatgccttgatgttagctgccctgtttcatgtattgggctgtgaattggtggaaagttatggtctagagaatcatgtccttcaattctgaagagtctcttgatttttaaaaatctttcccttctggtcgggcagggtggctcacacctgtaatcccagcactttgggaggctgaggcggtcacatcacctgaggtcaggagtttgagaccagcctggccgacatggtgaaaccctgtctctactaaaaatacaaaaattagctgggtgtggtggtgggtgcctgtaatctcagttacttgggaggctgaagcaggagaatcacttaaacccgggaggcggaggttgcagtgagccaagatggcgccattgcactccagcctgggcaacaagagcgaaactctgtctcaaaaaaaaaaaaaaaaaaaaatagaaagaaaggttttcctcctcagagcactccctcaataaaccatgtgtacaagtatccccatctcaggctctacttttagaaattatgacccattgatatagtctgaatatttgtccaaatctcaagttgaaatctcaaatcccaatgttggaggtagggcctgatgggaggtgtttgggtcatgggggtggatatttcatggcttggtgctgtccttgaaatagtgagtgagttctctcaagatctggttgtttaagtgtgtggcaactcccctaaccaccactctctcccttgctcttcaccctttgccttctgccatgattggaagtttcctgaggtctccccaaaagcagatgctggtaccctacttcctgtacagcctgcaaaactgcaagccaattaagcctcttttcttataaattacccagtctcaggtatttcttcatagcaacgcaagaatggcctaatacacccaccatctggtgcagtgcctggcacataggaagcacttaaataaatgattgttgaatacaaaataaactctgagaaaatcacagacagaactctcctatacatgcatacagagcacctggtgcatagtaaatctttaaggagctttagactctccgatccccccatgccctgcaatatggagtagcctcatcttggtggactcatcaggacatgctccccaggtctgtatgtccaggaatgcaattgtgtggatgcatccaggattgatcaggctcagggaattgccaatcttaaaccttaatgttcctttacaagcacaattggaacttaatgccaaaaaaaaaaaaattctgggatcttctgttataccctatcccattacggacaaatctactcgtaaaacccagctgctggataagcaagaacagccagaccaagggcgatcagtgcatggtcattagggctggtgaccctcgtctctgggcaaggcctgctggaggtggatatgcagcctgattcttgttctgtctcctcctctcctaggggctgtatggccactgtctcccattttgccacccctaccagttttccttcaaagtatgatatgtgggcaaagattaagttctcttaattatgacacatttccgctcttgcctctcaagtcactaaactgagatgtgctggacccctatggccaccacccatttacagatgatcagtgtaatctgatatactgataatccaagtgactaagcccttcattatatgttcattttccttaactccattctcagactgtaaccttaacctctaataagggggttactaggtcatagtcctcttaagttcatgtcctctacctcattactggaaccccagtatgcataacaccccctataaactgtagtgcttagaatacctgaacagccccctcctctctcacccccatttagcaggttatgcggaagcccagccccagaagcctcaggcagtcccctggcagagcccatctctgcaatctggaacttcaggcctgaaaaatcccctagaaggacccacagggaagacagctggggacagagatattgaatgacttcgccctggacctgcagctctgcaaactcacaggaagaagaaagcagacctcgctcccttggacagatgcccaagtagtaatggggttagaatgccttcctgacaactcagatccccaagggagggccctagggcagagaatcagcaaaggcaagaggatgagtcttagttctcagaaatccctgacttcccagctaagccccacctaggccaccagctgcttatgaggtcagagcagcagcagcagcagccccctccctaccccacggccccacgtggtaacaggtcacaatgccccgggtgcccactcccagaatgctgaccaaagtgggaggaggtgaggagggtttgctgggtgggtatgggggagggggagactctgcaggagcctaattccccactctgagctcacccttctgtctgcccgggccctaccccttcccctactctcacccttataatccttttcagcactaggtcttcccgtcacctccacctctctccatgacccggctctgcttacccagacccgaagcacgtgaggatccgatcccagttcctccaaggggcctgggtgctggggaggggtcaggtagtccagtgcgtccacctgtatccacctggggccctagctgggcccagctcctggacagtgtcctatggctgggggcactaggactgacaatccaggcagtcttttccaccactggcccagccctgctgctgcttctggtcagcttcctcacctttgacctgctccataggtaagtgggcagcagcctggcaggtgggcattgtaggcgggcgggccagtggacaacttccctaagcccagtcaccaccctctctctccacaggcccgcaggtcacactctgccacagcgcaaacttctcaccaggggccagagtcagggggccggtgaaggtcctggacagcaggaggctctactcctgcaaatgggtacagtctcaggacaacttagcctccaggacgcactgctgctgctgctcatggggctgggcccgctcctgagagcctgtggcatgcccttgaccctgcttggcctggctttctgcctccatccttgggcctgagagcccctccccacaactcagtgtccttcaaatatacaatgaccacccttcttcatcaggcccccttttctccttcctggctgggcaggtgggatgatacccctttcttcccagcctgaacctcacagtcctataatataggtatcagatacctggatctgagtctttgggcagcaagagaaggtaggatactagccagggagcccaaggaagaatgtggcagccacctcagagcctgtggattgggggcagccactctggcctcctctgtggctctagagaatgaaggtccagacagaaagacttgcgagagagcagtttggaaaggggtggatatcagccagcagggaaagcaggaaagggacagggatccagggagggcttcccatgagaaagcatgagaaactacatctgcggggctccgaggctcccctgccagcctggagggtccgtgcagagggacttgggtgggcctcacaccctacagtgactcctctcttggctggaccccaccccagcccgggtcacaaaggggctcctctggggagggtgggggtagatgagagtggggacttggatctgcctgccaggccgtcctgggcgctgcaggaagcaacatgacttaggtaactgcccagaggtaagtcccagtccctaattctgtagccccaccccacgcacactggtgccctcctgacccctgcaccccctctctgccccccccccccaaggtcccaggcatcttcaagaccctggccctctccccaggtgcaccagacatgatgcagcagccgcgagtggagacagataccatcggggctggcgaggggccacagcaggcagtgccctggtcagcctgggtcacgaggcatggctgggtgcgctggtgggtgagccacatgcccccgagctggatccagtggtggagcacctcgaactggcggcaaccgctgcagcgcctgctgtggggtctggaggggatactctacctgctgctggcactgatgttgtgccatgcactcttcaccactggctcccacctgctgagctccttgtggcctgtcgtggccgcggtgtggcgccacctgctaccggctctcctgctgctggtgctcagtgctctgcctgccctcctcttcacggcctccttcctgctgctcttctccacactgctgagccttgtgggcctcctcacctccatgactcacccaggcgacactcaggatttggatcaatagaagggcaaccccatcccactgcctgtgtctgttgagccctggcctagggcctgagaccccacggggagagggagggcaatgggatcagggctccctgccttggcagggcccagacccctagtccctaacaggtagactggcctgaccccggactccttcctcaagtcaatgctgcaggttcctggtgtgaggggctgggggctttgagaagagggggcaagacagatggcttagccattggtgaaaattgcttagccaggggcagagcttgaccaagccactgatagcgcccatatggatgtgatgatacccgtggggc

SEQ ID NO: 9039 - DNA, 6000 bp, Homo sapiens
tttaatttttaagttcaagggtacaagtgcaggtttgttccataggtaaactcgtgtcatgggggtttgtcatacagattatttcatcactcaggtactaagcctagtacccattagttatttttcctgatcctctccctcccttagccctccgataggccctagtatgtgttgttcctctgcatgcgtccatgtgttcttatcatttaggtcccacttataaatgagaacatgtagaattgggttttctgttcctgtgtcagtttgcatatccctgcaaagaacatgatctcgttcttttctggggctgcatagtattcgatagcatatatgtaccacactttcattatcccagctatcactgatgggcatttaggttgattccatgtctttgctattgtggatagttttgcaatgaacatacacgtgcatgtgtctttgtaataggatgatttatattcctttgggtatatacctagtaatgggattgctgagtcgaatgatatttccgtctttaggtttttgaggatgtaatcaaattcatcaattatttgccttatggtttgtgctttttgtttaaaaagttcttcccccattcctcctccaggtcacaaagacatttcccaatattttcctcttctagcgccaaacttgtacctttcacatgtaagtcttggatccatctagagttcacttttgtatgtagttagggatctagttttctttttcttgtttcccagaagcatgaaaccttcctcctttattggttcgtggtgcccatgtcagcacacatcaagtccctgttaaagtgtatctacgtgggtttctctctcaacttgcttttctgtttcctttggtctctccgtctattcctgagctttaccgtccagtcttcgtcactgtggttttgtagtgatttcatgtctgctttggcagattccctcctctttacactttttttttaaggttgaccttattattcatggacattttcttccccatagaagtttactgaacttctcaaaaaattgagattacctggaattttaactggcattttattgcaactaccagttcatttaggataatggacatctttataatactgagttatcgccatcaagaccatggaatgcctctccatttttttcagaccatcttctgtgttctctgtataatgtgtcacccatcagaagtcttttcttagttaagtcaattcctagacgctttacagtttggttgttactttgaatatctgtattttcttctggtcagttattgctactgtagaggaatgccgttggttttcgtaggctgaccttcagtcccacaaccttgcactctagcgttggttctcatgttatccctgttattctgttggattttctatgtgcatgatcacactaattgcaaatagtgtcagctagagcactttccttgccattcttacacctgttacttctttgcatatggccttggacagcaccttgagtcccatgacaatggatgtccctgttgtatttctgagtgtattcttagcattcttcttagtaataaacaggtattgaccattaccatatacttaataggatatcttgaaatatgccagaggactaggccactacttgactggtgacagagagtatcttagatgtataggcccccagacatgccagtgtcctctctcaccacccatctccactccaaagttgtctggcctcacccaccttctgtgcctggttcttctcctctgtgcttctctcactatgccatgtcctcgcctgttcaggtgtctctaagagctcatagatccttaactcttacagctttaaatgaggcacattcaaagcccgactcagtgtcattccctgcagtctcctcttcctcccatcttacccatttcaggtaatatctccagccagccagagtctactgcagtagctggcacatgaaataaatgtttatttaactgaattgaaaatgttagctggccattgtcaaaaatactattttgtaaatttataaatatggttctctttgtatatccattataaatatttagtatttagtttgattattccttatgctttataacatgtgttttcccattcattcatttatccagcatttattttgcatgtctatgggtcaagcgctctgtctaggaacactgctgtgaacaaaaccaaactcccgccctaaaggagcctgcactcccgtggagaacatgaataataagcacagaggaaataacataatatctcaagtagctgtaactgctccagagaataatgaagccaggaaagggggtgggctagggggtgctgttttaggtagagtgatgggaacagccccactgagcaaactttagccacatgagtagctggaagaaaagccttctaggaccagggaacagcaagtgcaacagccctgagacaggatgggcttgtcagtttgaggagcagtgggaggcctgaaccaggttacatggggcccagccagtatggccacgactttgtgttttatccagagtacaaaggagcctcactgagggacaagggaagtggcatgatgtgacccgcatattaagaggagagcgctcaatggcagccaggggaggagcagggaggctggttgggaggctgttgaagaaatcaggtgagaagtgatggaagcaccgaataagatggtcatgttggaaaaattgagaagctgaggtgcttagcattgattttcaaggtagagctactgagatttgctgatagatccaatgtatgctgggagagaaaattcagtcactctagagcattggctggatttgtcacccattgcagcgaatggagaaggtgctgacataaaagccctttagactgaaagctactgactgaggggatggtgccctagtttgatttcctggggtgtatgagtagcagggaggccaagagctgggcctcacgagattgtggggactacatcagggaagcaggcctgcaaagaacctgcaccacagacccccacctaaaagagcctccaaaaaccctaactggcatgacctgagtactttaactctgcttgtaactttcaaatatattttgatttgcttatgaccaccaaggcaaaacttcccatttcaataatgttagtagaaacataaacaggatgttaatttatttatttggtaattctttttatgaatattatccagtttaatcattagctctgaaggagatgaaaaataattttctaatttttagaaaaatttgcagctaattgggtgataaaggtaaggggtttctgagttcacaaaaatgttctaaaattggcaacagtttcggttgcacgtttcattaaatgtactaaaaaccattgaactgtacatggtatatggtgaattatatggtatgtgaattatatctcaacaagctgggtattgtttttttaaaaaataaaaataaaaaaggagaaagagagagagaaaaacaattgcagatcatcccagcactgaggacaagactaacttcagtgttccagtatatgccattataggttttacggcacacagtgatgatttggagcctatgatttgacctagggtacagcaggtactgtttagcaatcattttactattgtcataggtctctgctcttggagctaagtgcccagggtaaatgagatctttaatttgaaaagagatttttgatttgatgaatgtacattctccaaagggtcataaattgtcattctggatgtttgatctgtttgttgttttggtacaaaaattagaagaaaataattcactcataaaatgttaaataatgaactaaaagtcattcatcaagtccataacttagggtcacatttgtccttggagcaggagaaagagttgtgttcacccttttcttacttttgcttttgtcctaagtgcttcagagaagtacagggtggcaacagtgtttctactgagcagctgataccattgctatgcactcattcattatgcaggaaacatttagtaatttcaacataaatatgggactctgacgttctcctcttcattttgcagagcagtcattatggcgaaccttggctgctggatgctggttctctttgtggccacatggagtgacctgggcctctgcaagaagcgcccgaagcctggaggatggaacactgggggcagccgatacccggggcagggcagccctggaggcaaccgctacccacctcagggcggtggtggctgggggcagcctcatggtggtggctgggggcagcctcatggtggtggctgggggcagccccatggtggtggctggggacagcctcatggtggtggctggggtcaaggaggtggcacccacagtcagtggaacaagccgagtaagccaaaaaccaacatgaagcacatggctggtgctgcagcagctggggcagtggtggggggccttggcggctacatgctgggaagtgccatgagcaggcccatcatacatttcggcagtgactatgaggaccgttactatcgtgaaaacatgcaccgttaccccaaccaagtgtactacaggcccatggatgagtacagcaaccagaacaactttgtgcacgactgcgtcaatatcacaatcaagcagcacacggtcaccacaaccaccaagggggagaacttcaccgagaccgacgttaagatgatggagcgcgtggttgagcagatgtgtatcacccagtacgagagggaatctcaggcctattaccagagaggatcgagcatggtcctcttctcctctccacctgtgatcctcctgatctctttcctcatcttcctgatagtgggatgaggaaggtcttcctgttttcaccatctttctaatctttttccagcttgagggaggcggtatccacctgcagcccttttagtggtggtgtctcactctttcttctctctttgtcccggataggctaatcaatacccttggcactgatgggcactggaaaacatagagtagacctgagatgctggtcaagccccctttgattgagttcatcatgagccgttgctaatgccaggccagtaaaagtataacagcaaataaccattggttaatctggacttatttttggacttagtgcaacaggttgaggctaaaacaaatctcagaacagtctgaaatacctttgcctggatacctctggctccttcagcagctagagctcagtatactaatgccctatcttagtagagatttcatagctatttagagatattttccattttaagaaaacccgacaacatttctgccaggtttgttaggaggccacatgatacttattcaaaaaaatcctagagattcttagctcttgggatgcaggctcagcccgctggagcatgagctctgtgtgtaccgagaactggggtgatgttttacttttcacagtatgggctacacagcagctgttcaacaagagtaaatattgtcacaacactgaacctctggctagaggacatattcacagtgaacataactgtaacatatatgaaaggcttctgggacttgaaatcaaatgtttgggaatggtgcccttggaggcaacctcccattttagatgtttaaaggaccctatatgtggcattcctttctttaaactataggtaattaaggcagctgaaaagtaaattgccttctagacactgaaggcaaatctcctttgtccatttacctggaaaccagaatgattttgacatacaggagagctgcagttgtgaaagcaccatcatcatagaggatgatgtaattaaaaaatggtcagtgtgcaaagaaaagaactgcttgcatttctttatttctgtctcataattgtcaaaaaccagaattaggtcaagttcatagtttctgtaattggcttttgaatcaaagaatagggagacaatctaaaaaatatcttaggttggagatgacagaaatatgattgatttgaagtggaaaaagaaattctgttaatgt

SEQ ID NO: 9040 - DNA, 6000 bp, Homo sapiens
ctcttcacttcaccccttcctacaaggaaggagtcaggtctgacagtgttgcaggatgcagtgctgggctaacggaaggtccagagaggctcttagcacggagctggagctgcctgctcctccctcgcaggacgctgcctgggttccgttcctgtccttccctgcctggggaactagcagcctttgtgagtctccttgacaacaggatggataagttaaaaataaccttgtgccgggctttctgtgtgtgagtgccctctcccctgctgctctggagcgcagtccctgcagcttctagaggctcctgaatgcatctgtgggagcctcagtggggtccaggtgctagcattttgaagccccgaggttttagaggtcaaagccaggtgatcaggcagcatcattaccttgtaactcgcaatgattaccgtaatattactggcaactggtggttgccgatggtgtgtgggtgtcaatgttgaaataaagattggacagctgttgtgaatgctttgtcttcatttagtctccctggagagggacgactctggagaccttactgtgtttcagaaactctggagtggtgtactgggacacagccctgggtgagagtttggttatgtcgcttcaaggaatccccatgggaaggagggtccttaccttatataaggtgaagacgccaaagtacagaggcacttgggtgacttatccagagccacctgtctcgactgtggcagagtagggagcagtctgtgtcttcagaagctgtggctctctcccttggatcctaatgatgaggccgtctttattgggcctttaccaaagccagctgtctcttttttatcagcagtctgcactaggcgaggccctctgtgttgctaatctgttttgtttttctgttttgctcatctgcactagttaaggccctctgtcttgtcacagttgtaaattaatttagaaagagctgtctccctgagggcaggggctgggtttttctttacacacctggacctaattcttctcttcttccatccattagtaagtgttttgctgtgtgccgtgcatggggataatgagaacaagaagttatgttcttgtctttaaggagtttgtcgtcagccaaggagacatttacaaaagtccccgttgtggtcagcgctgagagggagaaggttctagtgttaagagagcaaatcactggggtgtctaacctcgcctgaggtgaaggtgggggttagagcagtctgagagaacatattagtaacacaaagtactcaaatctggagcacataaaccactacaaatcaataaaaaaaggaaggcagaaaactccgtagaaaaactagccagtgatttgacagacacttgacagaagataccaagtggccagtgaacatgtgagacagtcacaattccgtgtattcatcagtcatcagggaagtcagaggacctgggttaatatgagacattgggccacgcattgaacttcccagatcccgtttcttatttgtaaatggggcttctcctgtcccttcccttcctcccagtactgctctgaagcttgcatgggaaaggctcttcagaccttgcagggctatacagatactaagtagtgttgttactctaagtgatttactttctcctccacctcttctcatagcaactattctgaattcccctatgaaagaaaatacttgagtggtaggatggttcctaggattcagaatagcctgtcccttgatactttgggtaaagagcttgctgctggcatggctctggttccctcacccaggctgggagcagggtgacttcctgtgggtcttttgtcacccagggcctggtggcagggaaaggactgaggtgcaccagtcctggctcgagcgttgtctggagtaggctgtctggttcgttgtccacactgactgtgattgacctcctcacagagtgctctagtgaagtccggaaataacactctggacttgggacatgttgacattaacaggtctacaggggcaacagcctcaccacctggcttcccctgagagagcctggtcagtgccattggctgccctagcaggctcagggataacctcctgttaaaaccggtcccagcctcccttttgcattctttggatacaaaggagccatgttctctctcttttggatctgccctctgcggttaagcagatggtacgcggtgcagatgcacacctctcttccagcagagtgtggctggccaccttggcacatgtcacaacagtgtcaggattgctgctagtcctgtcagtcccatcacctgactgtgccaggttcttaggccctgtttggagtctttccccacagatctctcatgacaggcatagacttctcaatggtctactcggcacttttgacctttttctcttctgtatttctgccacttaggagtcagagtcagaagcaaaggtagatggagagactgcatcggacagtgagagccgggcagaatccgcacccctgccagtctctgcagatgataccccggaggtcctcaatagggccctttccaacttgtcttcaaggtaacctggcttaatgatgcaggtgcttgttgggggctttgcaccatgtccaagtgccctggaagagcctgcagagagcccgtggtcttgcagagcaggcccgctgtcttgcctcagcctcccatgccactgctccaggctccattgagtgtaatctagtgcttagcagtggcagtgagcacagtgaccaggaggggagggcaaccaaggctggaaggatctggccccggaagggtgcttcagactggactaggaagtgcagttcaaagaggaagaggggacaggagggatggaggtgggtgaggtcagctgacactgcacagcacaggaaaccagccttgggtttgcgattaatgggcaggctgcttttcactgaggagtccacgtttccagttcagagtttagtttctctcacatcctttgtgaacagttccttaaattctccaggaagaactgggaaacatcttaacctaggtgaatctagtgttaaaacttttggcccttgagaacctggttcttttaacacagctatgtgagtagatcaaaaacacattataagaccccaaagcattatctcagtgttcctatgtgtgcctccaactgtccccttgggagtctgaattgtgcagtggttaagggcgtggactttgcagccagacccttggattcagatcccagctttactgtttgccagctgtttgacctgtgcctccatttcctcatctgtaaaagcgaagtgtgttgaggattgaaggagttaatatatgtaaagtcctcataaaattaccttactcaggccgggtatggtggctcacgcctgtaattccagcactttgggaggccgaggcgggtggatcaggaggtcaggagatcgagaccatggtgaaaccccgtctctactaaaaatacaaaaaaattagctgggtgtggtggcaggcgcctgtagtcccagctactcgggaggctgaggcaagagaatggcatgaacctgggcggagcttgcagtgagctgagattgtgccactgcactccaacctgggctacagaggaaactctgtctcaaaaaaaaaaaaaaaattatgcatatttatggtagctgttattatcattgcataatgttactattattcccataattattcagggcagtgcagtgtaggatcctgctgctggaaaaaaatatttttttcttcagatagtcagctgtagaaaccatccaagtggatacagaagcagagggcactacatttcccttggtttttttgtttgtttgtgttttgcctgataccttctttaagatataagctaggtttattttttgccaagtttggttgtgacttaggcattggtactagtggtcctgctcctgccagcatgtggctggtgcctccgtcacggtgaatctggaaaggactgagctcagggccctcatctcaggaagatccatatcccttgagtttgtgcattggtttttttctgggctcctaactggtgttttctccttcccctgctctctgacctagatggaagaactggtgggtgagaggcatcctgactttggccatgattgcatttttcttcatcatcatttacctgggaccaatggttttgatgataatcgtaagtgccatttcacactattttagttttcccttcagtttttgctgcaggcccggttgtcttaagtgcgaggtgttgggttggttgtgggaattgacgggggtccaggcttctcagaaaacctctgccatagaacatctgtgacttcccacttctcagtagccacctggagggtcattggtgtaggctggttgtttatggttgaagatgtctcagtgtcttttcttttaaaaaactgactttattgcctgtgatcccagcactttgtgaggctgaggtgggcggatcacgaggtcaggagtttgagaccagcctgaccaacatggtgaaaccctgtctctactaaaaatacaaaaattagccacgcgtggtggcacgcgcctgtaatcccagctactcagggggctgaggcaggagaatcccttgaacctgggaggcagaggttgcagtgagccgagatcatgccactgcactccagcctgggtgacagagtgagactccatctcaaaacaaacaaacaaacaaacaaaactgactttattattccaactctgtaaacttttaccctgggcatgtctctatatgactcctggtttcgtttcctgttttcctggggcctcccttctgggcttagagcttttgttaaggaaatcccagtccacagagctgctctgtctgtcttcccactgtcctggacagggtcaggtgaccatcagctgcatgtgagcaaagcatttgactttgaatacttgagacttttcaagtattcagagtcaaaaggagaatggattggttgaatcctgggaggttctagaataaaaagttaaaaaggaggttttagaataaagttaattgagggtcaggcatggcggctcacgcctataatcccagcactttgagaggccaaggcgggaggatcacttgagcccaggagttcgagaccagcctgggaaagaaggtgaaacctcgtctctacttaaaaaaaaaatccttttggctgggtgcggtggctcacgcctgtaatcctagcacttttggaggctgaggcaggtggattgcttgagcccaggagttcaagaccagcctgggcaacacggtgaaaccctgtcttaaaaaaaaaaaagttaattgaaacatcagggtgtgtattttattgtgagtggaaaattggatctactccctgtgacatagagggctgcattgctctgtgggatggtatgagagaggaagaaggagggaagcagaaccactggaggcccgatatttttcttaagtataatgggttttctggaaggctcatgacctgttggtttccatttccaaaaatcataagaattggggtgtcagtgaatgttttgtgtcccgcaggtgatgtgcgttcagattaagtgtttccatgagataatcactattggctacaacgtctaccactcatatgatctgccctggttcaggacgctcagctggtaagctctccggccccacagaggcttttagaatttggatgatgtgctttgtggcaggtacttacagtgacggtgggtatttctatcacttgctatagagataaatgctggagaggcagttatcatgttaggtcatacaaagtttcatgaagaaaatggtatttgagcaataagtgaagaaatgggtaagagaatgttaggagaatgttaagagaaagttaagagaaaaaggcaggagaaaagaggtgattgccacagactcgcacagtgcctttgagacctgagtatttcataggccagactgtgtggttggccttgcaggagtcttatagttacttgaagtctggaatcttcct

SEQ ID NO: 9041 - DNA, 6000 bp, Homo sapiens
atggagaggtaatgcatatgttaattagtgtgatttggccattccacaatgtatacacgtatcaaaacccatcatgctgcacaacattaatgtatacaatttttatttgtcaacttaaattaattacttttaaaagggactttatagatgtaattgaagttattccaagattatcctggatttcaggatggtcacaatctatcatatgatttcttaaaatcagagaacatttcctggccgtagtcccatatatatacagagatgtatgatggaagaaaggtcacaggcattcagcattgctgactttgaagatgggggaagggggcattaataaaggaatgtggacacctctagtatctggaaaagccaaggaaagaggttctcccctacagcctccaaagagaaatcagcactgctgacaccttgattttagcctagtgagacccacgtcagactcctgatctgcagaactctaatatgatacatttgtgttgtttcagccactaagtctgtgataatttcttacagtagcaatagaaaatgaataagaatgctaagcatttaatttccgtttatcatcccatgctagctagaaacataaaagtgttctttgcatcaaagcattaactaaagaataagctagttttaatttttctgcagataaagcacattctaaaagactttctagagcctgtttctcattcaaaatatgtggtgtttttatgatattataactcaaagttaatgacttttcttccccaactaaattgtagacaccctcttcttatataaattccacaaatcttccctatgggagacacaagagtacacattttctgtctgtctctagaatttatgaggttttacccaaatgaatgtattaagtttttctacatgatatctctctcaatcttcagaacagtctaatattgatcattcaaaagatccaatttgatctctgatcaataagatctgatgggctaatatggacttggttgccctaatttgggttcccacaaacagactctgagacaaggatttaggtgcaagtagtttattggggggtattttcaggaagcatggataagtaaaaccaggaagggaggaaaacttaataatgggtgtttttataagagggttactactgagggcaacagagccacagtcccattgggatctctccagaggctgtgaacatgcctcagaattgtcccataaagaagaaaataacatggggtgtttatgcaccaacttctgtcccttgttggctgagagttgctctcaaggatgtgaatttcccagcacacctggcccacactgcagaagcagagaataccccatggtcagagaacctgcttgggcatagaaacacagaaaacagctgacaccgtgtatcagggacctccaagctaagtcaaaaggatatgaatgagggactgactgtgtcagtatgatctatttcagggcaaagatatgtgatgttaaatatgtgctatgcatggattttccaatcacaacagtgtgcaaaacccaaaagtgtgaaaactaaaattaacttgatcttgattaagagttataatttccacctgatatcagataaattgacatgatcactttctgggttttctcagataattttcatgacttattggtcagttcaaatttaatattaactcacatgcggctggccttcttaggtcatcacgtttacaacctattcatggggaaatctatggaaatgaatggtctctacgatgagaatttttccagattgaactcttcgggaaatttaagtacttccacgtagacttattagtagatattgacatgtcattagtcatttgtaaaaaaatttaatatattgcaaatttttaaacatcaaaaagcaaataaagcatttttattcattatttggccaatccaatgaaatctcccaaataataacagattctgttatttcttttcttggtggttgatggttctcaagtcaacagctgaaggagaggtgtcatggtgtaaggaaaacggcactcacttagacccagacattcttgagttcatgacccacttctaccacatattattctgtggctttggaaaagtcacttaacctgttgaaaatttagttttgcatgagcatcactctccattacatgggtaaaacttgagtcactgagaatgaacagatttctgtacactgtacaattctgacagttcattctgctcatatcctcccatttttgccaactctctatccccaagttgttccaagagcgttttcacaacacattgccaagcctctgtccttccctttcttgcctatcctcattctgttatctccctttttggctgcttcattaagagaggagctgagaatctggcatctgggcaaaaccattactttggagaacaccacaaggccattgctaattttatcatctttgcctttaatgtactagtgggaagatttatttctacctttaatagtaagatatcctaagtagaaggcatgtgggtactgctgagtcttagttctgtgaaggtggagactgtgtatgttttattccttgtgagaaccaaggactcagcaaatacagagtacttattcaaacattttctgaggttactagttgatccaaaatgtatttagttgttcagagatgccaaatcttgctcaatatttagtctgtgttttagtattgctccaaaccttaaacctaaacctaccactgacttcaacagaactcttcgcttattttaactggagatggtatgaagcaatgagtcaccactgactatacataccagcagtgcctgatgccaaatggttggtgtgttaatataattttgtacacacaacaatgcacacattccaatacggtaagtaaaatagaaaagtttcaagagtgagagcacgtagtagatatttctcagaaatctatgtgtgattacctaaccttagcaattgcaattaggggaaggaaacggagaaagcagaattcagctgtgttttaagatttattttatatataccttttgtcccttgtaaaaagaaaatttgaaaaagaagaagaaaaagaagaggagggtgggggaggaaagggaaaaggacaaatgtgaaaagaggaaagagatggagaagaagaaaagaagaaagaaaagagacatctaatgttaaaaaagttttatttcaaaatctttattaaaaaaatgctttgcactgagcaatagagctcagggaaaataacgccctctcttcaacttgtctttctaagtaacgtgaggcagttgggccaacaatagtgctcccctctacctcttcatctctccatttcctaaatcttagaagaaaataaacctacaagagtttagcccccaaatctcagtgaaacagccatggaagggagagaccagtgaaaatctacttctactttgatgataaaggttgagagaaatgcgataaaatttttgaacttgagacacaaactgggctgaacacacttggtattaactccgtctttcaccttggcctcaggccttatcttattcctccagcattccttgggatggtaaaggcaggtaccctcatatgcaagtcatagttaggagaagcgttagcatgtccacctccaaaagctacattaatctggagtagaactgaaccctgtccaagggagctgagttacaggacatgaggctctggaaacaggggccatttctttctttttgtttgtgtgtgtgtgtttgattgtttgtttttgtctactgccccaataaattggtttcttttcttagagtctgatgctaaagaagtctcgactcaggaaaaccacaagggtggacttgggaagactcaacaggttgtaatgactctccagcaaatcatgtcaccatgccatttgatgatggtaggaagaaacaaagccttgaagattcatgcattgagagaataagagttagtgagtaaaccagatgtgtttcaggactgggaccctgcagtcatcaaccacctcacacctgcgtcagtaacaaacccaagctacagcatgatttttgttctacctcagcagatattttatagatggaaaaactgaggcataaagtgggtaaatacctcccccaaggtcacgagataaagataacgcagtcatcaaatattctgtctcctcaacatctgtcttactggaattcttgatggattggtacccccttattatagtactgattttaacataggttggttttgaatactgggtttttaaaaatcttttcaaatcatttgtaaattatggaaatgtatacatcacatgaaacttaccattttaatcatttttaagtgcacagtttagtttaagtacattcacattgttgtgcactgatccatcactatacctttttcatctgctccagctcaaactctgtacccattaaacaataacttccctttgcctcatccctccaggccctggcaaccacctctgaatgctattttatagcaaaaagaaatattaacttttgagcttggtttacaaccaaaaaccacaattacatgcaggagagagggggtgggaaaaagaggttaactcagaactcagttacttagaagactctgtgagtgtgctgtgtgtgtgtgtctttaaaagactctccacctcccagcccgcctcctcacactttgccactgggttgttcagtccccaggttccctcagtccccagaaggagccagcatggacaatctcctttacagtttcggaagcaggtttgttgccatggagttcacattttgacgggagttgagaagtataaaggtaaccatttgttttagtttcaacgatctgacaaaaagataggctgttgctcttcttctggaaaagcctgattggtaagattcctttaagggctcagccccaaagagctttatcccatcccctcgcagactgaaaactaaagcctgcagagacctctgaaggaaaacctgtcccgggctctgtcacttcacacccatggctaaccctggaggtggtgctgtttgcaacgggaaacttcacaatcacaagaaacagagcaatggctcacaaagcagaaactgcacaaagaatggaatagtgaaggaagcccaggtaagaggcactctcccctactcttctctgaattacctgaacgtttcaatatttctctgtgaagatatttgaggctgtcctaacttagagttcatcttatgaagggtttttacatgttttgactgttgactctgttaatagaaagtgcttggctaccaaaaagtttaggtgtggattaaggagaaaatgtcttctgtatgcaaaagaggatacacacagactcacacagcttcaggctccctaaaatacaaatgtacctactagacttttgtctcaagcattttgcggggagggaagaattaagaaagttccaactctttgcatatatttttgtccaagagacctgctacaaccgtcatgcttcagaagaaaaagaggaagtgaaagtacattttgctgacattatgtggtggagatggcattcttcccaggtccatgagaaatgcatcactgtttgaaaggcgagttattattggtgtgtagtggagcattgttttagctcactacttgatttgaggccacagtatttctttgaaatgtgacgtcacagacattcttttccaaaacacttcagaaagcagggctgattgtgacacactgctctcagaaaacagaacagcatctttaaaacaaacttgtattttccaacttgacactttttttttttttcactcttattgcaccgggatgtttgcagagtgtcctaggcaggaggaactcgaggaaagttgtcagcttgttttaagagagagcctgggtctgtgaggtccttatgtaaggcagttccccactccccacaggacatcccgtgtcactctgctctgagcagcagaagtgagctcatctgcctgaggagcaagcccaagtagtcaaacagg

SEQ ID NO: 9042 - DNA, 6000 bp, Homo sapiens
cttccttccaaagggttggagagtggctgctgcctgcagtagtgaccagctcagggattcttctgccatctggctcccctcccgccctgctggccacccactggcccctcactcctttttcctgggattattttccaaataaacgtcctgactgagctctccagccctggttttgggaagggagacacaggccaaatgtcacattctttctgggtattttagcacctctggtttactgaagcgtgacaaatcttatccaatttatccaattaaggtttgtgaaattgtgaacttggctgagggaaactattccaacaaagaatgggcataagaacaccagataataggtagcaaaagctgccattttggcttccatggggtattgggcaaagatgggtcttagaaaggtctgctgacaagcacagcagtgcactgtgcccacggtgcccacagctcctctcctgcgtgctcatggttttcagtgccctggacttgcctttcatgctcaatgccagtatgcccactttctagatggagaaactgacatttcaagaagatgaggagcttgttgaatgtaagcaggtaaaggtcggatgtgaaggattaaactcacccggcctgcctctgaagctggcatcctctccaccataccatgctgcattgccaaccctcctagataggcctgggtggttcttcaggagcccacattttcatattctcagaagagaaactaaagctgtccaaggactgagcacaatactcaatacattgttggtgtgagccattgagcagcaaagtccataggagctaggggcagccagatggaatcagccactgatatctggggcatctgatccagacacaacagtgtctgctacactcagcctctgcccccttgaaacaagaaggtccccagctgagggagagacacagtcatggtcttaggttctgagggtcttcacaccagcatcggcttggtgccaaggatctagactttgccatttctctcaacgtctcagaaaaagcaccagcagctcttgtcttgccaactgtctttaagaacagtgaccagccagctccactcaggaaggcactgccagcactctgagcccgcccttgcctcctacaatgccaggcagcacatagaataagctcatttcagaagtgaggaaatccaggctcagttaatcaggatagagtgtgagagacagcagcagacacttgcctccaacccaggcttggctggctctgaggtgtgagattctaccctagcagggaagcattcagctgatgcctgacagacaccccctattaatgttggctactttggatcccaccccacttctcacaagtaatgtgaagacaggagagccactcagttctcaaaattcagcttcttcatcttcctgcgatcattctggctggccccacggaccttaagattcaatgaggttatatttataaagaacttatctcatttctagacatggtcaattgaaaaaaaaggccacagattcctcctgtcactcactgcaagcccatttccaatgtgactttatagccaaagagtacaggatatctccccaactcctgaatctggcctgggccatttgacctgctttggtcaatgagatgatgtgacgtcaccctgaagagccatgcacattgaggtttgccttcccttattgctgtcgggcaccctgaagccaccactgggtgaagaactctgagccagcctacaggaaaaggacagacatggcccacagccagtctactcccagaaatgtaaggtctttggctgccagctgaccgcagatgcctgagtgagcccagacagcagtgtgaggcagaggcaatccatcccagatggctcagcccaaatcatcaacccacagcattgtgagcaaatcagtgattatcattttaagccactgagtttcagagtagtttgttcagcagcaatagataactgatacaaccagcactatagaagttgcttaaaacatattatctttctctcttccttatttcttttcaaagagctgtaatgaatgcacgggcaagactgctgatgttggaactgagcagacccggacatgcccttgacccctctactcagcctcgctgtaaccatttcctcacctgtggaatcagagggctggactagatgactgccaaggtcccaaccgactctagccttctgaccttctcttgcatcttttctcttgtttaaactttcatgtcaacattgtctcagacatttttctaggttttgtatcactttccattcacttttgatagaaattcatgctttctttccagcccctcctatcatgtctagattgagcatctgaatggatgtctttctacacttctaagtcaacaagattcaactttagcaagacactgccgcttttcagttcctatatgtcatccacttaagtccctttaataacagattttgggggggaaagaaaaaccaggttaattgcatagctttaaaattgcgtatgtgatttgttacctttggtattgcaagcaatgtttgaggccgagcattttacatgggtaacctggagatgctttctagaagggcactgttgacccccagacagtgcatagcagggctgtttgtaaccccacagtcaaaagcttttgagttcaagacataaagaggaatatttcccatttgaaaaagtactgaatctgtgtttcccctcatcaaatcacctacctctaggcatgtaaagttggctggagccgggcttggtagctcacacctgtaatcccagcactttgggaggctgaggcaagaggatcacttgagcagtttgaaaccagcctgggtaacatgacaaaatccatgtctccacaaatacaaaaatttgccaggcttggtggtgtgtctgtagtcccaactactcaggaggctgaggtgaaaggatcacttgagtccaggaagttgaggctgcagtgaaccatgattgtgccagtgcactgcagcctgggccacaggacaacactctgtctcaaaaaacacatttacctatgtaacaaaactgcacatcctgcacacgtacccctgaacttaaaacaaaagttgaaagttaaaaaaaaatgttggctggaaggtgtggcagcttgctcggtgcctgagtgacagttcttcccagcacaggaggtggcccacagacctctcttagctctgaaagttctgtaacatcctctgagagataagcattgttgagaaggttaccccagtttccaagagacttggcaatttctactgtgccccattgcctaatatgtgacagctcctcactgactttcttgaaagtctttatttcaatgctatatcacagcataccagataatatttcaagccacaacaagggaatcacaggtaagagaaactgcccatcgtgtgctgggcaactgagcttcccaccaggagcccttaatgagctgctgcatctgccaggagtgggtgacatctgtttctttacatacacgtcctggccctgtgagtttcttttgaaatgaagtgtaaggcccctttgaattacagaaagatgtgtgtgtgtgtgtgtgtgtgtgtgtgtgtgtgtcatgggggaagagtccaccttctgtttctttcttttttttttttttttttgagacggagtctcactctgtcgcccaggctggaatgcagtggcgcgattaaattcaaacagcacccaggagacaaaggcgagtcctggctgcagcccaggcaggtgttctctcgtcaaaacaaaatctgcctcaaaagtcaatccagaggctgggcaagtgaaagagcagtgacttagaggcagggaacccgagcttcaggctactcctgcacattgggtggctacacaatctcaattaccctttttaaacttcaatttcttcatttgataaatgggatcaatgactctccacctcaaatgggtctaatagtatctgctcaacctaatggcttagatgggaaactgctttattcaggaaaggactccggaaaggtaagctgctttattaaagtgtggtggcatgttcttccaagttgagaagttctgctagatgggagaaatgaacagtgcccgtttctgagtgttccagaccacagccttgcagctctggggacctaaaggaagaaacatcaggtgtgtctcgcggggctgcagacatgaagacggggatggaattcaggtgatagtactggttccactcatccgcgcctccttcaaatgcctccttctggcactctgcatttcagcattctctttgggctgcggaggctccctagaagccacgtcccctgaaaggaatataggaaggacctcttgttcctggcaccacctttaactcctgcccctgcccaccaggacacctgggcaagacgcagcgcaatggtgggttaccaggcaggagggagggctctaggaaggttgggagccatggaactctggagcttaaccttctctgaccaccagtgtaccagcctgcgggtggcaggactggggcctctgcctagtgttgaaacgggggcgcacagatgcttttctaaataacttttgaccccctttctggtaaatctttttttcagagttgattctctatgaaatctacactgcaaacaccacctcctccgctcctagaacgcagactgtcttaccaccgccctagtttccttccaattccaactggggcgggcccgccatgggccaacaacaggctggctcagggctgagggggtctctggagtctgaactccgcgcccgcttgctcctccagggcttagctggtcaggacttgaacattcgccggatccataaattgggtcatttttaacctcaaaaccgaaccgcagcctggggaggcctttaggaccgaggggagccatcccttcctctagtcgggcagcaaattcctgtcctcctagtcccccgcagctatcccccgcccccagcctctgtggccctcacattgtcagacactggccgcgggccaccatctggacgcgatcccccgctagggcctccctggtctgggccaaagttggtggccaccttcgcgcgggctgcgccctccttctcttccctgccctcctcccccggggcccgcgcccgctgcctccagcacgcgcgtcggcaggctcggcaagcgaagaggagcggctcgccccagggcgcccctcgcccagcctgccggccaggcgagcgcgacgagagtctccccgcaccccttcctctcccgggggccgagagggttgggctccgccccggcgccgcagctcccgactccccgccgctcgggctgccgccgctgccccgcgcccggcgctcggggcagccgggggcgcaggcggagagcgcagggcggggagaggcgtggggagcagagcggcgctgaggggagggcagaggaggagagagcctggcagcggaggagcagaggcgggcgccgcaccgccccgcacgctcgctcgctcgggagagtcgcgggcggccgcttgggcgcacttgccgggtcaccttgtcccggaggtaagtccagacctcccggccgcgggggcgggcggaggggcccgcagtgggcggggtcgcggcaggggccgcgagctggcggcgggagctggaggctgccctgcgctggcgggtgtcctagtcctggctccgcctcggagcgcgcagacccggcggcggcgtggcgcccgcggtaagtccgggtggtcgccgcgacgagacttgggagacacggggtcgcagggcgggagggggagctgagccggcagagaaaatgcccaggaaggggtcgatgctggcctgggctgcaccttggtgccttgccaccccgggagacgcgaaggggctgctgtgcgaattcgatgggagctggtgagaccgagaactgagagcgtagcggagccaggctgcccagcagggccatgagggcgcgcggcgggccaaggctctgcgggttcgggctgcc

SEQ ID NO: 9043 - DNA, 6000 bp, Homo sapiens
ttaatgtgtctacagtatacgcacattcacccagacctctctctcctcctcctcctcccgcctcctctgtccttctccttcatcctttaatgtgtctacagtatacgcacattcctccttgtgcacattcctccatgtgtgcttattctgctctactttggagaaggtttgagaagtgggagggaccatgggccacacaggagtgttccgggccacctattgccacgtgcagtcttcagtcgattcttgttataaagcaggagcatcccagactggtgtcgagtcggtcccactcaccacagtgtctgcagctcctggatgagctcctgccatatgataggccctcgtgtgttgaattaattagctaagtttcctcaactctacagaaacaggcttttagaaggagcagagaagctcactaactgccttgctgcaagctcccccttccccactcgggctgggtctcagaggtgagcctgccatgacctgtacctgccatggcagctgccctcactgaggtgtcattcccacagctacctcgggctcgggctgatgtcggcacgcctggcgatcctgggcggcgtggaggggcagcctggtgagtggacatgttgccccgggcccactttcacagcctctgccctccattctcagtgggaacgaggagcccctcgggagggcaccagcttggccctgcaggagaggtccctctgcccctcccaccccactgctgtcccgctgcatgctgggcacccagccaggccagggcatgcgagtggaggggtgtgctgcagatcttgttggtggcaccctgatggggcaggaacccagggtggtgttgtacctgtccaccttccaaggtatttctttctttattttgagacagtgtctcacttgctctgtcacccaggctggagtgcactagcatgatcccagctcactgcagcctctgcctgccgggttccagcaattttcatacctccgcctccccagtagctgggactacagatgtgtaccaccacgcccagctaatttttgtgtttttagtagagacggggtttcaccatgttggccagtatggtctcgaaatcctaccttcaaatgattgcctgccttggccttccaaagtgctgggattacaggcatgagccatgacacccagccccaagttattttttaaaagatgctgatgaaatcccttctgaagcactgagctgaaactgagggaaccagggaactgcacactcatcccctacattgggagctggctttagggatgtgaagacagaaccttgtacagacagcacaggagggctgtggggggtgctgggttcttgccgtcagggaaaggttttctctctcgctcatgattccagccttgcaagaacatccctcctcccttgctctgcgaagggtcatgaaatgtgggcttggcccttcctgagacatggagttgacctggggacacagcctgcatcagggccagggcctctgctccttataatgggcatcacagcgggcatggactcttaggagatctcaggattgccatggtctgcttcaggggctggggcacggccctgaggctggtggtgcctctcttccctgatggaactggccaggccacagaggccttcccaaggccttagtgtctgatgtgtgtatgaggcgctcaccagcacctacgtgtgctccagccaaatgcccttacctcagcccccagcgccccattggcccagcacccctgcccacttcttccgagggcctggtatctgacagggtaggatgttcaactggaattttcattctcctgtgcatgccctacttcagttctttctttcaaatcctggtgtttatcttcataatggtattccttttgttgcaaacaaaaaccatgtctatgtctcagaaacagctgcagcccttattctggggccaaaaaacacctattatttagccaatgagaaaaggcaggtacctctttgccctttgtggttcccagggagtcgtggctcagaccctgagtcctctcacacccagcagagcagcaagaaggtctcatggtctcctcgtcaggctgtacaaagtgcctgttttagacatttgggggctgtgaggacccaggagaatgagtctctgttttgttaccggttattgcgtaacagaccccccaagtagagtgaaagaacagcaaacagcagtcgcggctggaatctcacagcagaccacacaggctcatctgggcagcacctccgctggggtcctggggatctgtgcagctgcatgtggctgtggcagctgtctagaccctcccgctggggtcctggggttctgtgcaggtgcatgtggctgtggcagctgtctagacgccccctgctggggttctgggggtctgtgcaggtgcatatggctggggcagctgtctagactccctgctggggtcctgggggtctgtgcacatgcctgtggctgtggcagctgtctaaatcccccgctggggtcctgagggtctgtgcacgtgcctgtcgctgggcggctgtctagacctgggcgctcttccacatggcctcgccccagcagagcagcctgggacacttttgtggtggcttcaaaaaaggaaggctaccctgatgccaccatttcctgcccattccatcaaggaaagcaggtccaggccagagtccagggatgggaccagcacctttcggtgggacagcagcctgccatcctcgaaaggtgatactggggccagccctgggaccaatacgcttcctttgctggttttgagcccccagcttgtgtgtattggagcagcagattccattcaaggcatggtggcacctggtggcacttgttctggccctgccaccaacctaccagctactcacagcctcagtcacctataaaactgggtaatgatggctcccctcctaaaaggactgtcgtcacacttcactgaacagcccttggcccagtgcctggcacccggcgtgcccagggccgtgagctgggcatggtcctggtagcggtgtgcttcctggccaacgaggctttgctgccacttcccagggaggtgttgccttcccagtggacctggaagccactcagcttcccccatcctgtgtcaagccagggcctccgcgactcctagctcagccctagtccatggcggtgatataccttcctttctctttcctttttaatctctgtttcagctaaggatggaaaggagttggtcagcccttgcttgtctcccagtttcaaaggagagtgggaacacgcagaagtcacgtacagggtttcagggcagaaagcaggtacggggagggttgctgcctgttggtttctgcgggtgagagtggtggcctcctctcccccttgcctttcccacatcccatgggacgttccacgggaggctcctgacctctctttgaagagcctgtacctgccctggaagtgaaggtggtttggctgcaggggcctgtgtctgtgctgagagccagctccttccctctgcctctgttcaacattcccctgactgtcaccagaagcttcctcctgagggctgatttcctaacaggcctgcagggaggaaggactggaccagcttggggctgagatgcagggctgggactgggagcccaggcactctgtgctgtgctgggcgggaatagagggagggtctgcttccacccatcctgctcgaggctatggagcccgctggccctgggcaggctctagtgctctgcacccttgcagtttcttctgagagaaatgttcaaacgccattcccagactgggcactcggcatgaggggtgcatgccttcgcgaaccgttcaggtccttccaagtcaatcacccactggtgcgtgtaccggggggccgcatcaggcacagcaggactgcacagctgtgtcccacaggaggagccagacagtgaagctcatcgggaaagccttccaagagaaataacacggggcggggatctgagagggcgatcgcagctgtaactaggacagccaaggacggcctcgtggggtaacatgggatctaagacaggaggaggtttcaagaaactgcgcagatctgaagcagcagcaccccaggccgcacaagcagcacacaccggggccctctgtcagctgctgtgtttaatgaacgaggaggaggtggtgtggcttggtgggggacaccaggaggaaatgagatcgaagggttggagcatgggtctgtggaccgtgggaaccctggaagcactcggaaggatggggcctggtggaggaggactgggaaagccgggaagctgggtcaaggtgtggggtgtagaggcgccctcagatgtccacacggtccattggcctccggggtcctctgttcctgttctccctcaagccatgggagcttggcaagtgagctgggcctccacttccttatctatgacatagggagggtgcaggccccctgaggaggtgggactccgggctggcggagggggaatgtagggcagatggtcccaacaggccagaggccactggtgtcaggcatcagcagcttcctcctcagagtccaggtctgccgctgccttcgtgcccacggtcttcactccctgcgccgggaccaacaatgccctggctcctgagggctgcttttgacctgtgcggggagcagccccaacttggggtggggtcttacaggcttctggacctgccttttcctgacaattcaggtcagagtctcaagtcccctgggaggggccccaagcagctgtgaggcctgggtgctcggagcccactgaccgctagccttgtgcttgtccccagcggcaagcctgcacgagctgtgtgctgccagagtgtcagaggtccttcaaaacagagtgcacaggacggaggaagtgaagcatgtggacttctatgctttctcctactattacgaccttgcagctggtgtgggcctcataggtaagggggcccggatgggctgagcaggaaggtcggggcggcagggggcgggggtggagggcgtgtgctccccgaggcagagggctggtggcaggcaagcaaccctgttgtcacatccctgcaggaggccagaagcagatttgagaaggcgtctcatcctgagtaggaaaagatcagttctttgagcccttcagtaaaacctcgtggctggtgacttgctgttgattccagttcctgctggaaggcaggtcctgccttgcactggcccacgttgtctcagactcagccactctgccctaccctgcagccctggctacaggaggcctcctgtgacctgcaggtggctgccctgtacccatgggagggatcagctcactgaatgtggagtctctctgactcaccctgcacagcccaggaagccagattagggcggaaaaaggtattcagagtttgctgaggctagtggtggtcaggctgtgtgggaactctggagggggttgcagagtcactatcatggtgagatcatcagaatgtatggcctgtggtacggataagaacactactgttttaaataagctgacacggtgccggctctctgggccctgcagcctccggcgggtctctgtgctgacaaagctaccactgactgggcctgggtggaaggtgggtggtcaaggtggaaggccaccaataaaccacccctcagtgtatttttcaagaacttttttttttttttttttacatttaggaaactgataccagaatactgttgctgagctcagttctatggcttcaggaaacatttcaatttctctacttttatttttcttaacttaaaattttactcaatttggggtcctgggttcctggtgagctttctcgggggacactgcagggttgggttgtggggtgaccctctcagcccccaaacccaccccacaccacatcacccagaagccgtcctcagagcacgtgagtgccgcctacagctggagggcctgcctcagaagccagtcagtgccttggggctcttgggct

SEQ ID NO: 9044 - DNA, 6000 bp, Homo sapiens
gaagggcaccaggatgtggcttgtcagtgggaagcaatgacctttacgtttgacatgagccatcaagggccaggaagaatctctgcctgctacaaaagtctgcattcagagtcattcagcaagcattttagcagatgtctagcaggcaccaggtatcttcaccccagggtagggtgaagatgatgagacggggcctctattctcaagtccacaggctcgcgctagccaggttgcttgactcctcccctgtgtagtgctaagcagcctctcttttcttggaataacaaagatatcaatctagagacttgctacttgaagttgaagctgcagttaagtttatagggtgccaagtgctcatttaatcctctcaatagccctacaagaaaggtgttgtagcattccagatgaggaacagttgcacagagcagttaagtaagtttcccaagatcagaccactaataagtggcagagttaggatttgagcccaggaagtctggctccggagtccatgtctttaactgtcacactctgctggttgagaagctgagcaccaagctcctaaggaagaggccggctaagatgggcagagttcttatccatacctgcactcacaccctggcttcagactcccccaaaactgattcagcaaactaatctgaaagtagcttcctgtcacccacccagcttctgcctcccaccgcctcagaaccctgctgtgggagcccatttccgattctggccttgcacctgctgcgcttctcttcacaaagccctcccatcattcataccacagccctacaggctaggagggatcggctctttgacaagtggagaaatagaggcccagagatggttttttgtttttgtttttagagacggagtctcgctgtgtcgcccaggctggagtgcaatggcacaatctcagctcactgcaacctctgccccccgggttcaagcaattctcctgcctcaggctcctgagtagctgggattacaggcacctgccaccacgccgggctaatttttgtatttttttaagtagagatgaggttttgccatgttggccaggctggtctcgaactcctgacctcaagtgatccgccacctcagcctcccaaatgttgggattacaggcgtgagccactgcacctggccagagagggttcttgaatctacatcttgctccatgccaccagggtctttaaagagagttcccttggccgggcgcggtggcttacgcctgtaatcccagcattttgggaggccgaggtgggcgaatcacgaggtcaggagatcgagaccatcctggctaacacagtgaaaccccttctctactaaaaatacaaaaaaaaattagtcgggcatggtggcgggtgcctatagtcccagctactcgggaggctgaggcaggagaatggcatgaacccaggaggcggagcttgccgtgagccgagatcgcgccactgcattccagcctgggcgacagagtgagactccatctcaaaaaaaaaaagagttcccttttccctccctttatcactgtgacctgggtacctcctggcctgcctcatccctgctaaagactccatgccaggcaaagcattcatcctgccttctttcatatcttcatagcaatgctctgagacagatggtattgttagccctgtatacagatgagaagattgaggtccagggagacagagccactgaaatggctctcccacagccacatggcagagcaggcctcagtgctgggccacccaggcatgtagccactccacagtactgccaccaggctgggtcaagaggccttggtttgctaatcttgctctgaaaaaagtccagaaaaggtctctgcttccttcctggctgggaggtggggcatgctgggtaatcagagagaatgcttctagagacgaggccaagctggtcttaaacaactgaggccttgtggaaggagtgaatgtgatggtgatcctgcccaggggctatgattcatctggctgattgattccagctgagtctgtaaaaatctcagtcctgctgttggaaagcagaatgtcaagtcatggagtggggtgggggtgactgtcaggtcatctaacttgataggtttggaagggagtccacaaatatgcttcttgacaagggactcatataggtggcatgtgggccagactttgggatcctctgctctcccaaaaatggtattttgccttcagtctatctgcttctgctttgcatttctttgatgttaacaaaaaggcagtagagaaatcactatgagtgcaaaaacctaggtttgagtcttagctgagatataggacccctgtgtgactctgggcaaatcacttaccttttgagggcctctgttttcacatctgtagagtgggaacagtaacacctacctatcaggacagctgtaagggtgccagctgtaaatggggcaggggtgtgttaaggctgactgcccatgggggctctgtttgccgacttgctttgtctttccttccagccccttcatgaataagttttttccagccagctttccaaatcgacagtaccagctgctcttcacacagggttctggggaaaacaaggaaggtcagtgctaaccactttcccctgtagtgtgccttgggtgtcttcctccaccattccctttgtctctccaatattggggttctccaatagagcaactgatgaagtgggctctggaattccatggcctggattcacattccaactctgctattgtctagacatgggaccctgggtgaacgccttacctctctgagcattgggtgtttttgtttttgttttttttcccatctgtaaaatgaaagtgttaatctagtacctccttcacagtcatgttgttaagatggcgagtcaataagtggaaagcattcagcatggtgcctggctcatagtaagcactcaaagtcggccttcatgattattttattcgtatatatttttagtgtgatcactgcctcacctaaggtttgaaaagggggttccacagctcttttttcaaaaataaaaactggccagaaacagtgtctcatgcctgtaatcacagcaatttgggaggccaagacaggatgatcacttgaggccaggaatttgagaccagcctaggcaacatagtgagacctcatctctacaaaaaaattgtaaaaaaatgcaaactatggggaagtgtggagatcctgggatttgtaggttagttagggtatggattcaaatgctgtaacaagattatcaatgcttgaccaaacagcaggtatttctttgttttttgttttttgagacagagtcttgttctgtcacccagggtggagtgcagtggtgcgatctcagctcactgaaacctcagccaactgagtaattgagattacaggcgtgtgctaccacacccagctaatttttttgtatttttagtagagatggagttttgccatgctagccaggctggtctcaaactcctgacctcaagtgatctgcccacctcagcctcccaaagcgctagaattacaggcgtgagtgagccaccacgcccagcaggtatttctcttgtatacaatactgagcatgtgaaatctagcacttttttttttttttttttttttcgagacagggtctcgctctgtcgcccaggctggagtgcagcggcacaatcttggctcactgcaagctccaccccctgggttcacgccattctcctgcctcagcctcccgagtagctgggactacaggcgcccgccactacgcccggctaatttttttgtatttttagtagagacggggtttcaccgtgttaggatggtctccatcccctgacctcttgattcgcctcccaaagtgctaggattacaggcgtgagccaccgcgcccggccgtagcactctctcttactggtgcctagcacatgctgccttgtccctaatcggcagcaattttatgtgattgctttgtgcatctctaaggaacctctgttaaacaattgttgattttttttttttaaagactgagcttgggccaggtgagatggctcacgcctcccagcactttgggaggctgaggcaggcggatgacttgagatcaggagttccagaccagcctggccatcacggcgaaaccccgtctctactaaaaacacaaaaaaaattagccaggcatggtggcgtgtacctgtaatcctagctactcgggaggctgaggcaggagaatcgctttaacctgggaaggcggaggttgcagtgagccgaaatcgcgccactgcactccagccagggcgacagagtgagaccctgtctcaaaaaaaaaaaaaaaagactaagcttggccaggcgcggtggctcatgcctgtaatcccaacactttgggaggctgatgcaggagggtcacttgagccctggagttcgaggctgcagtaagccacggtcagtgcactccagcctgggcgacagagcaagaccccgtctaaaaaaataaataaataaaacagtaaaaaggctaggcttataccacagtcttcaaggtcccaggccctctctatctcatgctccgccatatacagcactggccctcgggtcaggatagtgtcatcactccactgtccagccagaaggaaggagaggcatccatattccctgtccatttagctataagagaagctggaaaatggccgtgagtcggtctcgtgtccagttagaactaactcatcagggtgcgcatctgcagtcttctgttccggcaaggagaaagcattcgtatcatttctagcttgtcaagccctactgtttcagcgatcctcattggagaggaatcagcagtcgaaggaacagcgggccaagcgcagtcgtgacgtggcgttcagagagcggaagttgtcagatttcaccgggccgtaaagcgcgctggctgtgtcatcttccggttagcgacaacggctctgaccgtctggcaggccgcgtggcgcccgcgccggccttcctgcaggggactccaccggagccttgccaattccgtttgtttccctgttgtcgcccgcttcaccctggatcatgttcaagaagtttgatgaaaaggaaagtgtgtccaactgcatccagttgaaaacgtcagttattaagggcattaagagccaactggtagagcaatttccaggtattgaaccatggcttaatcaaatcatgcctaagaaagatcctgtcaaaatagtccgatgccacgaacatacagaaatccttaccgtaagtggggaattattgttttttagacaaagaaaggggcctttttgtccaactctaaggttgcttcacaaatacccttttatcctgccacaccagcaggttgataaaggagctatcaaatttgtactcagtggcgcaaatattatgtgtccaggtttaacttctcctggagctaagctgtaccctgctgcagtagatacgattgtagcagtcacagcggaaggaaaacagcatgctctgtgtgttggggtcatgaagatgtctgcagaagatattgagaaagtcaacaaaggaattggcattgaaaatatccattatttaaatgatgggctgtggcacatgaagacatataaatgagcctcagaaggaatgcatttggggggctaaatgtggatattgattgtgtcgtatgtgtgtttgtgtctgtgtgtgacagcgtgaatacaatgcctctgtggttatgctaaataagtttaacagatactttatagaaaacaaatcagggtgctcttaccacagatgaaaaaacaaattaggggacaagcagcaagcagtctgctaacactctggaatgtgaaaggagtgtctggactctgtgactcccggcaaactccacagcctctagttgtcttcttaggaagcttggaagcaattgagaatggtctaacatcaagatgtctaccacagggccccccacaaaagcagcctcggggactccggcctttccttgagacctgca

SEQ ID NO: 9045 - DNA, 6000 bp, Homo sapiens
catgaatccatcctagtaaatgaggacacagcccagcaaagttgaagttgattgcccagtgctgcacagctgaggggagggtataactccctggccttattttggggccccaggctcagtgctttccctagcatatgatagccaccccattattggttgtcaagatgcagttttaaatctagtcaaagagaaatacagaccactacatcccttctgagaggtttgtatcatctgggatagacacttctacctaagcagtggtttttgaccctgactgcactttaggatgacctagagcagtgctgcttaaactttaactcagggaacttgctgaaatgcaggttctagggtagggcccgtgattctgcatttcttttcttttttaaaataaaatttaggaggtaccaagtgcagctttgttacatgggtagattgggtagtggggaagtctgggcttttaatgtaaccatcccccgaataatgtacattgtatgcagtaagtaatttctcatccgtcaccacccctacccttcagagcctccaatgttattattccacactgtgtgtccatgtgtacacattatttagctcccacttataagcaaggacatgcagtatttgacgttgtttctgagttgtttcacgtaagataatagtctccagtttcatccatgttgctgcaaaagacatgattttattcttttttatggctgaagagtattccattctgtgtgtgtgtgtgtgtgtgtgtgtgtgtgtgtgtgtatacatttatacagtgtcccaagtcctaggtctccctgaaggcttagaaagaaaaggtgggaggtgctgctggaaaggcactggggccggtgggtggaagttcctccataccaagctaggattactctaacctcagtgttcagaacagtgatgttttcttttgcctcatttattatttaagtggcatacatactatataatcatctaagaaaattagaaaatatagatacacaaaaaaggaaaaaagctcatcactaagacattttgcctcctaaatatttttccaaagataaaaaaaaaaaggaatcctgccacacagtgttctagctcctgcttttactatgtaaatctaaagcttgaacattcctactcaagaaatgtatcggccaggtgcagtgactcacacttatatctcagcactttgggaggctgaggcgggaggattgcttgagcccagaagtttgggaccagcctgggtaatatagggagacactatatttacaaaaaatcaaaaaaattgcggtgcatggtggcgtgtgcctgtggtcccagctacttggcaagttgaggtgggaggatctcttgagcccaagaggttgaggctgcaatgaactgtgattgcaccactgcactccaccctggacaacagagtgagaccctgtctcaaaaaaagaaaaacatgtcatcactttcaatgaccatttaaatggacatataataatttaacccattccattaacatttgacattttactattgtaagtagtgaatttttttttttttttttttgaaatagagtctccctttgtcgcccaggatggagtacagctcactgcaacttccgcctcccgggttcaagcaattctcctgcctctgcctcccaagtagctgggattacaggcatctgccaccacacctggctaatttttgttcttttagtagagatggggtttcaccatgtagtccaggctggtctcgaactcctgacctcaggtgatttgcccccaacttggcctcccaaagtgctaggattataggcatgagctactgcgcctggccagtagtgaactattttaaataatgttattggtgaacaccctttcatgtatacattttggcatacctgacgtatttttcttaacatgcctagaagcagaattacagagtcaaagagtatgtacttttgggggacttttggatacagagtgccagataaacccgcagtagtgttccagtttataatgcctatagccatgtgaaaataccaagatggtgacattttaatatctaaaatagacagtgccatcggatacagccattagttctaagttgaacttctgaattgcttttggttgccaacttcagtattatattcaaagattctagcatattacgaaaatatcctttgctgtttttcatctcttgatccttctaagataaattggtgtgtgatttgttgatagtatctttgtgtgaggattgtttttcaaaaatttaagcttgaggtgttttgttttgttttttaacaacttttgggtggctgtttttgccaacagtacaggatttgccttctttatattttggttaactggaattcaggaacagaggggaattagaggaaaaaagagggcagggtttatttctctcacatgacacacttgcgttctaaccaatgacacatgagggttggcaaaagcttccaatgaggaagggccagaatcttcagatgcctagtcaggtggaggaggtcctctgacgcagaggaaatcagatgctgtacccagcctgcagttggtaggctttccatcactactcagagagaaagaagaaaaatctatttgtttttgtattcaagccaacccatactatgaaaccctcccctttgtaccagcatagaatgtctctagagagattttcaaggaactggtgatagcagttgtccatggggacctggagtgggaggatttgtttttcatggcatacccatttgtactgtttgaattatttactgtagtttgctttttcaaaaaatgttcacgctagttgcttttaaaaagccttactcgcttatggttatgcaggatgttagcattaggggaaactgggtgaagaatgtatgggaaccctctgtagtgtctgtgtaactcttctgcaaatctaaatttacttaaaaataaaaagttcttttaaaaaaaaatgacagagggaaaaaaatactgtcttcctatccttcctatccaaattgccccatgaggcaatttacctactagtcttgtcatttcttttaaagattttcctgctctcctgattcatctggcctcctgattgccaaatacaatacacctgtcttagccatggcactgtgtttactggagtcaggctttcctaatgaacatcagctggcagatacttgtaaacgttcacaacaaatcggaggaaaaactccatgaaaatattgcttaaaagactttgaccaagctatgtgtctgcaaaaagtgtactgaattcagaaccttttacaaattcagaaacttgtaaagccatttttccctcaacttgtagtccaggtaaaagtacaggtcagtctacatttttggcaagcctcctcagtgatcctgatttcctataaaactgagtttcacagagtcatcagagtgtgtgtgtgtgtgtgtgtgtgtgtgttggttagttggttgcttggttggttggatggggtgtaacttgatggatgggagggctgtggagacaggtgatcaggaggctgtggccaatgtccaggtgggaggaaataagcatctgaaatgcaacagcagtgaaaggttagggagagtagtcagatacagaaactgacttgagttggtgatttaggcgtgtggaagacaaaagttcgttgttcagactgcgtagaaagaagagaatccggcagcttttctagttccttgcaggggtgaagcactattattaagggaaagagatgcaatggacctttcttgcctttgattcccaggtgcctatgctgcatgcagatatttcctgagtccccatgctgtgccaggcactgttcgtggtgctgctttcctagagatcacattcaagggtagggggacatgcaatacgcaaataaacatatacatatagtacatgtcaattagataagtccatgaggagaaatagataagggactagagaaatgggtaatgggagccctgaggttgttttttagatagaatggtcagtgcagacttctctgaggaagtgatatttgagagacctgaatgaaataaggagatgtgccattgggcgtggtagctcacacttgtaatctcggcactttgggaggccgaggtgggcagatcacctgaggtcaggagttgaagaccagcccgggcaatgtggtgaaaccccgtctgatctaaaaatagaaaaattagccaggtgaggtggtggatgcctgtagtcccagctactcggtaggctgaggcaggagactcacttgaacttgggaggcagaggttgcagtgacctgagatcatgccattgtactccaacctgggtaactccgtctcaaaaaaaaaaaagaagagagatgtgccgtgcaggtgcctgtgggaagggcattccaccagaaggcacagtaaagacgaaggccctgaggggtgcagaaaggtttgttgtcaggacaacaaggaggcccgtgtggctgagctgagcgaggaggagagtgggaggtgagagaggccagcacggttttggagaaacttgtaggaacatctcttggtaacataggagcttttgacagcgtgaactagttgctatacagagaaatgggaattaattaaatgtcctggagctttatttcctgccagctatcctgggagttacacactataaatggttaaaagaacattgatccagaagtggggagacatggctcctgtgtgatagtcttcccttttgcccagatgttaattactttgtggctaactcctggaagtgcagaattgtcctgtggcactcttgggagcatttgggagagaacatttatgaggtcttcaggcttcatgggtcagagggtggctacactgggtcaattaaagcaacatgaaggtggtatgacttgatctgcctcagaggatcttcttcacttcttctccccaatccaaccctggcctctcttctgagcaggattggttgccgtggtctttactgcttttctccctgatgtgtgaaacaagcgccttctatgtgcctggggtcgcgcctatcaacttccaccagaacgatcccgtagaaatcaaggtaagtgtgttcctggatttttggagcctctgtgctaggcagtgtgtctggagcaccatggtgagctgttcgtgtccatcctgtggttgcagagaagaaagaatagtgccagttaccccggaactctgcctctccctctccctgtgcctctggttctcggtcccctctctgtttctggttctttctgtgtctctgtccctgtgtatgcttgtgtatatttgcatctcggtctctttctcactctcacttttgctttcaagtattctgtctctgtcatgtatgtgtccatctctttttgtgcctttgtcttactccacctgcctcttctttagcatctctgcctccctttctcacctgctccatcttctctgttaccagctttgtcagcataactcctagtgtctgctcatattgttcatacattgtgaacgtctcttttccttggcagtcagacttgtaacttgcaggaacagtcattaaaataacttttactgagggttatttacatgccaggcattgtgcatggcttagctcaggttgccccccaagaacccactggggccaattccatatgttacacagatttcctattcattttacagatggggaaaccgaggcctgggaaggaaaattaacatgttcaaggtcacatagtgaggaagacatagggttagttcaaaccccatctctatttagaggagacgtggtctttctctgttgcctaagctggagtgcagtggcgtgagcatagctcactgcagctttgacctcccaggctaaagtgatccttctgcctcagcctcccaagtagctgggactacaggtgtgcaccaccatgcctggctaatttttttttttttttttttaagtagagatgaggtctcactatgttgcacaggctggtcttgaactcttgggctcaaacagttctcatgc

SEQ ID NO: 9046 - DNA, 6000 bp, Homo sapiens
attgcttgaaccccagaggcggaggttgcagtgagtggagatcacaccactgcactccagcctgggtgacagagtgagactccgtctcaaaaaaaaaaaaaaaatgtagttaggttcttcctgtatagcctgtctttttccacttaccaggtcttgcttctggggttccagggcagttgccagtatttaaccctgttccccgctctccgtagaagaacgcctgtgccatgctgaaggacgggactgcaggctcgcacttcatggcctctccgcagtgtgtgggctacagccgcagcacagcggcccccctcacgatgactatgtgcctgcctgacctgaaggagatccagagggctgtgaagctctgggtgaggtcgctggatgcccagtcggtctacgttgctactgattccgagagttatgtgcctgagctccaacagctcttcaaagggaaggtatgtgtgggccaagtgggagtgcagtaggaagggaatgaaaggaggagccaggatggtcccactgcccactgcatgcttcacgggctcccctacaagccttttgcctggacctaccattcctcttcagttcctaccctccttcaaaccccagctcagaggcctcctccgtagtctttccaggttttcatccactcctggagctcacgtatccctgctgggaccttcgtggccctatatcatttcttctctcgggcactttctggactgtatgagactggtgtagaaatatgtcttatttcctcccaggagctgtgggctccttgaaggcagggtccaaggctgactcactgttaacattccttgatgtctagcctggtgcttcgacctctttgggactgaaaccctgccttaccatcaccagtgtctagtacagtgcctgacacttagtaggcagtcagtttgttgaatgaggatgtagagagtgggctctggggagagatccagtatagtggaggagttaatagcagagactctggagtcagagaacttgaatttacccactctgcagccttgaaaaagttatttgacctctctgtgcttctgtttcctcatctataaaatgggactgaatagtacctatctcatagggcagttgtgaaggtcagatgtaaagaaattgaaacagttcctgctacaaaataagtgctcaataaagttagctatcatcagtagtagaaattggtggctgatgaatgaaggaaaggatctttgtgcttagcaaactgttgaagaagccgtgaatagtgagtattcagtacatgagtaaatactagaatgttcttggtcagtgcttactatatcagtgaagagtaatactcaggcaatgagtgagtacgtattgataaaatgactgaattagtattaagcattccataggactttgtaggatgagtgaaaaccgtaaatgctgtgcaggccttaagaggcagacactgggtaccgctggctttatatcaagggcctccccttctctttcaccccagacacaggaagctccagtgcagagaggaagtgctaagtcagcacattctaatctcctccccacctactgaacagaaaatcagagctggggctgggcacagtggctcatgcctgtaatcccaggccaaggcaggagaattgcttgaggccagaagttcgagaccagcctggcctaacatagcgagacccccatctctatttaaaaaaaagaaagaaagaaagaaagaaaagcagaagaaaaatataattaagagaaaatcagagctgagagatctcaggggttgtctaacccaacccctctattttatagctgaggaaaccaaaattccaagaaaggatagagtttacccaagcagtcccagagctaattataatgggcatgacacagagtgggtaagtttcagaatgtgagtggaattgtttgggggattttggccatgattaaactggtattatttctttgctacaatccagatagcaagatgatgatttttgttacatcagaaatctctgtggaacagcaaagcactttcagccccaactctgcccacattccccccacctacctacaacccccaactacctctatactaagctgaagcatttggagagtcccagggagtttttttgtgagtttttggagtcagtgtatctgttacaccttgaacctcttgccattttctatttcctgtccctatgccagtcttctcatccctccccacccctcaactcccttctccatgggttcagaggccacctttatcctgaactaagccttcctcctccattaagctggtccagtgctgagtaagggtaccagtaaataagatgtggtcccgctctccagggctcacattctagacccaggaaaagagactgcagagagctataacgtgggccacaaggtggattcaggagcttgctagagagatgggcaggtccattcattcacctgtccactcaccagatttttactggggcaggctctgtgctgggcctggccagcagtggagagcaaaccaacacagctctagccccagtcaggggcaggagatgatgctaatcagagaatcactaaggagtggaaactataagcagagatgtgtgctccaaagtagagcagcagggttctgtgagagtgaagagcagaggatgctggcctaggctagagggccagggagcgcttccccaaggaggcaccactgaagccgagatgcgaaggagaactaggagctaaccaggtaaagggaggtacaccccaaacagcacagcacgcacaaaggtcctgaggagggcgggagcctgggtaggggctggatgatgggggtgggataagaagaggcccagcgaggaccttgtaggccacgttcacaatttgtcacccttatctgaagggcaatagggcatcattaaagggtgttccacttggagggcgggaaggacaggtgtgaggttatctcgaaaagtttcttctggctgctctgtggtgagcagaccaggagaggcagtgaggggaccagggagaggctgttgcagtccatcaggcaagagattgtgatgattgggcccaaggagtggccctccctcaagagaagggctcacctttggggaatatctcaggggtagattggacggaccttgggcttggatttggggtacatgggagatggaggcatccagcccagaattggaaggtgtggagctctctgttcccctctctggtttggtggggaagtccaccaggccagggctttaggaaaaatagaatttgagcttagccttaagagtctggtcaggccaagcacagtggctcacacctgtaatcccagctatttgggaggctgaggcaggaggatcacttgaatctcagagttcaagaccagcctgagcaacatagcaagactcctcctctaaaaaaattgttttaaattaaccacgtgtggtggtgcacacttgtagtcccagctacttgggaggctgaggtgggagattgcttgagcctgggaggttaagacccacctgggcagtatagcaaaagcccatctcaaaaaattaataaaataaaagagtctggtcggtattttaatgggtgttgaagcagcattccaggcagagggaacagcacaagtgaagacatgaaggtgtgaatggtgtgtttggagctgaggctcctggagcccggaagggtggggtgggcctaggcagcagctgggcaatgcttccctcagacactgaaccacatcttcctcttctctgcccctccttttgtgtctgtaactgcagctcagggaataaggttgggggtgtggatggcaggccttggcctgtagccaccccagcttatatgctctgtgcttcttcctgcaggtgaaggtggtgagcctgaagcctgaggtggcccaggtcgacctgtacatcctcggccaagccgaccactttattggcaactgtgtctcctccttcactgcctttgtgaagcgggagcgggacctccaggggaggccgtcttctttcttcggcatggacaggccccctaagctgcgggacgagttctgattctggccggagcaccagaccctctgatcctggagggaccagagtctgagctggtccttccagccaggcctggcagccagaggtgctccgggattgcaaactcctcttctcacctgccaaagatggagaagagtgccagggacccctcaaggagggagacgctccatatcccagggcataggacttgcaggttcctaggagcaggagcatctcccatcgcacgtgctttctgctcttctgggaatttctcacactggcaaagcagtccagcctccgtcttctggtccactctgctctgagcagcctgggatgctgaactcttcagagagatttttttatagagagatttctataattttgatacaaggtcatgactatcctagaactctctgtggtttttgaaaatcattgaattctattaatgtaggtacctaaagtgaccttaactgaatgtggatgaggctggggctggtgtgggtcttttggctgcttttcaaggtgtcccccaatgtggccctcaagagccatccccactgcctggccagagccattgttgtcccctacttcctaggccatttctggggcttgggggatgaatgctgtcctgtgctgtaaacactatgcaaatggaagttatcggttgtggtgctgtgcagcgctctgtgggcgactaagtgccactcacgcagcatgttcctggcaaggagcacataccatcaagccacactatcatggtattgttctcacagtcttttggtggttgatggccactgcaaacctggcaccatcagatctcttctgatctcttgccccagtggggcctggttggtagaatgttggcattcggttgatatccaaagcctgttctcccagccgtcctcctgcagctggagccttcaggccgtattctcacgagggaacgtttgccaaggctctgacctcacagaagatgcccagggcccagaagccatcagaattatcagtggagaagcaccttttgactcttcccttccaatgtaatctctgccaacaccatgaggcttaaggtgctctaagtcatgagtgttttggtctcaaatgctgcagttttaataatctgtgactcctgagagcccatggttttttgaccttgtggttctaaaattccttgtctgacccctgtagatcttttccttgccatgtcacctcccttggcctttgatcctggaaaggtggcagagcctccactgagccaggcccagagctccttgcagtgccttcttccttgtttacctgtgggaggaaacactttttttgtcaggggcagcctggttcagagctcagaggtcacactgtatcaaagatctcaaacagcaaagtcagcatttgctgtatagagctgccacccaactctaagcaggagaaactgtacagaaagggctttgctatttttcccttttgggaaaacaatgaagtgttttaagtcctgggtggactgagagatggtttgcctgtccagacttgctctcaagcctcatccagagaaggagctgcagatgagggagcccgtacactccctgccaccactaggttgtaagcctgtagctggctggctgatttcattttggaattcatttgccatccacagccttacactaggcacacactttagagtctggggctccagtggggcccgcctaattttttttccccccaagacagggccttgctctgtctcccaggctggagtgcagtggcatgatcatggcttactgcagccttgatctcccaggctcaagcgatccttctgcctcagcctctctggtagctgagactgcatgcccagctccaaatcaccttgattcatatcagcagtaataatcacttgtgttctgaaagaaagggcaccagaagttctagcaaaattcagttgtgttctgtgagctagcactttttcctctgaccc

SEQ ID NO: 9047 - DNA, 6000 bp, Homo sapiens
tttaatgaaagataataggcattttccactctataatatattcgtgattatcttaatataaaaataaccctctcaaatagttttccctgaatcttcaagtaacgttggttgtctgagaaacactctggtttcccctgtccctgcggacctaggaagcgccccctgagagtgggtgactgcagaccccacgtggtgattctctgctaagttccgtgctgcagacgaacgtggggtgtggccagcagcgtcacccttgtgttctcggaagctgggatccaagtctgaggctcctccgtccttctgcttgaatttctccaagaaggataatggggaaggaggtcggaggaggagaggtcaggtttctaggacggcgatcgggggtctgtccctggagggaggaggcgttctggctccaaagcaagggttcagaatagggctgagggcctgtcccttccaccttcccttagtccccctagtactgcctcttgtttgccttaaagttccccatcctaaaagcattccatcaaagtcttggggaaagtttcttatgaaaataaagatgctccacttcccagtcccttgagcaccaggattttgtacatcaggagcccaccatgtacatcaggagtttgtaatgcagcaaggcaagcataattccttggactcaagatgtaaaaatctggctgggtgcggtggctcctgcctgtaatcccagcactttgggaggtcagggcaggattgcttgagcccaggagttcaagaacagcctgttgcgacatggcaaaaccttgtctccaccaaaaatatgaaaattagctgggcgtggtggcacgcacctgtagtcccagctgctggggaagctgaggtgggaggattgcttgaggttgatgctgcagcgagctatgcgtccaccactgcactccagcctgggtgacaaagtgagaccttgtctcaaaaaagatgtaaaaattcatggccacagagaaggtttacagcgggggaaaaagaggttaaaattaagttttgttttttgttttttttttgagacagagtctctctctgtcactcaggctggagtgcagtggcgcgattttggctcactgcaaccgccacctcccaggttcaagtgattctcctgcgtcagcctcccaagtagctgggactataagcgcccaccaccatgcctgagctagtttttgtatttttttgtagagatggggtttcaccatgttggccaggctggtctcaaactcctggcctcaggtgatccgcctgccttggcctcccaaagtgctgggattacaggcgtgagccaccatgcttggccaaaattcagatttttaagaatctaaataatggtattccacatacaaaaaccctagtgtttctgtactcaaaagtagcgtgtatactgtcaaggttagaaactgacagctgtcctaggcctagagggaaaagcatgggttctgagtttcagaaggacatttgccaatatagcaaaggtgtgcccacacccagtatttttttatgaaaaatttcaaacctacagagaattgaaataattgtatatcttccatctcaattctacagttacccattttgctatatttctgtatcacataactttccattcttccatctaacttattttttatggctttctaagtatattgcaggcagtacccaccccaagcactgccaagtgtgtatcattaactagtttgtttactgcttttggaggatgggtaagatttacatagagtaaaatgcacagatcttcaaagtgacaaatgtgacccctgtgtaacctcacagccgtttcaggaaagctgctgctgcttcccagtcggcccagcccactccccagaggccaccctgttctgatttcctccaagtatgatttctgccctctaaggtacagctctcacctgggctccgtgagcagggccggcgtttcagggaagtggcagcttctcgggaggtgccgcagctgccatctcccgtcagcactcatgcctccgcctcagccctggccacggctccctggaattctgatcctcctctgtgagctggtattgctgtttctccaaaaattaaaaatgctcaaaggattataggttttctcctctttcgtatgtttggctctgagacactgcatgttggcacgtttttcattgagaatcctgaaagccacctttccataccaaattcccatctgtctctaccaaattaccagaaaaagaaaaaatgagaaatggaggtctcagattccgtcatcacagcaggtagaaatcaaagtcactgaatccatcaaattagtaagcataccccactgtcagtgaacttcagctgatcagttatgtattgagaaggcaaataacacaattgcagaacatgttcaaaatactagtcctactgctatggtgaacaagctcaatccaatcaaaagcacctttattttggtctctcactgtctaaatttactctctagggcttgttctcccgctgtccctaggtgagatgtagagcaagccctgccctgggcagatgaagtccccgcccaacacaggaactactccttccagccgcgtttggagagaggccgccccttccactgtgggcccgcggggaacctcgctctctgcagggggagagcagcttatgtttggcctcggccttattttatttgcccacttggtgctgtcagctctctttcccaagttgctgagaggggcatgaggtggggagcagaaattcatcgttcgccgatactgctgtgaactggcttcggccgtggtgcattttcatgcgctttgacacgcatgccccctgccctcttctgttggtagctccctcactttgaagggtgcgctccttctggccggccctatctttggctcctggctgtcggggtctcccctctacacactctcttctgttgagtcgtggtgaagcagaaaccccaccgccttcctccatgggttacgataagattcatagcctctcggtggcctctaaaaatcttcctcgaacttccagctcctttatagaccacattcccagcagaagtgtgagctcgcttgggaccacctggtgtcacagtccaggctgctgctggtcctgctcctctacgtggcaatcggcccagagaatatgccttggggggtctcagcagaaactaagatgaaggtaattcaacttcaactccctagttcacaagaaatacgttagctgttttccctaaaaaaggctaggtgaaatagggaatttcatgattttttgtggggggcagggggggtacacaatctccctcttttcacccaggctggagtgcagtgagtggcctgatctcagctcactgcaacctctgcctcccaggttcaagcaattctgcctcagcctcccaaggagctgggattgcaggtgtgcgccaccacacctgggtaatttttctgtatttttagtagagacagggtttcaccatgttgctaaagctgggatccaactcctgggctcaagcaattctcccacctcagcctcccaaactgctgggattacaggtgcaagccaccacgcctggcatatttgatttttaaatactacaagtatttgggtaaaaattaaatttaaaaagtttgcaataacctaacaacaggctataatatgataagccaggggcttcccagcccttttctaatgaagtaactgaagaatgaggagcgttatctagaagtcagggcgaatctgccagagtcaaccaaagacagccccctgcaaacatgaacctgctctctagaaatgtacacaggtttgcgtcccggtggctccggggagaatgtggagccgagtggagtcaggagcgcaggcagccaggggagaactgatggtggcttgggcaagggcggtttcatggggtcggaaggggggattctgaagggagaacgccaggacttgctggggagggttggaaagtaaggaaatgagacatcaaaggagactcctccatgcctgcttgggcaaccaggtgctgccatttactgagaggaggctgactggggacctttgtggggaaagagcaccagcaatttggaaatggcttaatctgagcctgtgagatacccatgtgtttagaaagaatgtcggatggactgttgaatacccaactctgccaggccttgctagacataaggatatggagctatcagcctgttactggtatttaaagccaagaaggttaggtgcagtggctcatgcctgtaatcccagcactttgagaggccaaggcgggagattctcttgagcccaggagttcgagaccagcctgggtaacgtggtgaaaccccatttctactaaaaatacaaaagacagccgggtgcgatggtgagtacctgtagtcccagctacttgggaggctgagatgagaggattgcttgagcctggcaggtcaaggctgcattgcgccactgcactccagcctggccaacagagtgagaccgtgtctccaaaaaaaaaggttgtggaggctgggcatggtggctcacgcctgtaatcccagcattttgggaggccgaggcgggcagatcacctgaggtcaggagttcgagatcagcctgaccaacatggagaaaccccatgtctactaaaaatacaaaagtagccaggcgtggtgcacatgcctgtaatcccaactactcgggaagctgaggcaggagaatcgcttgaacctgggagatggaggttgctgtgagtcaagatcgtgccattgcactccagcctgggcaacaagagcgaaactccgtctcaaaacaaaacaaaaaaagcttctggagccccagttatcacgttcaagttccagatggcagctgatggaggatggggatggcaaaggatgtaccttttccctttaaggcaatttcccaggagtcccatagggcacttcctacttaggcctaattaactgaagttcagccacctgccactcctgactgcatggaagccaggtgcaaggagaaaggattttgaggaggggtgagtcaccagaacacatttgtttgctgcggagagatcgtaaggggcctcggagcaagtccatggggcgtgaggagggctggcgtcctgcgcacagtggaaggactggccttaggaacagggacagtgattccactcagcatagccagggagcggcccagatggcagggcaaggtctctgtggagtgagggcagcagggaaggtgcctcgcaggagaggagagaaaacatacacttccctggggacgcgggcggggagtttgacgggttcggcaggtggcccttttgcagcatctttttcagccgggggtgcagcagtcaccatacagctgaactcggccaggttaaggcggcagaagaaagagggagttgggacttttggaagtaattatgatggctgtggagtctgtgctgggtgaggaagggaagtgactggatagagggtggcagtggaattttttttttaattaaaatttttttcttccccaaccgctccccaccttttttttttttttttttttttaaatagagacagggtctggttatgttgctgatatggtctggctctgccccacccaaaatctcatcttgaattataatccccataatccccaggtgtcaagggagagcccaggtggaggtgattgaatcatgggggcggttcccccatgctcttcccgtgatagttctcacaagagctgatggtttggtaggtcctcctgcgttcattctctctcctgtcgcctagcgaagaaggtgcctgcttccccgtcaccttcctccaggattgtgagtttcctgaggcctccccagccatgcagaactgtgcctcagttaaacctcttttctttgtaaattactcaggctcgggcagttcttcacagcagtgtgagaatggacaaatagtttcccaggctggtcttgagctcctgcggcctccctaaacgctgggattgcaggtgtgagccacc

SEQ ID NO: 9048 - DNA, 6000 bp, Homo sapiens
ctttgatattaatttaatgtggcctgaaccccaaggagctacttccagtcttgtgggagaggaggaagtaacaggtgtgcctaagcgggggttccccctaagtggaccctgaaacaggcacttgagtgcaggtagtttatctgagaggtgatcctagtctgcaggagggaggcagaggaggagggaaagtcagtcagatgggcatttgccagcagggcaccactgtgggccactggagctccatcttgctggggacgttctgaagaacagtggaaagcgtgcctgagactgtctccctgaaggctcggaggctgcagcatttcctctgtgactcttttccccaagggactgaaggttctgctgggggccttactctcctgcatttccaagccgtcctgtgcttggatgggacaagctcttgcaacttcagaaaatgccatcaggcagaaaagtggagagacctggtgggtgcttgcagcagaccagagttcaggagctgtccaccaaggctgcagcagaattcaagatgggcaccaacagcatttgctttgagacgtggtgtgtctttgtcatcataaagtgttttgggggtataaaaccaggaatgagacatagaatgagacatagaagtcaggggtgatttccccagaataggtgacattcgagttgaattttgaaaggtgactacacaatgggagaagaggcatttcaggtaaaggctgaggtgtgaaacagcttgttgtcttcaggagaaactgcagagcttgtacctgagtcatggggtttggccaagactggtttggtacaagctcaatgtcatcattagctagatatggtcattatccggatttaatcattatcaaattacagacctggtttatattccactttcactgcatctctgtggacctctccatctctttttctgtctttgtctctatgagtttctctctctctttttaaaaatacatacttcagatacacacaagtgagttaaactgagtccttggttcatgacatgccttcagcattggtgcatcaagtcctacagtgtatataatacaagatagtagaaagcataatctaacatatgcaccttgagccactgctcaccccaagaactagaacagaatcagtatctgacatctgcctctgtgctgcaccccatcccatcccccagctctctgctggaggtcactaagattctgaattttgagtttatcctcccctagtttccttgtttttagtgttattacatgcatgcatacctaattaatatgtagtttgtttttacttgtttattaattttatgttaaaaagtgccatactgtatatagtcttgtcttttctttttagctcaatgctgttgatgagcatgtggccatgttgctgtatgtaatcatgatttatttgttctgaaggctgtatgtgactataccattatttatttctttttttattctcccgtcgatggacagtcaggctgtcttctggtcttctgctattgcaaacagtgctgtgtggctgttcctgcgcgtaaatcctaaagctctgcaaaatgcagtctgggcatcctcagcccgggcatcacctggaaacttgttagaaatgcagagtctggggccctgccctagccccgccagaactgaatctgcattttaacaagacccctgggggattcactggcttattcacgtttgagaagcactggccgagtgtacctctgcatgggtttctcttgggcatacacatcaggagtggaagtgctgggtcgcagtgggtggcccagatcaccctctcggccgcagcttcggagctgccactgagctagagcttccccagctcttggtattgtcccacgttctcattgttgccagtcgactgggcgtgcagtggcatctcatcatggtcttgacttacatttcccccatgactaacgaggtcaggcacctcctcgtatgtttactggccatatgtttccccttctgtgaaacgcctgttcctgttttttgctcttttttcttttaggctcactctactcaatcctgcctttgcatatactgttctttccatcagaaatgccttcccctttcgctaccctgtgtcagttcttccaggaagccctctctgattgctgcttaggttgtgagcctcctcagcctcacaggcaggaaaactcggtgtcattgtcccttcattcttctcctgaagtctcttcctcactggagagactgtgaacctatatggcttggtttgcatagagttaacaattttttcactctagttgccattattttcagggattttctgaagttttacatttcagaaaatcttaactgctagcttctcttgaaaaaataagatatggctccactgtctccttccctagatggcaaaatcagctagtgctgagtaggggctgcccctgctggaccatgtgtcacagtccccacaactccaggctcacaacttgcttaaacaacctgtccaagccctgtgggcatttgggtttgtgacccttgcctaagcgtgcccaatgcttgttcctctaaaacttgcccttccttcccctcctccccataaccccatccttgttcccactcagggctttgcatctctcccctgtgccatcacactagcctccttgacattcctttctctagtcttgcctgttccagtccactgccatgtcacactcctgctcaagaaccagcaatggcacccccttgccttcccaggcaccacctgactttctacaaaacaaaaaagtattacaataggaatattttatgtccacaaaaaagtctagagaacaacatgacaaacacccatgtgctcaccaccccggcttaagacataaaccacttcaagtatatttaaagcccttactacaacattcccttccctctctccctcacggtcactactctcttgaatttgctgtctatcactcccatgcatgcttttacacttgtattacatatgtatgtgtcgctaaacaatatatggtattgtgttgtgtgttttcaaactttatgtatctggcatgaaattatgttttccatctgcaacttgctttttccatccaacaatatatatttttattttaaaaattgtattgaagtatagcattcatacaaagagcacacaaattgtaagtgtacaaccctggattttcacaaactgaatcaacagtgtgtttttgagattcagcctcacaatgcataagcttgcaatcacctattttgaggattgtggatcacagacagttttccattgtctgaatgtgttgctatttatccagtttccaaatgatggacatttaggctgtgtccagcttttcactattacaaacgatgctgctatgagcatccttgtgcaagcctcccgggcccccatgtgaggtgttctcgagggcaaagcctgctcatcttcaacctgatcatatatataccgccaggtcgctgtccagcccctggctctcgctggctcccagctcattcgccaagatcttcccactgctccagggagcccactctcctccttgctgacaccctgcccaaacatgccacctctttgcctgctgcatgcaggtgttaaactcacctttccatccaggctttactgaagccctgcctcttccaggaagccctcttgggcagcgctgggcctcagggtgtcatctcctctgagtgacctcctctcaccccagttgttagagccagagaagatagagacaaacccagaccagacactggggaaaggggaatgtgttctggagaaaggaaatatgggtagactagtagggagtgtgagaagctggggtacgaaacagattgctctgggccttgatggatgagtaggagtttgtcaggtagagaggtgggagggcatggcaggcacagggaaaggcagaggctgggcactgaaacagtcatcactgggttggggatgtgagcagggtgggtgggtggtggaggagactggaacagggctgtgaggagccttgcaggccaccctttcacgccattctgacccttctgcattcagaggcattctctggagatggctgtgtgtgggagccagagaaggcaggcacattcatttgacacctactgaatgccaggcaccggtaaagagctcatacccatgatctctttggtttctcacccaagttggggatagagactcgtggtgtccccattttacaggtggaggaatggggctcagagagggacagtcttttgtctgtaaccacagagccaggagaggcagggctggtacgcagttcaggttcatcccactccagagactgcatttaacccccgttcagccagaggctagaagacacctgggagagggttctgcggaagcaggtcaccgggagggggcacccattcctagaggcaggagccccaagttctcgggggtggggtggttcctgactggcgcggtgtgacccgggccagtctcgttctctctgggcctcagtttccctcctccacggggcggcgatggtcaacacaggttcctgccggcccgccccgtagcctggggttccaggctcccgtgccaccgcggcccgcgctgtgtgaccttgttccagtagcctgccctctctggactggcggccccggatttccaagcgctcttccggatcgcgacagagcggtcgcccgctgcggagaccctcccccttcccccgggttgcgggggcgtgggtgggggtggggcgccaggaacggcgcgggcccccccaaggcccccccagccccgcgcccgcggcccgatccgcgcctggttttgggcgcagccgcacggccccctcccccgcgctcctctcccctctccccgccccctccccgccgctctcggggagccggggccgcacggctcctcctcccgcagccgcatctggggcgccgcgccggccggaggagaggcatggggcgcccgcgggccggagccggggcgggggccggggcctaggcgcgcggacctgcgagcggacccgagaggcggcggcggcgcagcggaacggcagagcgggccggaggcggccgaggcgcccggcgcaggtgagggcgcgggggtggcgcgcggcggctcctacccccttcccgggccggcgcgctccgtccctcggctagaccccccgatctggtctcctccccgacagacctccctgaaccgggggacggcgctggcgcagaaaagccccctcccctgccagttctgtcttccgatcccgggtccgaggggccggctgtgcggctgggaagcgccttctccggttgggatcgccccatccatgtctccccggaccctcaaatcgggggcggcggcaccggggcccggaacccctgtccgggaccggatccccattccggctctttttcccgcggactcccccgtaccccatatcaagcggctgccaaagcctggaagccccctcctcaggcccgccccctaatccgcagggcggcctgggggtcaggcggacccctcccgtgcccggccaaccttggcgcttgggagagcagggctatgccggcccgggcattcctccattcaacccagctgcctcggatcccgtctcggtagacccgggagccgccggctccccccttcccgagctctttccctgacctggcatctggggagggggcgggggcagcacccccctcccgcgctgcatagcgccccctccctgtttgcgtccctgggaggggctgggctgacccgggcacctgggctgggggggcactcacatggctaccggaggcccccacgtgcggcgccccgcggagacaggggttcgcgttcagagctggtggcggatggaccaggtggccgcggggaccagctgggtccagatgtgctgggcctgctggaaggggacaggtgctacctggacgtgtaatggcccttggtctcttttggccgaacctgccgctccgatccccctccatcccttcatccctccatccctccatccct

SEQ ID NO: 9049 - DNA, 6000 bp, Homo sapiens
cacccaggctgaagtgcaatggtatgatcaaactcactgcagccttgaactctgggctcaagtgattttcctacctcagcctcccgagtagctggactacaggtgcaaactaccacgcctagctaatttttttttttttttgagacgtggtcttactctgttacccaggctagagtgcagtgacgcgatctcagttcactgcaacctccgcctcccgggttcaagcagttctcctgcctcagcgtcttcagtggctgggattacaggcgcgccaccacgcctggccaatttttgtatttttagtagagacagggtttcaccatgttggccaggtcttgaactcctgacctcaagcaatctacctgccttggcctcccaaagtgctgggattacaggcgtgagccacagcgcccggctgcccagctaatttttttagtttttagtggagatggggcctgtctgtgttgtccaggccggttgtaatttttttttttttaacacttaaactgctcctttaaaacaatattttttttgtcattttatttgtgttcaccgtttcactgcaaaccctgaaggagggtgtggagcaccgttctggaatcccgttcgttgtttagcaagaggttggtgataccaaatccccctttcaaaacagtgagattgtttcccaggtttttttgtttgttttttgtttttttgctgacaaccagattttctgtaaacttaaagctttgttaaggacagggttcacaggcaattgacattccctctctgtccctcctcacaccctccctatattcacatggtcaatcatcagtgactctagggctgacattttgtacacactttgtccagtgcttggcccttttgggcctttgatttcaggtgacatattttgatatctgcttttaatccctcatggggaatgcttctccagtcaccatcatctcatgccatgatgccactgttagtgcctgtgccttactttgatgctaccttctacaaaaaaaattcccatttccttccaagcagaagggaaaatccccttcctcaaaaccccagaaccccaggaagaagtacaagggaagtacgtccactttggagtcagacagacttaggtttgaacaccagctatttcattccttgtgtctgactttggccaaatttctaacttctctgagccttgcctttaaaatgaaacccataattcttacatcaaagcaactgacaggattaaatgagataataggtgtgaagaccctagcgcagtgcctggttcttggtgggcgtgtaggaaacggagttccttttctggaccatttgtttgttaggtccctaacaaacaggtcccccttcttagagagtttgttacttccttcgttgttgttatttgtatgttaggtcataagcttttttttttttttttttgagacagggtctcactgtgtcatctaggctgcagtgcaatgcgatcatatttaaagctcactacaacctcaaactcttgggcgtgagcgattctcccaccttagccttctgagtagctgggactataatcacatgccaccacacccagccataagctttacttgcagtgcttagagagcctggcacatggtctgtacccaacggagttaataaaggatgaaactatacttttgtgtttctgttgtcttgtagaaagctcataggtaggaagaacatacgctttggagcagaaagaactgtgttcaaatccattcttctactcaacctctgtgaccatgagtgggttgtttagcccgcctaaacctcagtgttctcatatgcaaacctggagaatgtctcgtagggtcattgtgaaatccaactggtaggttgccttatattactactaatttgcgctattaaaggcaagctgatataaattagaactcttctgaatgggccttctatatttaaatgggctttttctaggaagtgtatatttgtaaacttgtcttgaatggaaaaaaagaaaatacttgtagatttgaatgaaccacctgagaagatctcattgtagtctgtcataaatcaatttctctgaatcatctgctatatattagcaagataagatctgctttcttagtgttcgaatacagtactatgctccagagaaaaagaaattgctggctggggaataagtaattaaagccagtgacaaaactttctaaaactcagtggattaatttcattctaaaacttctgaggttgttaccagcacggcactctctcattccaaagagaaaaaaatgatatcttaattgagaagttctttctaggctatcttaactgccttttctgagcacagcgtttatcacgggcagatgtgtgatttttgtcttgtttggaaattcaggtttcattttctcaagtgtatgataacagcaagcatcccataggtgtcgttgaatactctggggcttgtctctctgtaaattgcgactctgctgttttccaacttgtcatcttaatggaatgagtttcccatggagagaatctaaattgttatgttcttgacataagcagacagattcttgctctacattccctgacatattgacttgataagtggtggttttacacaagggcccagtcatctcttaggaattaggaaaccattcggggtggaagcagcaatctgtttaaccaccagggggcctctcctctcccagtttcacccagaaaagcaccatttatattttccaaattatctgtattaagataatagaatctaataagtcttacatgtatacatctatcatgttccatcttaaaaagcttatcttccagaattatagataaaaatatatgaataagccataaaaaagaatgaagtgcagatacgtgctacaacatggatgagccttgaaaacattctgttgagtgaaagaagccagacataaaaggacacagattgtatgattccatttctatgaaatagcagaataggcaaatccgtagagatagaacatagattgctggttgctgagggctaaggggagacacaatggggagaaactgctcggtgggttttatctattttttttggagacagggtctcactctgtcacttaggctgagtgcggtggtgcaatcacagctcactgaagcctcaacctccctagctcaagtgatcctcctacctcagcctcctgagtacctgggactataggcatgtgccaccatgcccagctaatatttaaattttttgtaaagatgaggtctcactgtattgcccaggctggtttcgaacccccaggcttaagtgatcctcctgcctcggcctcccaaagtattgggattacaggtgtgagccaccgtgctcaaccaatgggttttattttagactgatggaaatatttgggaactagacaggtggtagttgcacaacattgtgaatgtagtaagcacccctgaattgtttgctttttaaaatggttaattttatgtgaattttgcttcaatctttttttttttttttttttttttctgagacagggtctcactctattgctcaggctggagtgcagtggctcactgcaacctctgcctcctgggcctcagcctcccaagtagttgggactacaagcacacgctaccatacctggctcatttttagtatttttagtagaggtggggtttcaccatcttacccaggctggtcttgaactcctgggctcaaggaatttgcctgcttcagactcccaaaatgctgggattacgggcgtgagccactgcgcccagcccaatgcccacggttcttcttgccagttctgttgcctgggttgccttctcagctgtgatgatcttttccaggttttgtcacatctgtcctaactggattataagtaaactccttaaaggctgagaccaacttgtacttctaaagaacaagagtaggatatttgtgaaagtgtccaagtacgggaaggggtgagtggatgaaacaagacttgccattcattggggttctactctttaccttccagaacagtccaggctctgcagacagcatcccacctgtcccagcaggctgacctgaggagcatcgtggaggagattgaggtgtgaatcttttgccaaatgcatctcccagctcctgtctttgacactctgcagaagaatcttgcagatagccatgcatgatctgttactacaggttacattgcttcttatatccatggcacacttgtgttctttgtattaaggtattgtgtcctgaggaatatttgtgcctattacataataggtcctcaggacgtggtgactgtggtttttattattgctctatccttgcctttgcccagaatatcatgctcctctgggacctctgtcatggactgcctggcaggagtgacaagcagtcctgatggtgttctcactggatgcttcacaggcacgttggttgcctagtcatgttgcctaggagagcagtatgtctctctttgtcttttggagcattaagaaattctgggaaacgctgtgctttgtaggttgtattcaaatggatggccatggactccatctgtgtcatgatgcttcctgggtgcacagcagcctggcccactggctttccacccaaagcagctggcgtgttctgtgccatgactcctgggcttgggcctgcatacaaggggccaaggaaggagccctcccaaaactgcagaagatagtgctctcctcaaatgtctgtttgatatactttactctgcctaagcaccatttttgagaaagtatgaagtgactgagatggtcttcagatttagagtgagagatgtcacgaagctgtctgcagtggggttgacagtggttcgtgcatctcatttctgctgttacttgacatccagcatatttctgttttgttatggcaggaccttgttgctcgcctggatgaactcgggggcgtgtatctccagtttgaagaaggactggaaacaacagcgttatttgtggctgccacctacaagctcatggatcatgtggggactgagccatccattaaggaggtacctatctaacaattttcaggcatgaaacccaaaggggtcatcagctgtatctgctaaggatggcttttatcagagaggaatgttcagacagtaccttgggatgctgtcactcagtgtcctgggttagggattaagaatgagaaatagaaagatgtaatgcctgtcttcaggaaatgggttgctagtgaggtagacgtgtaaacaaaccatgcttgctttaaatggggtatgtacatgtcacgaggtagtatcaaggaagccacgtgtattactcctgtttcatctccctttcttcccagtacccttttctgcttgtcgcctgaatgctttccactctggtggctcattcagatccttctctgggctcacaattgcttctcctcccttcccccttatgctcagcaacggctaaatcttagctaatctttgctgatggacatagttcactgagaggcatgtgtgtctatcacacatccgccaagagttcattctttttctcaagaggaggttgttaacctgaaagaatctttagttggaatgcatgtgggaagcctttttgagtaggaccgtctttgtaccccttgtttgtgagaagttaccagcccttaatctaaagtacttaaaatacaagctgcttttatttaaattttaggaggagagatttgggttttaagtgagaattttcatttctttatgcattatgagttttgtgccaagtttctttaagtaaatagttatctgtcttggataattggaattaatttcatattttctccatgtggtcaaataagttattcatgtgtttgcattctttttgtgtctcttcctttgtcctaagtgtaggaggtctagaaatatactcccttttaatttctgttatgggtgaaattgcaagagtgtggggtcttagggtacagattgtttgctgattgtcctatacacagtaaagtagatgaattaatgatat

SEQ ID NO: 9050 - DNA, 6000 bp, Homo sapiens; identical to SEQ ID NO: 3351

SEQ ID NO: 9051 - DNA, 6000 bp, Homo sapiens
tctcattctgacagggtcactcaggttagactgcaatggtacaaacatggctcactgcagcctcaccctcctgggctcaagtgatcctcctgcccagcctcccatgtagctgagccacaggcacgcaccaccatgcccagctaatttttaaatatttgggtagtgatgaggtctcactatgttgcccaggctggtctccaactcttaggctgaagccatcctcccacctcagcctaccaaagtgctgggattacaggcatgagccactgcacccagcagggatttttttctttttaaactaatagattttttttttccgagcagttttagaactctagaaaaatgagtggaaagtacagatatttcccatatacacccccctccaccctggtttcccctgttattaacaactagcattagtgtggtacatatgttatcactgatgagccaatattgatacattattatgaactaaagcccatagtttacatcgggtttgctctttgtgtcgtaactcctgtgggttttgacaaatgcataatgtcatgtgtccgtcatgatagtgtcacacagaatgctctcgccacttggtttaggtggttatattagacagttgagattgtgaacaactggtgaaagagaccagggctgtcccactaaacagccctggtattctacttacgcttcctccccaaactctagcaatcactgatcttctactgttttcataagtcttgcttttccaaaatgttatatacgtggaattatataatatgtgatgctttcagattggtgttctatatggtttttttttgagacggagtctcactttattgcccaggctggagtgcagttgtgcaatcttggctcactgcaacctctgcctcctggttcaaacaattatcctgcctcagcctcctgagtagctaggattagaggcctgcgtcactgcgcctgtctaatttttgtgtttttcttttagtagacacaaggtttcaccatgttggccaggccggtctcgaactcctgacctcaagtgatccatccaccatagcctcccaaagtgctgggattataagcgtgagccaccacgctcggcctgtacatgtttttttttaactgtctagatgatgccaatgtgcatccaagatgggatcagtgtctcagatctttgccactctaagcatcagcaggaaattcttagaagtgccaaattgcaggccccaacccagacctattgaatcagaatatggattttaacaatatccctaggcaactcacatacacatcaaagtttgagaagcactgactaggaccaccaagaaacggtctctccatgacatggcatcagtctgcctgcatagttcagaaggagccattaaaaaaaaaaaaaaggttggactcggtggctcatgcctgtaatcccagtgctttgggaggctgaggtgggagaatcatttgagaccaggagttcaagaccagcctgtgcaacatagtgaggccctgactctaaaaggagaaagcgaagaaatacacactcataaatggaaacttactatggaaagtgttctttgccttatcacatattaccatatatatatataacatatatatgttatatatgttatatatgtatgttatatataaatacatatatatgttatatgtacatatatgttatatatgtacgttttatatatatttatatatgtatgttatatataaatatatgttagaaaactagattataaactagattatatatatatatcttggacatctttccatgccagcttgtggagaattccttcattctttttgccagctacagagcatgccaatagaagtactggccacagtgtcctgcttgcccaatgatgactttcaggctttgcactaatgagagagaaaatctgtgaaatgggcttgctggtgcaaagtatacaatcttttctaaaaatttttatcattattattgtttttattttttactgaagagctggggagagaagaaaggaaaaaaagaaaaaaatttcagtgaaggatgatgcaaaactgtccatcaaagagactgtagcaatttacattctcacttatttccccatacccctgccaacactgagtaataacacactttaaacgtatttgtcagtgtgatatccaaaagtgatattttgttgttttaatttttatagtattaacgattagtggggatgaatattattccaatgccatgtatatctatatattttgctgtgggctacatattagtatcccctgcctactatttttattgggtagataggcttttaaaaattgacttttggctgggtgcggtggctcatgcctgcaatctcagcactttgggaagctgaggagtgtggatcacttgaggccaggagttcaagatcagcctggccagcatggtgaaaccccatctctacaaaaatacaaaaatttgctgggtgtggtggtacgtgcctgtaatcccagctactcgggaggctgaggcaggagaattgcttgaacccgggaggcagaggttgcggtgagcagagattgcgccactgcactccagcctgagagacagagcaagactccgtctcaaaaaaaaaaaaaaaaggacttttaagagctctttatacttttagaaaattagtctcttttctgtaatatatgttgaaaatattttcctagtttcttcatgtgtcttttgaccttgttccctgttcatggtgatttttgctgtgctttaaatgttgttgcatgtatctattttttagtttatagtttttaggaagcagctacttttcaaactcttgttatccaaggattattaggtgtacaggatccctgggtaagaatctttgtgagatatgcttcatatacagaggaaggattacaagtgactgaaaaacccaactcaaatggacttacacacaaggaatttattggcttgtgcaactgaaaagtctgagcctggaaggatcctggacttcaaatgggtcatcaggatgcagtctctcttagcctttcttcatgccaactttacttgcaagcagacccttcaacatagtatctccccagccctcagcttacgtcattcttactacccacagttcctacagaaacttctctttcccagttgttctagcaaaagtcccagggttgcttcactgaagcaatttcagttaagaactcatccctgggccaatccctgtagtgaaatatgttgactagctaggccttgggtcatgatccaggccctggagcaaggccaggggtcggtcaactgtacggaaattcatagattgggggttccccaaaggaaaaccctggccccgatacccagggagagaaaacagatagaggaaaagtccaaacaataatgccctcagcagagagacaggtggatagtaggttcagatcttccagccagctggtaatgttgtccttctcactcgcagaaccccaggctggagaagcccgtgctactctccgaatttcctaccaagatcccacgaggtgaactggacatgcctgttgagaatggcctccgggctccggtcagtgcctaccagtatgcgctggccaacggggatgtctggaaggtgcatgaggtgcctgactacagcatggcctatggcaaccctggcgtggccgacgccaccccgccctggagcagctacaaggaacagagccctcagacgcttctggagctgaagcggcagcgggctgcagccaagctgctcagccaccccttccttagcacacacctgggcagcagcatggccaggacgggcgagagtagcagtgaaggcaaggcccccttgatcggaggcagaacttcaccgtacagcagcaatgggacctcggtatattacacggtcaccagcggagatcccccactcttaaagttcaaggcccccatagaggagatggaggagaaggtgcatggctgttgccgtatctcctagtctccgtgtgatggaggagggagatgcctggggaggggctcctggaatccaggccagcccaacagccctggctggggaggtgtcagggcagctggggagaggtgggctctgcttttcagaggaactcagaccccagccctcagctggctgcccatagcatcccatgtcccacgtcccgtggttctgcttcctgctgcatcgtctgccatctgacacaaggcctgtcgtggcctcctggttcactctgctgtctgatcttgggagggtgggcttgagatcccagctctattcttggtataaaggcttctccggatcagtacatgcatgtcacattaacacacacacacacacacatatacacacacacacaagctcgatcagtgtgtgtaggaatgacatacctgggctcaggggaagcaagggggcttagaatttgtggggtattcccaaaaggatggaagttaagactcagagtctcattaccactgccaatgtggttttagcaggggaggggacctgctaagctgagacccatagtcctgctcagagttatcccaaagtctgagccaccagccacacctgacaggggtgagaagtcctcgctgtgttcagagggagccaggaatctacatgggtagatgagatagacacagacctgctccccgcagccttgttgagagccacacttctgcccatgccaggagccagctgtgtgaccatccaggggtggagggggaaaaccaggcaatttcgttcctggaatcaaccaaatcatgttttcctcttggatggaagtgtcaaaggcagaagggtgtgggagggggacaaggtcagtatttaccaaagtgtatctgattttaaaaattcctttagtctgtaaaactcctagagggagggaggtaactgaattcacttctttttgtggatcgtatcaaggtcactgggttttactggctggtgctgggaaaatgaagctaagtgaggagcttccattggaatgcttttccagggagagaggccagttaatttaaaaaaaacagtcgctagttaacagcgacagagcccagcaccctggggtctttgtgaatatccagactgtttcagcccagcccatctcagccaaccctccttagactgagctgtcagagcaagcaattaggggccagcctgcctccacctcccacccccttccacctccatcagtcatgtgtgcagagtcagtgctcgggatcccgggcccagcttttgcctttttggggatgcttggtgagacagatttgccagtcagcccttttgagttcccgcctcacccaggggctcccagcctgcacttgcaggagtggtgatgccccaagtctgcgaatccagggtgcacgtggtcaatatcccctcctgcattcaggagagccatggtagggctagagttgggtcttgcccagccctgcagtttcatagtcccagccttcctggtgctggggagggaggactgtgaatggctgttctcccctcactgctgagtctcccaggaccccctttggagatgcccatggcatgggcactgcccacaggctcagccagaacctcttggtgtacccgataagctgcaggttatcccttgctctgtgcgccttttatttgtccttaaactacctccttagagctctgaaggggtctcctagttccagattttaatttggggaacagatctgggttctttttaaccctcttctttctcagtctatgagaaacttgccctgaggggcacctgggctaggggcttgggactggaagaccatccccgccttgtgccacaactttggtcatgggatctgctctttgtcattcttagccccctactgtggcccccatagccccataacccagagagggagctggacttcagggagcctgagtgatgctttcccaggagcagggcagctggctggaccagaaagtagagggcccatgggagtgactgcacccttggtggctgctggaaggggagaggttctcagcatcaggc

SEQ ID NO: 9052 - DNA, 6000 bp, Homo sapiens; identical to SEQ ID NO: 956

SEQ ID NO: 9053 - DNA, 6000 bp, Homo sapiens
ggccagggtcagcttccgtgtccttcctcccctgtaaactcctgggaaagggatctgctgacctacttcattctgagatgttaggaactgatggtttctcctcttgcaggtgcactgctgtaaggagagcaatgcttagcccaagccagtgatgctttctttaatgggggaccctcagacctaagcagggaaggttttgtagagagtggccccaaagacagaggatttggggtctgcatgtatgtgtgaggagtgggtgggaagaggggaagggtgagcggacagggcctggccctggatctcctcatcacatctgggctggacctttctgaatccccttcatcgcctgcaggtctggcggaagtgcaagatgcgtatcttcactgtggcccagatggatgacaatagcatccagatgaagaaggatctgaccacatttctgtatcatttacgcatcactgcggaggtcgaggtggtggagatggtgagtccccaggagacaccgctggggttccacctggccctctttcctcttggccccagcaccaagtagggcaactctaacacccatcagcttatgatgctggatcctttccccctcatccatctcttagcctctcacatattcagccatccctcccttctctataaaagtagccatgtctagtgcttattatatgccaggcactgttctatgcactttatatgtacataaattccaacaacgaccaatgagatagatacaattatcagcatttccatgttacagattaggaatatgaagtgcagagaagtacagtcacgtattcattgcttaacaacagggatatgttctgagaaatgtgttgtgaggtgattttgttgtgtgaacatcatagagtgtatttatgcacacctagctggtacagcctactacacacaaaggcttattgctcttatgctacagacttatacagcatgttactctactgagtactgtaggcaatggcaacacagtgggaagtatttgtgtgtctaaacatatctaaacatagaaaaaatacagcaaaaatacagtaatcttaagggaacaccattttatgtgcagtctgccattgacgcacatacaatggtgttatttggcatatgactgtaatttgcccaataacacagagtacctggtggaggcaggattcaaacccaggcaggctggctctagagcgtgtgcccctggtgattatcctgtagagcatcttgtccaaccatcctctcaattcatgtgtccatccacccatccctctgtgttttcattaatctacccatgtattcattgaagtattcattcactcactctcccattcattcttgcatgtattcattcatcgctttgttctttttcttctttcccttctccattcacccaggtgattaattaatccactcattcattagttcatccattcatatgcctggtcctgtgctgggctgaggagggaatgagctgcctgccttgcaagagcattgccctctctgctacgtccttgcctcctacaacccttgacaaaattaatgattgggtagggaagccctaggctgccagaaggacgggggccttccttccttcccttggcctttcacctgggctcagacctcatgctttcctccgtgttcctctccccaccccccaaccccaacctctgtctgcccacagcatgagagcgacatctcagcttacacctatgagaagacgttggtgatggagcagcgttcccagatcctcaaacagatgcatttaaccaagaatgagcgggagcgggaggtgaggttgccctggctggcccctgagagcctcaaactgctgccagttctgggtggcaggtttaggatgcctcagggctgacactcctggcatttcaacttcaccctcatctccctgattcccccaaccacacctcctgaaactgatctcccagacagcaggagtatacactgcagcttcactgccaacctcccagccaggaggcagagggactttggtatgggtgacagatcttctcctctgtatgtgacttctggagcctgagagagaagagtggatgctaaatacgtatggatgatgagtccttaggggtgtgggctgccagtgtgagggataagggctcatgtagaaacccttagagagtgggtaacagatgggtgtttagagatataactgatgtgtgggagttaggggaaaatcccctagggtgtgattgatgggatctcaggggtaatggtgataagcccccccatagggtgtgggtgtaagatcttctaggtgtgggtgatgtagaaccaccagagtatggatgaaagacccacccaagggagtggagtccttgggaaaatgagtggtgttaccccagctggggacagaagggctcctggaggtgggtgataagttgcccagggaatgggtggcaatcctacacatgagggtaatagaaccatgggttttgagtctcccaggggtgggtaatgtatttatcagaatgtggttgatggattctcagggggatgagtgatgggtaccactttgagatgggaaggatggatcctccaaggctgggagtgttatccaagggaggtagtaaaaatggtaaaacatggcatggtcactgaccagtggactgaggactgacattggaccatagtgctaggcagagccttgctgtgccaaggttaacccttttgttgccagatgaggtctggggttctggagaggaggtggggcaggcagatcagtggtgcagtagctatttggtctcaaatcatagcaatattttaacaactggtacagttccagaaagtgcatcctggctgaacatcatctctggtgatagctctttgcagggcatgggtggtgactcccagcagagctggcaccaacctatgtcactccctagatccagagtatcacagatgagtcacgaggctcaatccggagaaagaatccagccaacacgcggctccgcctgaacgtcccagaagagacggctggtgacagtgaagagaagccagaggaggaggtgtgcagcttgggtggtttggccccaaccagtgggagcagagcccttggcctccaaaggactcaactgccatcgcttcattcatccctcaggtgcagctgatccacgatcagagtgctcccagctgccccagcagctccccgtccccaggggaggagcctgagggggaaggggagacagatccggagaaggtgcatctcacctggaccaaggacaagtcggtggcagagaagaataagggccccagtcctgtctcctctgagggcatcaaggacttcttcagcatgaagccgtacgggcctgggggctaagggctgggggctggggtgagctaaagggtcttgctccccatggcagagcaagagagcagaaggcatcctggtctgtcagcctgcagacccagctcagacattgtcttggtttctccatctgaggacttagggggttgggccccattgctaagtctcagaattcccagttgcaggcagcggaaaggtgaagggtgtgggggctggcagagcaggactcagggcagatgaccatggcccaagcccccagtgtcttcctctttttctgactctgctctttttctttctctctttgcatctcttgtgtttcctgaagggagtgggagaacttgtaagtgcttcagcattttttcattctctctcctaggatggccagggtccctaccctcctcactctgttgtgaacccctaattggtgccacgacctctgggatctctgaatagcctagcctggagatgtttaggattggtggtcctaggcttgcaagaaccagtccccagcagcccagttcgggctggaagggcgactggctccaatcttctctacccccccggctcacgcggtctccactcctccttcctgccgcaggaaccagtccaacgtgcggcgcatgcacacggccgtgcggctgaacgaggtcatcgtgaagaaatcccgggacgccaagcttgttttgctcaacatgcctgggcctccccgcaaccgcaatggtgatgaaaactgtatcctggaattaaaattgggggaaagagggaggtggacgtcagggaatctgggtcctgtccctgggatggaagagctgagctgttcctgcctccggatcagcacctcggacagggacacgggcgcgagaggtcccctggcagccgagcgcgaccccaatttcgtcgggagggaaggagaccgggtctttctccttgaccggctctcagacatggagtttctcgaggtcctcacagagcacctggaccgggtgatgctggtccgcggcggcggccgcgaggtcatcaccatctactcctgagaaccaggacctgccacccgggcccgagcgcgcccggcccgcggctccggagccctcgccgcgccccccgccgctgtcaccgtttacatacagaccctgtgcccgtgtcctggccccttaccccgctgcctgaagcccggaggccacgcctgttggggctgattcggagagggcgccccgccgcgcagagaccagagctcctcagtgccagtttggcccctgggtcttcgctgccctttttctaagcccggcctcgtctcgccggaggagacgctgcaataaaggttgggagaaggcgcggaaaggagaggagctggggccttggggacccccaggtagtccatgcggcccattcctccccttcccactcccgccgcggtcctcgctctgcgctcctccggcgctgctccctggctcccggcggcccggaggcccgcggggtgggaaggccgcgcttgccgtctccgccgccccttctcgccgagccgtggggcgcgggcggccgagcctatacatagtgtacaggagacatcgcgtgtatttttaacgtccccatatttatgtgactagaagcgcaacagacttctcgccatagtcgagctctcccgctgggggcactgcggggaggcgaggcctcgggaagctgaattttccttgacgtccaagagtttgagagcgaaagtgctttaggcccaggcgggggtcgtggcctcgttccctcgacacctccgtcctgctctcgcctcttcgccctttccgcgcgcccttggcttcccaccctcctctccagtccttttccgagatgaggtgagacaagggtccaacttttcctggattcgcctcccagcggacgtgagcttccactgcggctgcagagacgcgagcaacctcttctcatcggctcttatgcaagttggggccaggataggggaggggtgctcctcaagaggaagaaaccgagaggcccgcgccccaccgaggaagccccgccccggtgccttcgctggggagcaggcgtctctcctcagtcggcttgtcgcctgctccccgtatcccatggctcctcgccaaagactgaaattgtggagctggagggcgccccctccccggagtttcctccctgggacaagtgagggaggagggggccgattctggtttaggggccggacccactgagaggccccagagccgcccgtgatgttcctcccccgtccccatctggcagctcctgtctcgcctgagggacccagccgccttctccgtgctctggggccgggcctcgctgcttagcagcggcctctagctccgtctcccggggacctgggcctgagggagggctggagtcgcacgcgctttgtccttagcgcctgtctgctctcctctaactaggacccagggcctttggcttccccagctcatccttggcccttccgctccaccagcctggtctgaggcgtgctctgtccttagagaaggcgcggtggccgggttcccttcccctagggcacattactaagggggtcaggcactgcatgctcgttccagcaccatctgggactgggtacagtacctccagccccagggccctgacctgcgcacctagcttgacatctcacgcac

SEQ ID NO: 9054 - DNA, 6000 bp, Homo sapiens
ctttaaaccttcctaccccctctctattacaggtttttgtactttaaaaaatgttggggagaggcagaaggggcatctcacacacacactgtctcacacacactctcacacacatgtgcatgcatgctgagtacagacagaagatgtgtcacgccgtcctgtgcattcaggacagtgcctaacacatcccgggtacttacggcaatgtttcacgaagaaatgaatgtctaaaaattttccattgcctgcaagtcacgccctcataaattcttttatttcagcttctttagtctccccaaaggttaggaagaaaaatgcgtggctcacagtgcttatagatgggtgtttttatcaaaacaaaaggaataaaattgtccagtaactgggtgttctctagaatgtcagaagccaaccgtggtgccagctaacccgagattgtccctgtgtctgaatgtcttggccctaccacagtcttgcagtagattctgctcagttctatagctggaatcctggctgcctttttatttttattttttggccaaaagtccttttgccaaaataaagactataaagaagagggccctcgcagagacagctgcagtcggtccagtgattggacagaatggggccaggtgtcaagggcatgggtgtttggccctgcgaggggctgtaggtggcctcctatcagtccccaccacctggctgctgtcccctctgcagcctccctcagcagctggaggtgggtggggcttgtttatcaggaagaaccgatgccctccacagccatcctggccgggggtggcaggactagtcagaaggcttcaaggaaacgggaggtcacatgtgctggccaaagaaaggggggctgatgacatcttccctcctcccctccagagcctggacattctggaaaagtgtcttcctttaagaatggtcattctggcaggacaggaaaggggagcctgctgagtaccacagaggctgaggcctggtggtcaccagcccagtcaccagtccatgctgccagttagccgtccctccctcctgagcctcagtcatccatctgtcaaaacaggagcgacaaaggttcctgggtcatgaggcagtgagggatttatgaaatgacgcctttgaagtggaagctcaactcctggctcagcagaagggacctgtcatcgggacactgagggttttcctcaaatgttctaaaaaatcttatgcctctaaaaataacagggtaaaagtgggccagctgcagagcccataacaagagctgacctccagccaggtgcgcatcacctgccgggacaagccccaggactgtccttagagaagtcttttgattaaagtgctctgttattgagaagtggtttttttccctcccctaatgtgggtgaggttggtatttttgtttctcccacacattccaggcttggtaggtgctcagtaactgttagcagatgtcccatgcaatccatgatttctgtacaagtcctggtagggcactgtgcaaaaatcgcccccactttgtgtgtttcagatgtcaggtgtaaatcttgattctaggagtaaatctgccatcgcttttgctgcattaattttgtgcgcaccgtccttttttgatggcatataacatggttgtcacatgctcaggctgtggccttggagggcctgggttctaatcttggtgacatcaggccaatgacctcacctcagcaagcctgtgttgctcctttgcaaagtgggaaaagcagtagtatctacctctgaaggttggcatgaggatggaaggagaaagggttggaggaccacctggctcagagaaaatgcttgataaaggatcattgtccccaagcttgtgagccctggtgttttagttactattgctgctgtaacagatgagcacataacctggtggtttaaaacaatccacatttattatcttacacttctagaggtcagaagtccaaaatgggtcttaatgcactaaagtcaaggtctcagcagagatgggtccttctaggggctcgaatccatgtcctgccttttccagcttaaagccgcttgcattccttggctcatggcccttgcctccataagccagtagcaccgcatcttcagctctctcactctgcttctgtcctcacaaccccctccccgacactgagtttcctgcctccctctcttcacttataaggacccttgtgatgacgttggtaataatgtagcccaggtaatccgggatcatctccctatctcaagacccttaatcacatctgcaaagttcttctgccatgtaaggtgacatattcacagatcctgggattgggacatctttggagtcatcattctgccagccatacctagttccaggcttgcattgcacttagtgactaagttggctcaaactcggctcactgagtaggaaaggggtaactgatccacgcctgtaatcctagcactttgggaggccaaggcgggtggatcaccaggtcaggagatcaagaccaacctggctaacacagtgaaaccccatctctactaaaaatacaaaaaattagctgggtgtggtggcacacacctgtaatcccagctacttgagaggctgaggcaaaagaatcctttgaaccagggaggtggaggttgcaatgagccacaatcatgccactgcactccagcctggatgacagagtgagactctgtctcaaaagaaaaaggaaaggggtaactgatctctcatccagcaggaaagagtataacattgcatgcgtgtataaaagccggtaatgactgcccgtgcctgccctaaagcacctcctcttctctgatttgtacacaggaccccagccaggccacggggacaacaggcagcagcgtcagctgcacagaggagaaaaagcaaagcaagtcacagcaactgaaaaagatttttcaagagtatggcactgttggcgtgtcattgcacattggaatctcattaatttccttgggcatattttacatggttgtgtcaaggtaagatttttgacagtaattaatatttgttttttactgtcatgtaagattctatgtgaataagaacgtgtttgctaagactttttttttaagacagggtctcactccactgcccaggctggagtgcagtggcatgatcacagctcactgcagtctcgacctccctgggctcaagtgatcctcccacctcagcctcccaagtagctgacactacaggcatgcaccactgcacccagctgatttgtttgtttgtttgttttgggggacggactctcgctctgttgccagactggagtgcagtggcgtgatctcggctcactgcaagctctgcctcccgggttcaagtggttctcctgcctcagcctcccgagtagctgggactacagtcgcatgccaccaagcctggctaatttttgtctttttagtagagccagggtttcaccctgttggccaggatggtctcaatctcttgacctagtgatccgccccctcggcctcccaaagtgctgagattacaggtgtgagcccccgcgtcaggccgattgtatgtttttttgttgtgttgagacaagagtcttgctatgctgcccaggctggtcttgaactcctgagctcaagcgatcctcccacctcggcctcccaaagtgctaggattacaggcgtgagccactgcacctggccactaagacttttattcattcagctacttcattacattttttaaaatactgtaaatcttatagccaaatcaatttcttcatttaatcccttgctgtaataattgttttctttgcttcttcccccctagtggtgtggacatgcctgcaatcctgctgaaactcggatttaaagagtccctggtacagtcaaaaatggcagcaggcacaagtaccttcgtggtggcctatgcaatccacaagctgtttgcgccagtgagaatcagcattacgctagtctctgtgcccttgattgtcagatattttcgaaaagtgggattttttaaacctccagctgcaaaaccttaatgaactcttcagtcgtacacactgaaaacctatttcttctaaattacatgatttggattggttttagggttttagggttgtagggtttcttttggagaggtagggggctaattgctatgttctcatggataaactttgccagcaaaaatcaggcttttgaacaattttaattttttgcctcataaattttgtgaatgctattcattatagggcttgtatatataatctaaaatgtcagcaaggcatcggagatgggttaacatctcaaaacaaaatagcctacaaatgttccttgtgggagactttggcgagggtctgtgggtaaaagcaccagggggttaatcttggctcagtttcctaaaaagcattgattaatttaactggcttttaaatatccccttccgctgatatttgttgtcagctgcctacagtttaatatgcagcgttcacaaaacagctgccagtgctacaattaatgaagcaaaacttaatatgtaatcacaatctaaattagcatcaatactttgacattcattacattggtttgggggaagaaaagtagttctggtatgtttcattgatccccagataccttccaatctggacatgatggggctgattccagatggtttttctgaaatttcattaaggtaggtcagcgtcatttgtctctgtttaggtaaaatataaaaaccctgcccagtagcagtggcatcgcttggttcctgatgcccatgttccagaggaattcggataccacaaacagctaagacaatctcagcttttcttagacaatcttctatctcaaacttcagacattccagaattgtcatgatgtttacactgtctgagttaaaaatcctgttcaagaaaaaaaaagattttgtatcacttcttaaaaaggaatattcatagcacttgtcacaaatagaaggcaaccatgagataatacaagccagggagaggcttgtattacatgacaggtgtaattagtctgctgagccagctttacccaatgaagggcatatgtgttagagagattagctaagagtagaaattcgagcatagaggccaggtgcggtggctcacgcctgtaatcccagcactttgggaggttgaggcaggcgtgtcacttgaggccaggagttcgagaccagcctggccaacatgatgaaaccccgtctctactacaaatacaaaaattagccgggtgtggtggcacacgcctgtagtcccagctactggggaggctgaggcagcattgcttgaacccaggaggtggaggttgcagtgagccaagatcacaccactgcactccagcctgggcgacagagggagacactgtctccaaaagaaagaaatcccagcgtagatccaaactgagacactgaggcttcgtccttatagtagtcaggagcaggcgattgaagtaattctgtcctgcggggttcagcatcatgcacgttccccctgggccattctctgatgcagggcacttgctccacactctgggaacccagattcaccagtctgccctgtcacgtagttgaaggagttgcatttatctttctggctcctaattcctttaaaattacatttgttgcagaacctccacaaggctaaataaaattacatttgtgaccatcagagaactgaataaaccattaactggccatcctggttttgcagagatcaggttgttgacagttcctggttgacccacagctacccatgtcagttatctccactaacatatccaagaatctttgtaggacaatttctccacctgcaaggtctttcaggtagaactcttcttttaaggcaattagcccattgccaaaaggttttactgtcttaaagctgtctttctgagatctaattccaaggacttctccacagctaagtgagatgcctcacaccattaggtgatgctttggacagaacagagtattttcatctt

SEQ ID NO: 9055 - DNA, 6000 bp, Homo sapiens; identical to SEQ ID NO: 3359

SEQ ID NO: 9056 - DNA, 6000 bp, Homo sapiens
caggtgtgtgccaccatgcccagctaaattttttgtatttttagttagggatgggatttcacaatgttggccaggctggcctcaaactcctggcctcaagtgatctgcctacctcggcctcccaaagtgctgggattacaggtgtgagccactgcacctggccttgtttgtttagttatttatggagttggggtcttgctgtgctgtctagcctggagtgcatgccgctctcatagctcactgtagcctcaaatttctgggctcaagcagtcttcttgcctcagcctcccaagtagctgggactacagacatgcaccaccatgcctggctattccttacagagttctgttagtggattcagtcctggaagatggggtatattgacatgtgagtagggtaagggagaatcaagagaaacgtgtcaggcagggccgacatgataagggagactttgatgatgataggagagcatcactgggtgtaaggacataggggcatgatgtgtggcctgagtgatgcgcacacctgttggagcagaagggaggcctgccaataagagaccaagaaatccaagaagggccagattgtgaaaagctgaactgattgccttttacttaggaaatagttactcttataggaggtttttgatctgaggaattaccatgatacaagtagggtattaaggtacgattaaatttgtggagtttgtaggggctaggcagggtgatttggatgggaaagaaactagaagaaacttggaaaaatctagaaggatctgtgggcctcagctgagattgtgggcacgtaaaatgtggagagagagatttcgaagataagattgtgagattaaaaaaaagtgaagcatgtgctgtagtacttgttagactttatttgctctgttaccgttataatgcagacgaaagtgatctgtgatctgttaccattatgatgcaggcgaaagtgatctgtgatcttttaccattatgatgcaggcgaaagtgacctgtgatctgttaccattatgatgcagacgaaagtgatccgtgatctgttaccgttatgatgcaggcgaaagtgatctgtgatctgttaccattatgatgcaggtccatgatctgttaccattatgatgcagacgaaagtgatctgtgatctgttaccattatgatgcaggcgaaagtgatccgtgatctgttacaattatgatgcaggcgaaagtgatccgtgatctgttaccattatgatgcaggcgaaagtgatctgtgatctgtgatctgttaccattatgatgcaggcgaaagtgatccgtgatctgttaccattatgatgcaggtgaaggtggtccgtgatctgttaccattatgatgcaggtccatgatctgttaccattatgatgcagacgaaagtgattcgtgatctgttaccattatgatgcaggtgaaagtgatccgtgatctgttaccattatgatgcaggcaaaagtgatttgtgatctcgtagcattatgatgcaggcaaaagtgatctgtgatctgttaccattatgatgcaggcaaaagtgatctgtgatctgttaccattatgatgcaggtgaaagtgatctgtgatctgttaccattatgatgcaggcagaagtgatctgtgatctgttaccattatgctgcagatgaaagtgatctgttaccattatgatgcaggcagaagtgatctgtgatctgttaccattatgatgcagatgaaagtgatctgtgatctgttaccattatgatgcaggcgaaagtgatctgtgatctgttaccattatgatgctggtgaaagtgatctgtgatctgttaccattatgatgcaggcgaaagtgatctgtgatctgttaccattatgatgcaggggaaagtgatctgtgatctgttaccattatgatgcaggcgaaagtgatctgtgatctgttaccattatgatgcaggcgaaagtgatctgtgatctgttaccattatgatgcaggcgaaagtgatctgtgatttgcttgggttctcagaagcagcatttaactgcatttaatcaagtcatcattactccaaggggtgtgtgtgtatgttttaagtagcgtatcttctgtgtttcttctctgttcaggcaactctgatcttaatgatccaatgttttatgaccccaaaggccctttcttaacaggatcccagtttgcaatctgtaatacaacaggcattgtatcacaaagcattaatgtagatgagtagtgacctggcttccaggctgtcttctggtaacaggcttctgtttagtgtagtatcagcagatacattttaaaagtaggatagatggttcatttaagagggctttatcatcagtattcacttgaataccagagatactggtgaataccatttggtgtagcgtaacagtgcttaaactttttggtctcaggacccctttaaattcttaaaaatgaagatgcagctgggcacagtggcaggcacctatagtcctagctactcaggaggctaaggcgggaggatcacttgagcccaggagttggaggccagtctggacaacatagcaagaccccatctcttgaaaaaaagtgaaagtgaaataaatttaagttaatggcaaactcttttatagtctgccatggtaaaaagtacataatttctgtcacaatttgcacatatggagctgaaagaactaatgattagcaacattctgtcatgtttttataaagttcccactaacaggatagagcaaattgaatttgacatgagatgatagtagctgagaaatacaaactctttgatgtgagttaggggccatgttatgcaggatgtggatactgagatactccagaagtttatgaagtttcacagaatctgggtgtcccaagtcctcactgtggctggctgatgtaggagcccacaagccaaggagagctggtgatgaaaaacacccccatttgctgttccaggctggtagaaatctagaagtgagtctttggggcctgagctgagattgtaggcgtgtaaatgcgaagagatttcaaagatgagattctgagatttaaaaaatgaagcatatgccatggtgcttgttagacttttttttttttttccaaagcagaaaacttttctcagatcaaaaacctcccataactacccaccttatacccagaacttcctgaaagttgacatgccggtagggcacagtttttattcccaattgaaaagtttccattcaccaatgcatgtaggcatctgtgtatatatctcctcagtcctccgcttttgcagaagggctgttggacctgctacctcaggctgtcgccggtgctctgttaaagtgattgcttacacccactgccttgtgtgcttgcatgcctgtttatgtcttctcctctgcccatgaaatggtccttccatgtctacactgtggtgacttggtaggtaggatgttctaggcctggagctgtgctggtgacatctgtaaggtctgcagtaagggggcagtatatctcagacagtgcccttttgtggaggtagagcaagcagttgcaaaggcctttgattagaggagcatagggaacgcccattccttccgtaagggatgtgtgtgcatgcatatgtgcctctattttcacctgagggccaggtacgtcccgaaaactcaagacctggtttgtgtaaatctcctttctctttttaaactgcagattctcccaagaggggtactacacagagccaccagtgtgttattacttggccgcattgacttatttaactatatttttacctcctggagggcctgtgagaccatttggtgtagcataacagtgctcaaactttttggtctcaggacccctttacattcttaaaaatgaagacgcagctgggcacagtgacaggcacctatagtcctagctactcaggaggcaaggcaggaggatcacttgagcccaggagttgtaggccagcctggacaacatagcaagacctcatctcttaaaaaaaaaaaaagtaagacccaaaaagcttttggtttgtggggtatatcaatatttattatattaaaaattaaactgaaaattcatataattatttaagaataacataattacatgttaacagagtaacatttttaatgaaaagtaacttttcaaaaaaattaggagactgatacttgacattttttcattttttgccaatttttctttttttttttgaggtggagtctctgtcgctcaggctgtaatgcagtggcacaatcttgccactgcactccagcatgagggacagagtgagactccatcctcccaggttcaagtgattctcatgcctcagcctcccgaatagctgggattacaggtgcccaccaccgtgcctggctaatttttgtattttcagtagagacaggttttgcctcttggccaggctggtcacagactcctggcctcaggtgatccacccaccttggcctcccaaagttctgggattacagccatgagctgctgtgcctggcctgcaaatttcatttttctttttttttttgttttgagacagagtctcactcttgtcgcccaggctggagtgcagtggcgccgtcttggctcactgcaatctccacctcgcaggtttaagcgattctcctgcctcagcctcctgagtagctgggattacaggcatgcaccaccacacccagataatttttgtatttttagtaaagaaagggtttcaccatgttggcgaggctggtctggaactcttgacctcaggtgatccacccgcctcggcctcccaaagtgctgggattacaggcgtgagccactgcgccctgctgcacatttctttagtgtctgtttcaatagaagacaggctggatgctcatatctgcttctgcatttagtctgttaggatgtgttcttttggtgaatgcatatgaagaaaaactgctgtcaccacagatatgtagttggaaaaggggagagtatgtttaattgctttttcagataaatctgaacattcttcgatactacaccaaaacttgacaagtgttactttcttcaaggttattagtatgatgtggaatctgaagccatgtctgtgactttttgaacattgtttcactaaaacacatcagtctctgttgtactttgaatggattttgtgatatcatgcatggattgtttggaaaccatttgctgagtgttgcagagcttccaaatgttggcatattgcattgtacactcacaaaaaaatcacattcatttcttttcctgatgatctcattggaaaagtctgtaagtatttgcagaaccatgaagctctggttggcagatgaaagtattccacaattataatttttacctaaaagcctgtattttatcattgacagtaactactgtaaattgtttttctctagagtcaaagccaggtttgagccctggcactcttgtttaatacgctggccatgggacccaggtgagcccacttagcgcctttctgagcccttatcttgtttgtttttttttttgttttttctttttttttaagagactgggtcttgctctgtcacccaggctggagttcagtggtgctatcatagctctctgcagcctccatctcccaggcctaagcagtccttccacctcaatctcagcctctcaagtagctgggactataggctaccatgcccagctaatttttttgtggtagagatggggtcttgctttgtcgcccaggttggtcttgaactcaagtgatcctcccgccttggcctcccaaagtgctggtgttacagttgtgagccaccatgcctggcagcccttatctttttatcttgaaaaaggagacgtgctgcttggatggattgttgtgagtagtaaatgggagcactaaggagaatttgccttctatggtacctattacacaggaggcatgagtaaagattcttttcctttctttccttcttgggccatcatgaaagtattggggat

SEQ ID NO: 9057 - DNA, 6000 bp, Homo sapiens
taattaccacagcatatctgtattaccttgagaaaagagaagtttgttgaagtgagagtagtaattcttttattctgtgctaataaggtagctgtttcagggatgtttttatgatattctcttttaaaaaaatagatggaaagcatcttaggaatcttatcggttataagaaacatgcataaacggctgagactctcatatataattggttacgtattttctttaaaaggaatataacaatacttcacaaattaaataatatccatttccttgtatctttgagacccagtggagtttctagccatataatgagtgttttgccaattcactgttggactactctaccatttttctgaaatcagtcgcttcctataccagagatcgccccatttaatagcagtattgggtttacaaaaagtcagcccttgcactagtctaaccagaagccctgagctgtcttttcagggggcttgttgccatgtgtaggtggatatgagactccagcctgtggtgggaagagaagtctgaccttgtctatgcagggtttttttaagcatttagattaatttggttgccaagccctgtctattaaaagtgaaaactaacttaagtttctcactctgtaatacccaggttttgatgtgctgctgaattatgcattggttttgaagtttcttaaataaaaactagtgaaatatgttttgtaatataacacagataaaaggaaaagctttctctgcgggagtgagcaaatctagtgggaactaaaaattttgttttaggttctactttataaatcattttgagaggttttacagtatattatttagtattggcttccctggtgttctgggttacttattagaaaagtcagcgtgctccatcttccctccagccacaaggctgtaggcagcacgcgcgtgctcggcagtcggctagtctaagggtgattgagcgtcgggagctgctccccatgaccggactctcggtgctgtccccgtgcctgatgtttcctcctggtggatgaggggctcctccaggtgggcgggcaggctcacttaggaaacaagcccaccgcgggggatggagcaggagagattgccattctcgccagggctgccttcccgctgtctcctcctccctcctgtgccatagcaaggtctggaagaggcagcgcatgctctccctggacgtgcctcccggcgccctctgaactctgctgtcctctggctctcctttctcagtgctctgcgtctttcgccagccaggtggggccctttggcatttctctagcaggcatgatggagttcccgctcctgccgagcttccaggatgcggtgttaaggtgaagagatgtgcagggtgcagcctcgtccccagattgagcttggagggctcctttgctgtatcgttagcggcactgggaggacgcgcctcagagggatctttctgcatatgacatccatggggcacacgtgtctgtttttatttcaaaggatgagtttttgtttccaaatttaggggaggtcgaaatggggcctcttccgggtgtctgttgcctacctgccaggtacggtcctccagcccgttgtttccttccgcggtgaaggaactgtgcattcgctccaggaacacggaccgggaacaggcgacccgtgctgcaggggcacttgccacggcctgcaggaggaaaagccgggagaagcaggcccagctgcacccggaagcatgagctttcacttccctgtcaggctttgtcttagtagtaggtttccaacaaatccatttccacgtccagggtaaataagcagcaccaggatcatggggctcttccactcctggtgattgaattccgtgggattgattggagggattacaatcatgtagcctgtagcagagacctcagtcactgtgcagagagatctggaagcctcattctggaaacgagtgggacttgatttgggattttggggaaaatgacggccttttttccctcctctttttgtaggcagaacagtatcaaaagaagaatcggaagatgcttgtgattttaatattatttgtcatcatcattgtgctcattgttgtcctcgttggcgtgaagtctcgataagtggcattgggttttcgtgtgtgccgcgcgtgtggatctcccgggtgtgaggggcttggcctgcgccccgccagctgcccgcagaggtgcagcctcgaggaatctgagggcgtcggggcagcgaacctttgcatccacggactcctccttccctagtcctgctcaagcggtccggggaatgggtttttgtttttccttcattgttgagaatttaaggacctttgatactgctgcacaatagagattgagttctgggatcagttataatatatattttttttagaaagagaaaatgagctgagagtttacaggcactgcagaagctgttcagtattatatgtgtatatgctatttttttagcagccatgtctgagcagaatgttaacataatttttggaaaaattttctttaaaccatctggtttttaagaaatttggtaccaaaaattgatgagtagaggcaaaaatgccccttcatctttctctatatattttccagttgaaaacaaactaagaagtcctttaagaatttataatccgttccccattaacttaatttagcttttccatcactgttaatgatcagagtaacaaagtgtgaaaaataagaaaccatcattgatgttaattaacacatttagatgggccagttaaaacagcttcataagttttaaattaattgtaaatggaatattcctcatttaaaatttttgcactgcattttctactgtaaaccaaaagaggttactaagcaaaaccacctaaatttaagttggtgatttaaatgaatctcacattaaaagaaagcttgacagtgttatgaaagccaccagactcagccagtgtgtccccatgggtatccccagccatccttgctcaatccattacttatatactaactacataatgacctgttcaaaccagactctatttaatgaactgtgaatttacacagaggccattttaaatgggtcaccccatttaggattagtggatctcaaattattaaccaaacatcactccatttcaaagtaaaatattccaccagcgatttgatttattggctcttccattgccactgagcaatgcccaggaagcaggcacattgccaaggactgggggcatcttgactaggaagctcctcgtttgtgtgagcgtgggtcagaccgccaaagtaggacttcatcgtttacctacctattatcaatatggtgcttgaatatattcctataactgtagaacagtgtggaaagtgatggtaactttgaagttgttcatgttttattggctttgttttaattgacactagtagagttttaatggtctttgtgtaaattttaatggcttttccattgtttttgcttctcttaaaaagtttaagaagaatatgacctcattaaatgtgctgttttatttggaccagtcacacaaaatgtctctctagagttgactttaaagttgtttacagaaatttaaactcaattccagagattgaagttgtccaaacagctcatgggcttagtgtccaaacccctgcccagccttccctttccaagttggtgccacctccaggtagccattggtggttttcctattactgatgtggctgtggaatgataaggtcctagaggggccctggcatttcaggaagcggacctggtattccctgacaaacattgcttaggaaagagggccggagaataagaagccagcacctcatcagtcagccctgcaatgtgagacttccgtagctgttgagagtcactgcaggtgttctttcatcccatctgattttaacccatggttgagacgttccaagttagatctgctgctcttaggtgtggggctgtccacattagggaacttgcctcaaaaacagtccacagtggcaataccggacttctgttcaagctttttaaagtgctgagccttacaaacccctgaaggaaagtgaccctttaagagaggatcatctttttttatatttattttcaccaaatagggtgatgagggttggtttttgttccctcaacccatttgggtaaaataacggatctgattagaaactgttttaaggaggggctgggctcggtggctcacgcctgtaatcccagactttgagaggccaaggcggtcacgaggtcaggagttcgagaccagcctagccaacatggtgaaaccccgtctctacaaaaaatacaaaaattagccgggtgggacacgcctgtaatcccagctactcaagaggctgaggcaggagaatagcttgaacccgggaggcagaggttgcagtgagccgagatcacaccactgcactccagcctgggtgacagagcgaggctccgtctcaaaaaaaaaaaaaaaaaattgttttagcgctgggtttcccaaggtgggagagacagacccagcctggagctggcccctggcctgtgtgctgacttcttggggtcctcaaaccactgtatttttctgttgagcctgtacttggggagagatcagtagcatttgaggaagtaagagaaaagaatcatggtacctcagggtttctttccctttactcgctggcagccattgtctgtgggcacctcatgtttttccacactctactgggccgtggaggtaacgatcacccaggccagtctcctctgcctgggatgcgccctctgagaggaggcctagcagggcaggctccctctgggcatccctggatgcagcctctggacacatgcctcctttaaagtgtccgggtgcagctcaggttgagtggaggtagaaggagaaacagacatgtttaccacgcgttttccaaagctcctgatctttcccaagattgtaactgaaaactgctgtctcttgttttgttcgttttgggggtggtggtgctggctgggccatgcttgtgaagtgatgtgtgtctctgatttaacggattcactgttttctctgctaattgagagagcgttatttacattatttatttgttttgacacaagtgctttcagtgttttatcctagctaatggcttcttaaaggtaataaaacccttccaacgtaattggtcagataaaactttttttcttgtatgcttaaataaagcaattagtgaagcacttctatccaaaatgacttttttgtccttttttaaaaccaatttactgttactggaaactttttgtacaataaagcaatcacgcagattaaagaacatcctgcaatcctagtattaattttaacaatgggttcatgttttcttccagtgcatttgtgttaggggagggcttggccagttttgtgatcctctgggcccctgactctgttttgtgcctgaggcctttgcctcagtgtccgaaagtagatctatctaatggatgctttcaaagggacaatctatttactatctgatatacaaaaagaacaactgcctaaaaggcagataagtatttttcttatgaaaatatatgctttatatacataccaagaaacatttggaaatctccaaataaaactgtgatgtgccttgttgagaagcaattcttacacacaggctgtaagagacttgactttctaaatgattttgtttcctactctgttacaccaaaaacttgagagacaagtgtctgccagtttaactcaaagccaagactatgtttccccttgattgtgcctgtcctggggtcctccgaggaggacctttgtcctgaaacttgactttgatgcatttgttttgctggtgggagatgtggacctgagtgatggtaggggtatgtggtttcatcaccagaacctatacaaacaaaaaatagcagctgtcatgccaggtctctttggcacccttggcgtttggtcctgaggtgttgcggcgactcaacagcagaacccttcaga

SEQ ID NO: 9058 - DNA, 6000 bp, Homo sapiens
acacctgtaatcccagcactttgggaggccgagacaggtggatcacctcaggtcaggggtttgagaccagcctggccaacatggtgaaaccccatctctaccaaaaatacaaaaattaactgggcatgatggcacatgcctgtaatcccagctactcaggaggctgaggcaggagaatcgcttgaacccggaaggcaaaggttgcagtgagccgagattatgccattgcactccagcctaggtgacagagtgagattctgtctcaaaaaaaaaaaaaaaaaatcaaacatatacgaaagtggaaagagcttcacagtgaatacccgcatgcttactctcataaccagacagttgccacctggctgtgtctactctgtccatccgtctagccacctagcagtcccagctgtggcctattccaggcatcagtatccttccagcttctgcctgccatgctcaccctccagggcctccactgtgggtagctgttttatactatatatatatatatatatatatatatatatatatatatatatatatatatatatatatagagagagagagagagagagagagagagagagagagagagagagagagagagagagagaaagagacagagtttcactcttgttgcccaggatggagtgcgatggcttgatttcggctcactgcaacctccacctcagcgattctcctgcctcagcctcccaagtagctggccatgtgtcaccacacctggctaatttttttgtatttttagtagagacaggggttcaccatgttggccaggctggtctcaaactcctgacctcaggtgatccacctgcctcagcctcccaaagtgctgggattatagacatgagccactgcgcccagccctgttttatattatgttaatagctgctatgtctatggcagagttgaacctacttcaccactactggaagcagaactcttccctgattattttaaaaacccttctcaagagtgttctgagaaattaaacttttcttgtgactatgaagaaacgggaattgaattcagaagtattggctggaaaattatttttgtgttagtgaatatagaaaggtcttgactcaggggacatataagcatgagccattttattcttccttaatctgagccttcaaccaaaccatttcaatccctcagttacaactggggctcatcattacccagtcacgtcagtcagtaaaaccagcccagcttaaaacttcgatgtcagccttgatggaaatctaatctcttccatccaccctgggtgggctggactcccaggtgggtgtgtgggcaggggaggcttgggcagcccctcctcaccttccaacccagcactgagatcctaaggcatggtggtgctttgctgttgggacacctctgctccctccctcttccaggctctgcctcccctagcgttggtgacagaaagagagactaagggaaagcctaaggcctgtcctctgtaacaggccactctcccagcctttcactgcggctggctcacctctgcagaggaggcatcgaatgccagccttctcacctccccagccaggaaagaaggcttgagcctagcgctttacttctctggtgtttacttgatccatatggaaaatgccaaaggtaggcagagtcaggtgcatttgtcatcttccctcagtcccactgtccacctaagttcccctcctttcagctgggcatgaggcctggccagccagaccactgtccacgcagaaatccaagccgggtggggatgcctcatgatgcaatcatcattactaaaaaaagaacagtgagaactggaggtggctgggggcactcctcaaaaacatgagaaggttgaccctgggtaggtaattgtagctcatacctcccttgcaatcaagtaacttttatctcatgagcaatctcatttcttcacttgtcagcttacagggagctgggagctgccaccatgtggctataaagtattactgtacttccaaggacacagaaaggagcgctagactattgtcactatgatcacatgctcagaatagaaagggagtggggacatcttcaagctcaggctcacccaagatgtgcagcaggtgatgcccagaatcaccagctgagttccaggccccgtggcctacccaagtagggttgccgtgtggggaactggcattctgcttagttattttaaacgcttgagaatgttgaaaacttgtttgtttctaatatattaaaataccagttcctatggtgttttttgttttgttttgttttgagatggagtttcactcttgttgcctaaggctggagtgcaatgatgtgatctcagctcactgcaacctccgcctcccgggttcaagggattcccctgcctcagcctccggagtagttgggattacaggtgtgtgccaccatgcccggctaattttaaaataccaatttcttttaaacttaaaacgaatgtgaaagtggaatccttcactgttgtcccccagctccgcccagactagaacattgtgaggctaatgcctttctagcaacaatattttagtccccagcgctattctagcagcagggagtgctcaactgacgtggttttttcacatatatttaacatggtttagctcacctgacttatatattctaaattagtgattctaacttaatcagttttttaaaaataggctatcattatagaaatatccactttgaaaataggcacaaggtattcagtttctctttatgcacaggaaatatctatagactttaaagttgtatttattattcttttcaataataagctattaatttcaataaaaataaactattcaaattaaaatattcagcagcatctcagagctatgaatgttcagttaagcaaagaaagttttttttttttaattgggagatttttattttatattttatttttgatgagttcttttttatttttattttttaattttatttttccataagttattggggtacaggtggcatattggttacatgagtaagtttttcagtggagatttgtgagatcctggtgcacccatcacccaagcagtatacactgcaccatatttgttgtcttttatccctcaccctcttcccactcttccccccaattccccaaagtccattgtatgattcttatgcctttgtgtcctcatagcttagctcccacaaatcagtgagaatatacaatgtttgattttccattcctgagttacttcatttagaataatagtctccaatctcatccaggtcactgcaaatgctgttaattcattcctttttatggctgagtagtattccatcatatatatctgtatatacacatatatatacatatatatgtgtatatatatgtgtatgtatatatatacatatatgtgtgtatatatgtgtatgtatatatatacatatatgtgtgtatatatgtatgtatatatgtgtatatatgtacatacacatatatacacatatatgtgtatatatacatatatgcgtgtatatatgtacatacacatatatacacacatatatgtgtatatatgtacatacacatatatacacgcatatatgtgtatatatacatatagatacgcatatacacattttctttatccactagttgattgatgggcatttgggttggttccacgattttgcaattgtgaattttgctgctataaacgtgcatgtgcaagtatctttttcgaataatgacttcttttcctctgggaagatacccagtagtgggattgctggatcaaatggtagttctacttttgttctttaaggaatctccacactgttttccatagcagctgtactatgttatattccccccagcagtgtagaagtgttccctgattgtcacatccacaccaacgtctactgttttttgattttttgattatggtcattcttgcaggagtaaggtggtatcgcactgcggttttgatttgcgttttgctgatcattggtgatgttgagcattttttcatatgcttgttgaccatttgtatatcttcttttgagaattgtctattcatgtccttatcccactttttgatgggattgtttttttcttactgatttgttggagttcattgtggattctggatattaatcctttgtcagatgtatagattgtgaagattttctcccactctgtgggttgtctgtttactctgctgactgttccttttgcagtgcaaaagctctttagtttaattaggtcccagctatttatctttgattttattgcatttgctttttggttcttggtcatgaaatccttgcctaagccaatatctagaacaagcaaagaaagtttaccttttattttatctgtttactactttaaacaaggtaatgtgataaaaaggtcatgttaaggtaatcagggttaatgtatcacagattgtgttttaaaacttgcttactgcaaccttaagtattggtataatataatctcaaattgtctctttcagaattctcatgcaaagactcccgggttgccacagagatccctgtccatagggaggctctttcccatctctcctccctcccactttaattccaaactcaaaaaggcagattaatctaagcttaaaaaaggttttagtagaaataatttgaaaaccccagagccctgggatattgttggaataacgatttttagtgctttggaaagtaaaagttgatttttcttttctttcattcttccccatcccttcccccttaataaagttatcattcttgtcattttctagttttttttgtttggttcaagaggataagattatagaaaatagtcactaacatatcctgctatagaaagagatgattggaccttctatttggaaaccagaacaaacaaggaaacaaagaaacaaataattctgctttccgataggtgctggttttacttccgctggctgagctgttgttcctgaggtcagaccccagccagtcttttgtgtacgtgcaggaccatggtggctttagtttctaccccacccttcctaggaactctacttgtggcaaacgtatgttcaagcttacaagtcagcccaccccactctgataaatgcaagaaaagctgaaaagggaggagcaagatgggatgaaagcatctgggccaaagtgacctgaaaacctttagagaagaagctgctggctgagaaggaggtgtgtggctccggtgagaccaccagcttggaggactggtcatcagctgcacgttctgggtctgtcttgggtattcccatatggccatgagatccgggaggcacccctcgctgctgctgcttctagtgctgctgctgtggctgctgcaggtaagctgagcctgcagcctagtgctcaggtgcagggaactgaaagcaaagcacaagctggccctgccccttctaggctaagggaggggagagggactgagtgtgacctgctgggacccagggctggctgtcttgagaatggcttaggtagcaggggctctggatttatataaagggaagttaagggtcccagtctgtttggggcaacagtgggagcaggctaagggacctgtttaaaactaatttatatagttcacactatttttagtgagattacatcaacacacacgtgttttctttctttgtttctttctccttttgttgagacagggtctggcttcatcatccaggctggagtgcagtggcatgatcaaggctcactgcagctttaacctcccaggctcaggtgatccttccacctcagcctcaagagtagctgggactacagtaacttaccaccacgctggctaatttctgtattttttatagagatggattttcaccatgttgcccaggctggtctcgaactcctaagctcaagtgatttattcgccttgcccttccgaagtgttgggtttacaggcatgagccacctcacccagccaacacacacaatttttttttttttttg

SEQ ID NO: 9059 - DNA, 6000 bp, Homo sapiens
tgttggctttttcaagacagacaaatagaaggatgacatcaatagctgatattcagggctttactttcattatctcatgaagtcctcagtgtggccatttattagttcttcattcattcattcattcattcgctcactgtttattgagtatcctctttaccccagcgctggccatgcactgagggtgcagtgaccgtgggctccatccgggcaccctggtgctgtcattagctcgtgttgcacagagtggttggtcacatgtcaggtcacgcagcctgtgggcagagaatcaggacctgtgcagcgccccaggacctcccacccttgggtccacctgagcacaaaactgtaggcccttaggcattcctgagtgaacctccctctgctgccaatgtctgggtatgtcctacccagccctgcatgtgtgaggagccaagccctgctgtgacctgtgggcgggaaggacgtgcatctgggcagatggggcctgccctacctgagtgtcaggtcacagcagagacgtggctgctgccctgagcagattccctttgcatggagtgtgcccgtcagggctgccttcctgacagcctaatgagctgcctgtgttgactgcgggatccttccccaccaaacgctgtccgagaagtccatggacggaaggacgggctgtggcaaccctgcgtcgtgtgggaacaccccgtggggccctcccttttgtgtcccctggaacaaacaataagaactgcccaggagttaacgttttctgttacttctttattgtttttttagaaaatgtttttgttgattcttctgtagtcatttagagaacgttagccatggttccgaggcaccacgtgcatgaaagtagcgaggctcgtttcgatactagaggcggcccgtctgtctaagcagcgtggtgtgttgttggtacactgcagagctgggccactggatgaatttgtggactacattttgggagcacgtgggtgggaaagatgaactatcagggaccaggctccagtgctgacctgaggcagccatgagcacagtgggggtgaatgattcccgcacggcttcccataaaaccctgcctcacataacgtttgtccataaagtcaatctccctgggctcagggcaaggaggggccactcgctctcagctgcacattgccccttgggcagctggaatgtgcaagcttgtcatggagcatcctttgggaacacacagcttctccatgacagagacagtgccgggaccaactgtcctcagagcatgaggccaagctggacccagctgagttaaggagtgtccaggcatgggaatggcattcagtgctgggataaagtatttttggtctttacctgtaaagttttctttcctctttcccctaatgacttcccgccccctgaaaatgaaggaatggaagatgtagctattgacaggtgcacgcgcacttctgaaaggcatcttgggtaggagagggtggtgcacaattggtggctgcccagggcatggactggctcacagggccacaggaggggttactattaggattgcatcatctgacctacacacccaactcatcgtgtgcagaaaggaagggtgtcaggagaggccccctgcacactgctgggtgcatggggagggcaatggctcttatgcaggtggaagcagcaagtctctgggccatgagtggtgctcatcctggtccccaatgtctgtaagaaaagaggtggtggaagatcaggggcagtgatcaccctggctgtaatagaaacagtggctaatgtttactgacgggttgtaccacatcttgaacaccagctctggtctgggtttgggatacagctgtgaacacaacagatgaggtcctggaaatgctcagatttcataataataatgatgaataacatcatggatggggctgatcactcctccgtggggctgccctggactcctttccagactccttcccacccaggcatctgcatgtcttcttctgaagctgttttgtgcccttgatcctattagcagcctggtgcagcctgtgacccgcccacctttacataataatgcctcacatgcataaagtgaaacacattgactcacagaagcaaataatcatattggcatgtagttatcaaaacattaaaaacaagtctgtgaggtaggagcatctttattaacgcgattagtaacaagagccttcagtgggcctgataaatgtggtgatttcaaggtggtgccaactataaactaaatgtcagatcatctgcaactgtgctgggagatgagcactcacaggaggctgctgttttcctggcgtggtgcccacattcataacagaaggaaacattaagtaagaggggaataaaagaggtgaatttgttggtcgtccaagttcacagagccctgggttccatcccccgatctacagactgagaacccttggcccagaaggtctgttccctccaccctgcacccacctcttgcctctgtgccccctgcgctccttttccttggcatctttgcaagccccgctcaccttggggtatacaaggattgtgcctgtccccacatcgtcctcaccaccctctgcctggatttgttttctgcctcctggccagcctggctgcaccttccaccttccccagtacagattccccaataccccagctgcccataccttctggcagatccagagagccctgtcctggggcatcagggcgaacagaggggccggttacttcatgcatctgcacaggatggaccgggcgaagcaggcagggctctgctgaggagagggaggggcagagaggcagagcggcccaaacaggacaggcagggcctccttgggtgggtgggaggcaggggcagcttcagcaggggtgcgccttcagcgactctcacaggagaggggcagggtggcccatgaaggagccacatcaacctgaggtcaaaaatgttcatccaaagtggacaaaacaatgaaagagccaaccacaaacaagaccaagcctcagatgcagccgggcgtggagtgagcctcagagggcagggacggaacccaccagagactgaagggcagggtggaccagcagagaactctttcctttttcctattttctccaagtttttgctttaaacacttattcattttgtaattagaatatgttttcctaaaaagcccctttagggctcctgaattgtcagcaggttaaatcccaagccccttcccacctccgtctcagtgaacacatgccaagctcttgtcaatggccagacacgccgggcactgtgggggtgatggtgacccgccggggacttgcctcttgggggcatgctggatgggaagaccccactgccctctgatctgctgaattgctgggatgttttccttctagcaccttccaggaattggctgctgggacctctccaagcccctcccacccaccggcctgcctgcttcccatgcctgcctccaacaccagcccctgccacccctgctccctactgggaccccacccccccggccactgtcacctcaggggctgctccagaggtcatgcaccccccaaaacccccagcccaggacctcagcagagcatgctcctccctccttccgtactatggctcctgctatctgtggcctcagcactcgcctttcagccagagccacaccccctcctgaaacaaaagggacctgagtggccgaaacagggagtgacgacccctgcggtgccggcagtaaggtgtggagatacccctttccagaatcgcgtgtggggaggatgtgcagagggagcccccacctcccacccgaccctgggaccagttttcctgtagaacggggactttgccgtctgtgccttagccacaggccagatctcatcgtgtttctcaccctcttctccacgcgtcccagaggccaggcttgctgacgcacccgagggactggctgcggggcaccccacatggcggggtcctccatggaagtgtggtcggagtacccgaggccccttccctactgcaggcactgcccgccaagcttccctggatggctcctccagggctgacactgcgcagcctgggcgtctctgcggtcagtgagggtcgccttttttatgagcatcttgaggtccgttgggctaacacgagtccctcagtggtcatgggagaagcctcaggttctgtcagtgttgcctctcccttttgaataaatttgacgatgctgacttcttgacaccacgtccctgggaagttcccactctccttttcagggacctccaatccgcccctgcaggttggtggatctcccaccatggtgctgcccctagaggtcgctcttggagagctggcttcgtttccatgtcctgctgatcactcccaccccgccctgccatgccattcaccatctctgcagccaagggctgtgccctctttcacccggctgagcgggcagctgtgccgggtgtcggactggggacctccttctgctgggggactctgcagacaagagggggcacgctggatggatgtgcctgagggacaggcaagtgtcaggtggcagagccaggcctcggccctgccctttctcacccacaatgtgaattcatcagcaccctgagtgtgcactcagcaagggctttccaaaggccgaccctcctgacccccctgaccccactgtggctggaggtgtggggagcagcaaggggatacgtggaagacagacctaagccggccagcctcccaggcggggcagcccccagatcagtgcaggaacatttcagcagcgcaggcaggcggcatttccctccaagacaatagccctgtcccagtgaaagacacagagtggagaagcctctcgcgtggtctctgcgtctgggctccttcatctgccgaggccccgctcctcctcctgacgcggctctgcctctcccacgcactggcgctctggctttcttctttctccctctgccttaatgatgctgcccctttcctgttcctggttgaagctgaagcccgcttcccttcgccgcacacaacacaggagcaatcttctcagccgtgcactcacagcttggaaaataaagggaggaaggagtcccagccacagggtagaggaacggcctctccacagagaagctgctgctgctgagctgaagtgacaggtaccccgtgctaatgatggggaaagtgtgaagggtttattataatttaagagcctctctatttgaacagactgtctgactctccggggatggttttcaaaaccagctggctcctcggatgctgctgagaatgaaatggggaagccgtgagaaagcagcacaggtcccgcgcgagggcgtggcggtgaggccgctgctgcagaaccggaggcctgtgcatctaattttagtgaagaatgttatggagacagagggtgtcggggtcaatgatcacctggattccgggattccttgctttcccagctgtgagcgtgccgtatttcccagggtggggatggcccagtgtcctctctgcagctcatctcctgcgaggcacaggcatgttgtgattgaggacacaggcttcggtgcctggcagggtccttcggggtcctggctctggggccttgagggagtcactctagtggctgagcctgagccatctctgcaacgggagccatagtggtgctcaggtggcgggacagcggtgagaatctaattcagaaatgaatgcccgcaactcaccctgcgcagtgcctcagcccaggaagcactcagccagccactgctgtcttcacaactattgtccctcaggggattcattccaggcccgcccccaggggtattaaaatccgaggatccttaagtcccttgtataagaaggcatagtatatgcaagtaacctacacacatcctttgtatactttaaatcaactctagattacttataatgcctaatataatcaaagtgctatgtaaatagttagactgtgtcttttattattacat

SEQ ID NO: 9060 - DNA, 6000 bp, Homo sapiens
gccgaggggtgggctcggccccacctgagcagttccccagcgcccctctgaaacccgcctgtggtccctggcgccgcctctaggggccgccgccgctcccctatgacacagcaacaataggggccgctctggtccaagcgccctgcggcccgcgcttccgccggaaaagagccgccggcgcgggggcggaccggggaggagcgagtgcgatggacggtcgccctcgccaatcgttggcaggttagagccggctgcgcggcttacggggctcaatcggcggcgagagcggcaggcggggcgggccgaacgcgggtttccggcggggcccggcaggcgccgaggaggaagagcgagcccggacggcgcctctcgaacgagtgtgggcgcgaggcaggtgcgggagtcgccgggcctggggcggccgggggcgaccggaggcgggggcaggggctgctggaccaaggatggggcgggggcagccaagacgagaaggtggccggcgcggcgggtggggcctgcgggggccgggccgggcgggggttctggggtctcgggcgccgccccggttccgcctgcggctctgaacgtggggctcggcgggagctcgggcgggtctgccccgcggagcgggtcgccggggtggcgcgtcgaggctggtgccccgcggagacggcgtcaagcctagggccggccccactaggcttggcggggctgccccggcccagcgccgagtgcgggcggtgcgatcgtcgtgagcggggcaaacgcggaaaggcagcccggcgtgtctgagtctgccttaggcagctctgggcgcaggccccctgctcgcaaacaccccagggggcgggagcttgccggaccgcaggcgacagtgaccgccgcgtctcagcgtcctctccgcgctttcaggatgacgacctcaggcgcgctctttccaagcctggtgccaggctctcggggcgcctccaacaagtacttggtggagtttcgggcgggaaagatgtccctgaaggggaccaccgtgactccggataagcggaaagggctggtgtacattcagcagacggacgactcgcttattcacttctgctggaaggacaggacgtccgggaacgtggaagacgtgagtgtccctgagccgcagcagcaggacaggcgacttctcgggccctcggagtcctcgctttggagttcgcggtgggggcttggccgcatctggggaccgctcgtggggccgtcatcgactgccctgctgatgggtcgtcctggtttccgcggtgacaggggcatctcggccactgtgtatcttgaactgtccgtgtgaggtgcctgggttggaggtgtggccctggagagcccggagctctgtgcctggccttgaactgtccgtgtgaggtgcctggggttggaggtgtggccctggagagcctggagctctgtgcctggcggcttcactcagtcttctttgtttttcaaactcttagttgttctttgttacatttgagagcagttcagcgttgactttttaactactctgggaatgttgtttccagcacgtctcagaaaccccgttgccatctgaaaggcccctttccctgctctctcccccggccttgcctttcatgggctgtctctgaccctggcttctctgccttgtggagaccctgccagcgaggggtctggcggcttagctgccccttgcgcaccccacccggttagacccagggctcagtacgctctcctgagactgggcacagtgatgccatctgcgccactgactctctcttcccctggcttgccaggacttgatcatcttccctgacgactgtgagttcaagcgggtgccgcagtgccccagcgggagggtctacgtgctgaagttcaaggcagggtccaagcggcttttcttctggatgcaggtatggggcaggccttggggttgtgcctttttgttgccctgcgattcggttaggaacttgcttacagtgtggtgcaattggcttttataaaccagcaggcgccggccacacccggccacacggcctgagatgccacctcagggctgcggtgcatgctacctggggccgaggtcctctcccagagtacggaggctccaggctgggctgcgggcaaccgattgcggtgtgaaatttccaggcagacagacatgctggccctggttctaacgatgcccagtgccctctctctgccccttgccgtgggtcactgaggcccccacagcagaggcagaggcccctgtgtggcttccctgctggtgctcacagaaacgaagcatcctgctcacactttccacagtcctgccccttccctggcagtgtgtcctggaggccaggggtgtcagtgcccagggtttctcttacccacagctgcagagcgtcttttgggtctagaggccgctgctcattctgccatctgtcagtgaccattgagcttgttgccgttttttgtgctgttacaggcagtgttgcaaagaatttcccggtacacagatcattttccataagccagtatcatctgtaggtgaaaactggtggcgggcctgtggtcaggaagcgtgtgcatgcgtttgcagtgtggagagagaaggccatgctctctgccagaggtggagctgctgtccccaccccaccccccttggcactttcaagagcaggggtggccctggctgaggtctctgtggagcacatggtctgtgttgctggtcacctgtgcaagtagtgtgcagcggcctgagaaaatgaacaggcatagccaaactccagttaaactttatttgcaaacacagatggcggccacaatttgccacctgctggtgtagaacgtgtttttccacggttttgccaagaaatagtgtccaactgttaccaccatctcccttttttccccgattttcctgttggtggcttttaagtcccccgtccctgctttgccatgagagcagggactcccagtgtccctggcgccctgcagcttccatagccattcggggtgtgcgtgggtgctctgctcccagctctgtgagctcgcaggtcgatgcttctgacactgatctgtgcacatgtgtgtgcacacgcgtgtgctcgattgtgagcgcctgccgtggccctgggccgcggtgtgctgagcgggccagttcgctgccttccactggttgaaggaaggagacgggtgtgtaaagaaccgcaccccagagggcaggagggtgagagggcttggtctggcagcagctaagtgccttcggagctctaggctccccatttgtgaaatgggcggagggggacagggcacacccgggattgcggcggatggggacagggcgcagagcatcgtgctcaggaggcgccactgccgtcccctcacctgctgggccgggtcctgtctcctcagcattgtgtggccaggcacacgcgcctctgcgtctcaggtccctcacctggaagccaggtcagaggatggctgtggtggccctgggtgagctggcgccagctcctgcccttacatgcccttcctcttgcaggaacccaagacagaccaggatgaggagcattgccggaaagtcaacgagtatctgaacaaccccccgatgcctggggcgctgggggccagcggaagcagcggccacgaactctctgcgctaggcggtaactgtcacatgtgtcacgtgagctcagggtttcctgggaggccagagtctactgtggatgactcgccccctcagcacaggttgtttggaagtggaaatagaagattctaaaagttagagaccctgtgagctccctgggtcactccccactcccaccttcacggggtaggacgggtctgcatcccaccgtcgcctcacttcaagtggtgccccctgtagggttcaggggcagccgagtgcggtgctcagcagaggcgcaggcagtgcggtggggcccgcgtggatctggctggggcaggcccgcctgagctgcagtgttttccaggtgagggtggcctgcagagcctgctgggaaacatgagccacagccagctcatgcagctcatcggaccagccggccttggaggactgggtaacgtgcgccacccgggctctcgggcagcttctgctgggaatgctttgaggcccggtctctgtttcctttaaacttctgctggctctgtctgcgtagtgtcggggagcctgtgtgtccgcaagctggttcccctttgggaatgcgcttgtttgcctgtggctagagctgggtaggcgagggcttctgggcccctggtgaggaccccagctgggtacttcagaggagggtggctggccgagcggtggggctggaggactggagggagctggggttcctgcgccctgggtcccctggccctacatggctgcctgcctgctgccagctcatggagtgcagacccgtgtgcttggcccttcagaaatgcttgtccctttgggtgggatctggactgaatcttctaatctaagcacatgaattgtgtaatgggatggaacagaaatgaccttgcttccagaacacagccgcaagtgtccacccgccccacgccgctcctccaggcctgtgggtccccaccgccccgcttcttcctggctttggtgttgggaattcctgctcctctggcctggggaggggccaggctctttctggtgggctagagggcatcctgagctcgcatttccttgcccctcgcaggtgggctgggggccctgactggacctggcctggccagcttactggggagcagtgggcctccagggagcagctcctcctccaggtgagcctcatcgctcctgccacgcaggtgccacggtgttaagggaggggcagtggggaatcctggcccagcaccctggaccctgcgagtaggccctgccgtgtggggcgtgtccgctccagcggtgccctctctcttcgcagctcccggagccagtcggcagcggtcaccccgtcatccaccacctcttccacccgtgccaccccagccccttctgctccagcagctgcctcagcaactagcccgagccccgcgcccagttccgggaatggagccagcacagcagccagcccgacccagcccatccagctgagcgacctccagagcatcctggccacgatgaacgtaccagccgggccagcaggcggccagcaaggtaacgtgtgctgtcgcctggagctgggtggggggcatggggcctgctgaccctcgcacgctcaccttccaaggcatctgcctagtgtgcgcgcctggggtgctggggccatgggctgagtccctgcttgcatgccttccatgtgggcacttaggctgtcatcgagctgatggccgtgttcttgtgccccagtggacctggccagtgtgctgacgccggagataatggctcccatcctcgccaacgcggatgtccaggagcgcctgcttccctacttgccatctggggagtcgctgccgcagaccgcggatgagatccagaataccctgacctcgccccagttccagcaggtagaggccgggcccagggtgtcctccactgtgtgctcagggagtgggcaggggggaggaggaggccctgccccaccttcaccatggccagtgcttcatgtgcctgacccgcagagctggcagctgagcagtgtggctctggggtgcagcccgggttggagctcagccctcgcctggctcttcttgcaggccctgggcatgttcagcgcagccttggcctcggggcagctgggccccctcatgtgccagttcggtctgcctgcagaggctgtggaggccgccaacaagggcggtaagtggctgcgcctgcacctccaggccagagccaggggcagggtccattcctgtccccctggatctgcagaagtggggctgagggggtaaaggtcacagcccttctgcccttgatcccatcgctttgatccccagttctgggcaagggttagacaccaccttgtgtctttaacgtgttctaga

SEQ ID NO: 9061 - DNA, 6000 bp, Homo sapiens
cagaacccccccagggtgcccaccccagccccatccccccacacgccgggaccccccccagggtgcccaccccaggtctgtcaccccacatgccagaactggctggggaagggagggcatgggctggggtctcctttgtcctccatcgtcttgcctttttcaagacgtgggacccaagtagttaaccagaaagaagaggcttttcaatcctcaagtcaggaaataaattttgaaagaactgggctctcccattttaatcagggaaggggacagaaagaacccatgttcatggctgctgaggtcagtctgagcgagccagcgaacacctccaagcaggcagagtgcctgtgaggctggagcggagtttctgacgccaacatcagctctgcaaggcacctgtgggcctgttggggctcagaggctaactagggctgcaccgtctgttcctgattcttcagaatccatttacatttggccacctcctcaaacaagagcatttgaatgttccaggcattcagagttgcgttcatcggaaccaggctctaggtgtggccgagaggaaagagccgccctcctgcaggtgggggtgatgtgaggccgacagtctgctctggtgagaggctggaaagtgtaggtttacaggatgtcactaagctgcagacgcaggggttcaagtcagcgacactgcggtgtgagcagaggcgacatggacatgtcatttattgtgaaaatttgcattactgtgggctgatgtgagaggctattgtgccatgacctggggcttcaggaacagtctctgcccctggtctatgttatgagttccagggacaggacaatagctgtgtctgcaaacacccccacctgaggccgagagccccccactcagtgggggagaagggtcacgcacaggagcgtgctgtgaacaggatgcaggcagctgtgagctgggatgaatgtgagctttgcccagtctgggtgatctgtgtaccccagagagagccgagcctctctttgcagaggcggtttcccttctgtctgcctcgatcactgcactggctgggagggctttgcgtggtttacaccatgcaacacgttttccatctcagcatcttatgcgcttaagcagcggttgggcgttagccctgctcaggcctccaatgctaacaaaaacagggagagcctccattcaccccccagggcctcgtgtgcagggacaggcagccccgacgcactgctgtcggccacctcctgggttagaaactgcaaggcctgatgtggggccttcccagcttccagggggctatgtccttatcctgagaccccacagccaggaccgcaacaggcagatgtggaggctgaggctgagccctcagggccagacggctcagagttcccacagttccccccagggctccaggcccatgcaccaaggactcgccccagttgaggcctcaccacccccagggccactggcccccaagtgcaaaccaagctagccaggtccgtctacccaggggcttcttgcatggagggttcgaatcccagtggcttcctgccccacttctcccaggggctggcggttggggactggccacagtccccattcccgtgattccattcccctatcccagggcctgtccggtcctggacttggtggcctctgcctgccccagccagttccctttttcaggccctgctgctggccagtgacggaacagggtcctgggtcacttggggtctctccccacctgagctgaagctctggccaaggcactgataaggtttttccctaatcagggactgcagctttcaggacaagtgggccacaggcataggctcagcctggcgccccctgggtttctctggaataagtgtgggtgtcccccacctgcctgcaccccactctactccctgtcggaacaggggccctttgtaatcagaccggggagctgacagcctcaggaacagcaggttcctcccaccctgggtctggcccactctgaccctcagtctcttctccacaccccgacctctgcccaccactctgaccctcagtctcttctccacaccccgacctctgcccaccactctgaccctcagtctcttctccacacccccacctctgcccagctccatctggctcctgctgaagaaccccacgttcatcctgctctgcctggccggggccaccgaggccactctcatcaccggcatgtccacgttcagccccaagttcttggagtcccagttcagcctgagtgcctcagaagctgccaccttgtttggtgagaaaactgaatcttgggggtcctctgcttttatgtcagttctcagaaacagagtcttcaagggcatcttctagaaagacccagacagggcacatggcagtgagtgccctcccacccccgctgccagagcaggtgtggagagcgccacgggggctgagcgactctgtccacaggccgggagagtggtggtcctgccctctttgtgggacatgctccgtaggtggaagggtccacggtgggctccaccccctagccacctagtcttggcttctgtgacttggtgcaggaagggtttggacctggctgttccatgagccaggcactggtgcctcaggacctcctggaacagtgcagctgggggtttctcggtgccagaggcaggctggccttcccaggctgggcaggtctgcagaaagtggggacccctcctcagagctgctcctcctgccagcgttcacagagtaccctgggccatggcagaggtgccaggcatgtgggccaccaccgccaatctaccgcgctctacccttccagggtccactatctggacaggaagagggcatcagatgagggctcccctccctcccccacaggcccatcctggcctggcccctctgggctgacctcacaagcccacattcccacactcaacagccccccagaggtcagctctactgccccttggagagcctccccacctgtccccccaaatctgtcccctccccacctgtccccccaaacctgtcccctctccacctgtcccctcacctgtgccctcctcacttgtcagcccagaagctagatgccagctaatcgcaattttttactgttggtggccactcaggcttcgacaaatgtccttgtcacagcctgcagggactcggcagaggcccctgggggaggagggggtgtggctgccctggaggggggtcagtggaggagtcattggcttcccactggggcaggggccgctgaccttggagcactctgggctctcctcctccccccgccccgccccgcccccccgctcccccttccccttccccttccccttccccttcccctctgaggcatccccgctgtgggctctggacagaggtccctcctagggctctatcagcgcaacagctaagcactcaggtgtggtgttgagtgctgccatgcaggcaggaattgatccctctatgcctcagtttccccacctgtaaagtggacccggctgatccaccaccctctcccaccacggccccctgcctgagtccctggctgaatccctccctctccccagggtacctggtggtgccagcgggtggtggcggcaccttcctgggcggcttctttgtgaacaagctcaggctccggggctccgcggtcatcaagttctgcctgttctgcaccgttgtcagcctgctgggcatcctcgtcttctcactgcactgccccagtgtgcccatggcgggcgtcacagccagctacggcgggaggtgagggccagatggcacctgggtacgcgtcggggccccaagcacccgcggtccctgggcatggaggaggagtggtgcagcacttgggagaggtggttttgaaaagggctacgtcacaggacagcggcaagggcaacacccgctcagcagggcacccggcagcatccacgtgaaaaggcaccatgccagcccccagcagtgcctgcgcttgggtcccggctgtgcccccgggcagtcatatgcctctctgggcctcagcactctgctctgtagctgtgtcaaatggaacaacagccctagtgttcggggtccttgaggctggtctctcggtgacataaaaagtgtcccaggatgtgctcctggagttgccatgtgctgggagtgggagggacacctgctggtcaggtggcaattagggaatatccaaaatacacgtaggtagcctgcacctcggccctgccctgcgggccccgggagtgcacctgcaggtgccgtgcaaggccgagaagcacaaagcagccgttgtggcattatcggaacctaagagtcatcagggtggacggggtcactacgctgtcctcacaacagaggccctgcccacaaaggagtggaggaagctcatcctgggccactgccaagacatactgtgaagtgggaaaaaggaaggagttggacaatgggcgcagtgtgctctgattcaagtgagaagtgcagatgtttgtgactgccgaggggcgtgtacgtgcagacgacccctgcaaatgcacagccggcctgtggctggagaaccgaggactggggtggggctggggccacgaggctgcctttgtgtacttggcgctttttctttcctaatgtttgtatttgatccatatgaatgtgttgcctgtccaaaaacaaatgaactagggaaaggggctgtgcatcaggcggacggtgctggggggcatgggtgtgccttccttgcgtgaggaggaaaaaccattctatcaccagaaggcagtgcccagtgtgagtgcccagcgtgctgggggcggtgcaagcttggcaagtttgtagacccgaaatgcaggctgcatggggacgagccccatggctgaccctgtgcctgctgggcgccagcatggctctggcctggaccctaccactcgcttgtcccccctctgcagcctcctgcccgaaggccacctgaacctaacggctccctgcaacgctgcctgcagctgccagccagaacactacagccctgtgtgcggctcggacggcctcatgtacttctcactgtgccacgcagggtgccctgcagccacggagacgaatgtggacggccagaaggtgagtggagccgctgcctaccgcccctgtcctcccctggaccctgggaaggggcccccgtgccttccccttgtaatcggagctattgttgggcttcccaggtgtaccgagactgtagctgtatccctcagaatctttcctctggttttggccatgccactgcagggaaatgcacttcaacttgtcagagaaagcccctccttctggttttcatattcgttgtaattttctttacattcctcagcagcattcctgcactaacggcaactctacggtaagctggggtcgggtgtgcgcttgtccagagctttccttgcagcaccctgaggcggagctctgcagatcctgagacaggagcactccaggaaacacccaggtctaagcgggcctgtctgtcactggtggcaggagagacctcactgtctctgatctctgacgaggggcttcccacttgggggggggtgatgatgtggctggggactggtccaggaggccactggcctagggggtgacttggcatgcaaccccacttctgtgggtgctgacgctgtggttttctattgcagatgtgtccgtgaccctcagagatcctttgccctgggaatccagtggattgtagttagaatactaggtactgtgcagtgtgaggaagccatggtcagttgcacagtgtgctcactgcacaagggcatgggcaagtgtctaaccaccaaggggatgtgcttcccagcaggaggctgttcccgcctgggaaggggtccattccctaactgtccactagaggggcccatcgtcatttatttgcccaaaggctttccctgggagatcatgggaaactcgcagccccaatgccgaatgcccaaagaaaggaacgtttaagccctctttgcacc

SEQ ID NO: 9062 - DNA, 6000 bp, Homo sapiens
ggaggctgaggcaggtgaatcacttgaggtcaggagttcgagaccagcccggccaacatggtgaaaccccatctctactaaaaatacaaaaattagctgagtatggtggcacacacctgtaattccagctactagggaagctgaggcaggagaatcgcttgaaccgaggaggcggaagttgcaatgagccgagattgcgccagtatactccagcctgggcgacagagtgagatactcaaaaaaaaagaaaacaccctctttttattgggaaatactgaaatcctttggagttctaaaatcctgtaattctgtgaaaagagttacctaactaatgtgcaaggcccatgtggtgaaaagagttccttggaatgaagttcaaaatagtaaaagtcctgtagaacagtgaatccactctgctgctcattcactcagtgcactcaccttgtagctttcctgccatcatggcaaaatgccaagtgctgaggattctttcagttggcaaatattagttgtgctatgattgccaggtactggagatgattgaaacaggacttctgccaccaaaaagttcacagcgtcatgatgtcacccagtaggtgttgagttgccacttgttattatccttggaattggctgcttcagagcagtcagctttttgttggaaggctaaggcagtgccatgttcacaccctgaatcctgagatgatgttcttctatcaggttccaaacttccctcatctttttataccgtgaagcctacgtgtgaggaagtgttgcccagccttactagctttggatttgggttgtgagagaaatgtacgcttattatacagcacttggtttggttggaggaaatgtacacttgttatatgtataatggctagagactgcctcctttcatgctgtattggacttagcagctgaacacaaggactgtctcctctttgcagctctttagttttagaattgctgggtcaagagttgttaggtggttctttatgtgagtctcaatatacctttctaaacagcttagtgctcccacaactttataggcgttagggtttttttcagtggtctgttgttcccacattcatgattttatttgatccttggaatatcctcattttgtagctgtggactttgaaattcagagcagttcccagtgatgcacagtggccttctgcacgaggcgcctggcctccttacgtctttgctctccttcccaccctgctgtattgtctcctgggcagtctgtgctcccttctcttagggtcattgtgacttgcaggaaacataatgtttggaaccaaactagggattccctgccaaatgttgtatcttgagtcatatcatcctcttcaggagaagctgacatgtgccctctaggccttttgtgtcatcccagaatgttttgcttctggtctggcttctcaggcattcctgcaataacgtgccttttccttcaatagggaagaacctacggcagatgagcaaggactaccaacaagtgttgctggacgtccggcggtcattgcggcggttccctcctggtgagaagctctcccggtcctgccacatttggaaagactgtatctgttccaggtcataccatgtgacctaatatgctggaccctgccgcctcagggaccttcagagctctccttttgctgagtcatccttttcttgactggtcactttcagacccccactgtgaaagcctgaaccaaaaataatttctcctggcctagaggtggtgaatgagagaagaggtttttgtttttccttgaagccacaaaaaggagttaataaggattgttagagccatcagtctggcattaaagagcagattggtgtggaattgggcaccaacaagaatgagtaatatcttaattaggtttaaaaacgatggtaccttgcgcatacatatgtaagattccttagagggaagagaggccattccctgtttgtgtaagagtatattccttaattaacaaattaagcagcaatagataaaaaaataaataaataaaaacaaaacaaacaaacaaaaaagaatgtattcctaaaattacctctttatttcaggaagaaagaaaagaaggaccgttgtctcaattttcacagtgaagggaactgggcaacaaacctcacatggatgacctatttttcttcctctggcaactccacctttaggtcatgaagagaggagaattgctaaagggaacaggagcctctaagctggctgcctccctcttctgcactgtgctctggcctggcttttgttgttgaaggggctgctttcctgctggcattcttgctccctggacagattcttgcaatacccaggtagcagtagcctgccagcgtggttttgataaaagcacatgcccacggtccattcccttttcctagcctgctggtttggatgagatcatataggacagatgcctcccttttttttttttttttaaagacagagtttcactcttgttgcaggctggagtgcaatggcactgtctcagctcactacaacctccgcctcccaggttcaggcagttctcctgcctcagcctcccaagtagctgggattacaggtgcccgccaccacgcccagctaattttgtgtgtgtgtgtttttaatagagatggggtttcaccatgttggccaggctgctctcgaactcctgacctcaggtgatgcacgtacctcagcctcccaaagtgctgggattacaggcaagagccacccccattttttcctaggtaacctgttttccctctgaaccctttattcctcttccattgatgtaatatctgtgatacgctttctgtaggctgaacttacagtgtggcttcatattctttttccattcatggtcttctgggcttggctcactgcttttctgctgaaaattcacacagggtttaatttttactctcactcctttcactgcttcacctatcagcagccctgggtttgcttcgtttccttatttatcttttagggtatgctttttatttgagaaggggtggggtaaatatgggcaagaggtgagttttgctcttacctgcaatcctttgtccggtttagtttgggcccttacattagctgctttctctctctgagtatgtgtttgtaactgaaagctaatggtgtggagaagctgtgcatgtgccattcttctaacctggctcataaggccaaggcatttttactgctggcagcactagctccagcagtaaaagaactccctgaaagaactcctgagacaggcttccctatttccagctataatacatctttggatcaagaggatcagtttttcctgtaacgtttgctttggtttaaaggggaccgtgtaactttaaaatttttttatttttatataatttcatacttactgaaaggttgtaaaaataggacaaagaattccccagataccttttacccagatttccttttgttttcacattttactacatttgctttttttttcttggagacggagtcttgctctctcgcccgggctgcagtgcagtggcacgatctcagctcactgcaagctctggttcctgggttcatgccattctcctgcctcagcctcccaagtagctgggactacaggcgcctgccaccacgcccagctaattttttgtattttttattagagacggggtttttcaccatattagccaggatggtctcgatctcctgacctcgtgatccacctgcctctgcctcccaaagtgctgggattacaggcgtgagccaccgcgcctggcctacatttgcttttttagctgctttctgtctttccttcgctttacacatagacatacactttttctctgaactatttaagagtaagttgcaaacatgacatctttttaccccaagtgtttcaggacatatttcctaaatataaggctctcatgtaatcacagtacactgagcaacatcagtaacaacactgaaaaatagttaactaattaatccacagattttattcacatttcaccatttcttcgagtaatgtgcttcactggaaaaggaaatatagatttatgcgtttctcatgctgttgtcctatatctttagccatttttaatctggaacagttcctttgtattgtatgagagttaaatttctcttcctttggggatattgggtatttcttcattgtgagattgaggtctgtgcgctgttgatagaaatcctgcagacatgatgctgagctctgtcagtgcatcacctcgggaggcagaggccgtctgtggctcccatagttgaaattctgcagttaaatactgtgtcccagcagtattaactgcagcaacttggttagggtggcatctgcagcttcccctactggaaagctagcagctgccttttcctgtatgccaggtggtatcaacagtggatcttgatatgcgttgccaaattatttgtaattcattttccttttttctctgaaaattcattgctggccttcttcgacctccttgttaactaggctgcttggtatgttcaaaggcatctctgttcctgtccccaggcatgccagaggaacagagagaagggctccaggaagaactgattgacatcatcctcctcatcttggagcgcaaccctcagctgcactactaccagggctaccatgacattgtggtcacatttctgctggtggtaggcgagaggctggcaacatccctggtagaaaaattatctacccaccacctcaggtaccagtagagaggaacacaagacgacgggcatcactcctcagccgtcctggggataactcactggcctgttttctggtcagcttttttaggagtttgagccctcgccaccctgagccctgatctaagtgtttggtaaccaggcttattgaattgtctccctccagggattttatggatccaacaatggacaacaccaagcatatattaaactatctgatgcccatcattgaccaggtgaatccagagctccatgacttcatgcagaggtacatatgtgtctgcatttctgtgtgcatgcatacacacgcccacacccccccacacctgaaacactcctcacaagccgagcgcagtttcctcattgtcttgggtggatttgttaagttctccccagttgttccagtcaccagcaatctgggtaattcagttcttggagcatttttggggactgtgctctttgggggacatagcccatcccttgagtttacatctagtggggagaggtggataaggtatgtatgccaaggtaagatgttgaggttattgccacaagagaaacacaaagtcctgtgggatccagtggcgagaaggggaaggccaacaatgggttgttttatttcccaagtaccaaagagaagaaatatttttttgcaaatcccatgtgatgttttgtttcttctctgtttagttggaaatgtgttcttggccaatgcctctttttttaaaattttttaaaaggtaatggctatgccttctttttttttgagatggagtattttctcttgttgcccaggctggagtgcaatggcatgatcttggctcactgcaacctctatcttccgggttcaagcgattcttctgcctcagcctcaagtagctgggattacaggcatgcgccaccacgctcggctaattttgtatttttagtagagacagggtttctccatgttggtcaggctggtctcgagctcccgatgtcaggtgatccgcccgctttggcctcccaaagtgctgagattataggcgtgactcaccgtgtctggcagctacatcttaagatatttcagttgtctcatgttaacagaaaaattaatgcagtcatgttttcaggcttgggaatatgtacctgtgccccccagaagggtaagacttagtcagaaggagaatcatggcgtagttctctgaaaacaactgcttctcgttcctgtagttgacatttgttggccagtaggcgagcacccagtgagataaagc

SEQ ID NO: 9063 - DNA, 6000 bp, Homo sapiens
ctgtaattcctgttctatttgctttacacttggccccttcaatccattctccctccccagccaaagagatcttctcaaaacccaaataggtcaggcatggtgggtggctcacacctataatctcagcacagcactttgggaggccgaggcaggttaatcacttgagtcctggagtttgagactagcctgggcaacacagggagatgccatgtccttttatctaaaaaaaaaaaaaaaagtttttaattttttgttttgttttatcttgctctttttctttctgtcttttttttttttttttttttttttttgggacagagtctcactctctcaccagactggagtgcagtggcgcgatctcggctcactgcaacctctgcctcccgggttcaagtgattctcctgcctcagcctcccaagtagctgggactgcaagggcacgccactacacccagctaatttttgtatttttagtggagacggggtttcacgatgttggccaggatggtctccatctcttgatcttgtgatccgcctgcctcagcctcccaaagtcctgagattacaggtgtgagccaccatgctcgtcctctttgtttctattttgttgttgctgttgttctgtattttgctctcagcagaatccgggacacttcatctggacaaaaattaaaaattaagccaggtgtgttggcacggacctgcagtcccaactactagggaggccgaggtgggagaatcgcttgagcccaggagttcgaggctgcggcaagccatgatcacaccactgcactgcagcctgggcgacagagtgagaccctgtaacagcaacaacaaaacataaacccctgctcaaaccctttactgactccccatcatatttaggaggcttgcttttcctggccccttcattaccttttctgtaatctcatctcatcccattctccctcctactttccacattccagtcacactgactgcttttcaattcctcaaacatggcaagttctttcctgcctcaggacctttgctcttgctattgtacttcctgaaatgttcttctcccaggtctttgcataattggcttggctgagtctcagcaataatgtcaccttcttcatcctttatcttcttacctaagttgcctgccaagttcgatcaaagcctgttcctcttgttctttttaaatttatcactaacgtagtaataataattattgtttttaggttttcactatttatttatgacaagtattccacattcaatatgctctccagtcaacagttatttgaggccaggcacagtggctcatgcctgtaatcccaacattttgggaggccgagaggaagcatataagagcccggatgctggtaggtatgggaagacagaagataactcactgcataaccaacacctggcggggctcctggtactcggtggacttgtgttctacgacatgagatggcagccaagaaataaacaaaaaataattaagtgctttatctgctcatatgaggtgtggtggcaacaggtgtggcctcaacatgcagaataatgctagtgagtttgtggacgtatatgaaatgctccaccagcaactgcatcatcagcatcaaagactacacctccatccggataaatgtggctgaggttgataaagtcacgagcaggtttaatggccagtttaaaacctatgctttcggtggggccatttgaagaatgggcaagtgagatgatctattctcccatcgtccaatgctgatggcattgctgatggcattgtctcaaataacttttttaagacactgtgcccgacccttcttctgtcttcccatacctaccagcatgcaggttcactgggggcagacctagtaagtttggcttttttttttttttttagatggattcttgctctgttgcccaggctggagtgcagtggcatgatcttggctcactgcaacctccacctcccgggttcaagcaattctcctgcctcagcctctcaagtagctgggactacaggcgcacgccaccatgcctggctaatttttgtatttttagtagagacgaggttttaccattttggccagactggtcttgaactcatgacctcaagtgatccgcctgcgtcagcctcccaaagtgctggtattacaggagtgagccactgcgcctggccagtaagtttctttttgttcatttgtttgttttttttttgtgacagattttcgctcttgttgcccaggctgtagtacaatggtgtgatcttggctcactgcaacctccatctctggagttcaagcgattctcctgcctcagcctctcgagtagctgggattacaggcatgcaccaccacgcctggctaattttgtatttttagtagagacggggtttctccatgttgatcaggctggtctcaaactcccgacctcaggtgaaccacccgcctcagccttccaaagtgctgggattacaggcatgagccactgtgtcctgcccagtaagtttcttatccatcattttgtcagtggtgtctagctcagtgcctgccaggtagcacatgaccaatgaagagtgtctgtactaacttataggaggtgagttagtggtgcagccaacactctgggcacaaaggactcgaattccaagtgaccttacaaactagagaccttatcaaaaacagagaatggaaaaatatcacctagggaaagactgagtgtttgatattatggctcaaaaaccaattgtgggctcaattctacagctagattaggcttcttatatggtatttgtaaagggctataaaaaaacatctgcaggaagcacgttcacatcaattacctcatttaatcctcataccaacctaggcagtggatagggcagacgaaattgtcttaagtttacatactaggaaacctaaatgtagtttggttatatgatttccccaaggtcactgagcaaggcagaggcaggccagggaccctgtgccttttctcgccaaggctgcatgaggtgtataactcatttattctaggatcaaagaaatattcaaacttaaaccttcacatcctgcagtacagacacatccctcttttctaaggcacacattcctggagacagcacctgggacccattcaagaccctgagccttttcttgtgccccaggccccacctcagacagagaccaagctgtttgaaacagggaacaagcccagccgcggtagctcacacctataatcccagcactttgggaggctgagacggggcggggggaggtggggatcacctgaggtcaggcgtttgagaccagcctggccaacatggagaaaccccgtctctactaaaaacacaaaaattagccaggcgtggtggtgggtgcctgtaatcccagctactcgggaggctgaggcaggagaaacgctagaacctgggaggtggaggttgcagtgagccaagactgtgcctttgcactccagcctgggcaacaagagggaaactccatctcaaaaaaaaaaacaaaaaacaactttttgtagtatacatacagagaaacacacttaagtgtgcaggttaatgaaatctcacaaagtgaatatgcctgtgtgcctagcacccatagcaagacatcacacatggccagctcttcagaagacccctgtgcctttgcttagtcactatgcccccagagggtgacagtatcccaaattccaacagttttgtttgcctcttttctttaaaaacaaaacaaaacaaaacaaatttgctgtcatccacttcctgtttgaaactcttttctttttcttttcattttacctgtccctcccattcaacctcttttctactttatataactactgatagatttttgtcctttttccttatttccccctcaaagactaagtgtgtccatgagggtctaggttaaattcccttattgaaaaaagcttccctccctttcctccttccttccttccttccttccttccttccttccttccttccttccttccttccttccttccttcctttctttctttctttctttctttctttctttctttctttctttctttctttctttctgtcttgacaaggtcttgttctgtctcccagcctgctaggctgacgcgatctcggctaactgcaacctccacctcccgagttcaaatgatcctcccacctcagcctccccagtaggtggaactacaggcgtgcaccacgatgactagctaattttttttttttctttttgagatggagttttgctcttgttgcccaggctgtagtgcaatggtgcaatctcagctcactgagacctccgcctcctgggttcaagtgattctcctgcttcaacctcccgagtagttgggaggcacatgccgccacgcatggctaattttgtatttttagtagagatggggtttcaccatcttggccaggtggccttgaactcctgacctcaggtgatctgcatgccttggcctccctaagtgctgggattataggcgtaagccatcgcggccggctaattttgtattttatatagacacggagtttcaccatgttgcccaggctgggcttagactcctgggctcaagccatccacccacctcagccttccaaagtgctggattacatgtctgcgccacagtgcccaacccaaaagtctcatttctataccctggcactggagccttctgtgttttgcctgtaacctatgttttccacttggcttatctgatggttaattatatgtatcaacctgtctgggctaagagatgcccagatagctggtaaaacattatttctgggtctgactgggacggtgtttgcagaagagataagcatttaaatcagtagacagaaaagttccactttcacccacgtgagcaggcatcatccaatccactgtgggtccagacagaacaaaaaggcagggcgaaggcacatttgcaccctcttctggagcagggccattcatcttctcctgcccttggacatcacagctccaggaactcagatcttcagactcagggtgaaggacaccaccagctttccaggttccccagcttgcagacggcatacggtgggacttcttggcctttagaatcacgtgagctaattcctgcaataaatcccctctttcatatcctctttttttttttttttttttgagacggagtctcactctgtcgcccaggctggagtgcagtggcgtgatcttggctcactgcaagctccgcctcccgggttcagtccattctcctgcctcagcctcccaagtagctgggactacaggcgcctgcaaccacgcccggctaattttttgtaattttagtagagacggggtttcaccacgttagccaggatggtctcgatctcctgacctcatgatccgcccgcctcggcctcccaaagtgctgggattacaggcgtgagccaccgcgcctggcccatatccttttatatatccctctatatatcctgttggttctgtttctctggagaaccttgactaattcagtttccaattctccagaaccctgggggttaatcctgagttctttcccttcgcatttcacctctcatcagcgggcagcccctgttggtttggtggaacaagtaaagtcattgagtactaactgagtacttcagtagtaaccgaactgagaacttactgtgtggtaggcaccacgtgaggagctggcatacagaattaaataaaccaagacctctgccctggatgcactgacaattagtgagggagagaaacagaaaaacaacttatttccatacatttctttctaaatgctgtgatgcatggagggagtatacttgcaccagcctagggactcggggtggttccaggagaggccaaggtgggactttctgagcaagaatgatccagaggacattaaggagatccaggcagtagaaatgtgatggccttgaggagcttttgcagggacaacagaaatggacatagccacactctcctt

SEQ ID NO: 9064 - DNA, 6000 bp, Homo sapiens
ggagtcctgggaggtcgggatgttgggtttgcgttgtctaactagagcttcatttagaagaggcagatggcagagcctggggttggggagagtgcagcctcagaggcacgaagatgacacttagacccatgggactgtctgaggtgacctgaggaggaggacacctcaaggggagaaaggggcccagggcagaagagtcaccccctggcctttctcgactgtgaagaggtcttgggggttgagggggacccagccagggaggtgggggaggtgtggcagtggggtccacctagccactttctaaggaacttctggtctcagtaagaaaaagagtcttctagaagatgaatctttaaaagcctcagctggagtccgtttccactctctatcattttctcatgagtgtcctgagagcattgcattctaccctgacggttctcagaagtgatgccagagtggcactttcttcaaccgctaacaagaggccccagtggtcagtagtatgtcttaagagccccagacacacagaggaggcaggaggaagccctcggtgccccacatgtgctaagagggcagcagtgagggcatcctccacaccccctggggtttgcagtctcttaacttctcgtttcccttcctctgcaccagagctgcacagcaagttacagtcctccgaggcggaggtgcgcagcaaatgcgaggagctgagtggcctccacgggcagctccaggaggccagggcggagaactcccagctcacagagagaatccgttccattgaggccctgctggaggcgggccaggcgcgggatgcccaggacgtccaggtcagccttctgcctggggccacggggaggaaagggaactccatctagcaggtgggtggactagccccgctgcgtgagatgagtctcctggagaccaaggagcttttgtctctcattccaggccagccaggcggaggctgaccagcagcagactcggtaagctggggaagcagcctgcctgctcacttgagcctcagcccgggggaccaaagacccttggggggccagggttttcaggagggtgctcaggtcctctgcagaagagcccctttcagaggctcccttccctcccccatcctccggtgatttagaggacgggacaggcctgggcgggaaagaaggcggccttgcagagagcttcgtgatcacatcgttccagagtggcctcagccagggtgggagcaccccctgccacctgccgtccgtccatccacctgtccatctctctgtgggaagggactgactggtcagaggttctgtgtgtacaagcaagggattttaggggctgaggtcaggaactctaacaggaaaaatggttgcacaacccagaatggcgaacccaggcttgctgctggagcacaggtttgaggcgtcggggcagagctggcagcgtctcagcgttgttttcctccatctgtgaggtgacttcactgctggccagaccttgttttccctccgtgtcagcagcaccagcgccaggccatgttcggggagtgtttatttgctgttgctaaggccggccaacacctgggtggggtggctcgagtcaggggccggagtccttgtgaccatcacttctggggctcgcctcctgtagcacatgcccacagtctggggaggcaggtcctggccgccgtggctaggggtccatgcagcagtaggtgggggaggcatggagggtgtcctgcattccctcgcacacggtcagatgtgtcctaggccatcagttcacaaagttcccttgtcctgaccctcgtcaccaaagaagcacctccctgtgtgcctctcagcagaggcagctccccaggccacagcccatgttccctggcatttgggctctgcggcttggggactgggaaaggaagccagctgccctgagggcccagaatgacccacaaccaaaccttgtccaccttcctttcccaaaaagcatgggcaaactttgtttctcctggtggtgtttgttggggtagagaggttgttgttttgctcttgtgttttaagatcagattcttgggccacacagcatattactaggataatgaactcatgttgtagttaggattaatctgaattttcttgcatcatgtagatgtgtctggcagaaattggtgcttttatttccttctcaaacagttgatctgaaagttatgtgtaggctgggccatcctgctctggagtagagaggagcgattcagccccagatattctagaattcgggcagtggctgccaagggtgtgattgtcagtgtgtccttgccactggcctgctgacacctcttcctcggagtctcattcttttggggacgctcttggggtgatttgccggcggaggctgtcacatgatgcagggaaaagctgtgagggccccaggagagctctgagggcagggtcacgattccacctctcctggaaacccagctctccggtgtcaccaactgggactctggtgacagctctggggtcagtgctctggatggcggggggaggggagggtgttgggggctgctcaggcttccctgggagctcacgctgggtgaggtgggggcagccagaagggaccgtccctggccagatggttcagcctcgaaggtactcctccctggatggggcctcaggtgggatctgtaggggctgtagccccttggagcctaggcggtgacctcgttgtgtcccttcagcctcaaggagctggagtcccaggtgtcgggtctggagaaggaggccatcgagctcagggaggccgtcgagcagcagaaagtgaagaacaatgtgagtgcggcaggcacaggcggggacggacgggccagggaagcacaggtggggccgggaaaggttctgctatgtggcacccgccctggactcgggggagggctgagcttgtgtttctacaccccattgtgctgtgggggtccagggtgtggggggtgcttctactcacccctgagttccgccaaagacccagggctgactgcctgtggatcagcctgcgccactcgctcaagcgtggagtcatccctggggtggggacagtgtgctgttggcctggcctgagtcacgtggttgccctaagtggggatcctggtcccaggagaaggggatgtagaagctcggcaggtggcatgcctgctgtcctggtgtggcctcggccacaccctcctgcccccttctcacagagccgggcttgctggctggccctgttgctccctgcagaggctgcagcttcccaaggcaggccctggccttggcctccctgtgccaggctctgccagagctggcccaagggatcagcactaaccatttggtagcaggaacctcttccctttgaggacacaggctggccctccctcctccctttggctagtggtgtctttatcgaaagggcgccacctcttcaccctgtgccatgctgcccgcctctggctacggcacccaggccttgtgttcaggcgccatggtcatgggccaaggaaggggcattttgtcccgtggcaggtcctctgtgggccagggtggcatcaaggagggtctctgggccctgtcctgtctgacaccagcttaggcagcccgtgctgccagtgcaggctgctgacctttcacctgtgtcccctccaggacctccgggagaagaactggaaggccatggaggcactggccacggccgagcaggcctgcaaggagaagctgctctccctgacccaggccaaggtcagagcccgaccacactcacacccccaccatggaaagtgcactaggatgcacaaatgcactaagacgtacagatgcactaggacaccagatgctctaggacgcacagatgcactaggacagacatacagaggcactaggaacgcatagaagcactaggacacacagatgcactagtacgcacagacgcactaggacacacagaggcactaggacagacacagaggcactaggacgtacagacgcactaggacacacagacgcacaggtgcactaggacgcacacagtgcactaagtgcgcacagagtggccttggcctcagagctcctgagtccacgccagaccccggctctacatccacctccccctcccacctccttccctgccgtccttcccttcttcacttgctcctttccaagagagggatgggggtgcccccttgatgggcttctccgtgctggtctctctggctgagggtacagagctgctggggtgggactggaggcagtgagcccgaggctgcactctttatgagcttttttggtgttatttctgttgtgtgtccttttgtcgggtaatcctgctgcttgggcctctgaagtcatggcccagggggctctgtgaggagactttttttttttttgagacggtgtcttgctctgtcgcccaggctggagtgcagtggcgtgatctcaggtcactccaacccctgcctcccgggttcaagcaattctcctgcctcaccctctcaagtagctgggattacaggcgtgcaccaccacgcccggctaagttttgcatgttttgtacagatggggttttgccatgttggcttggttggtctccaactcctgacctcaagtgatctgcctgccttggcctcccaaagtgttgggattacaggggtgaaccaccacgcccagtcccatgaggagtctttaagtcacagaggggaggacattgtttgcagcgagcactcggggaacagaggccgcgttggccctgcgctccatgctgtccaggtggggcgtgtgcaggtgtctcccagtgtctgagcccacgggttgcttttggggtgctgggctgtccaggagccagtgaggaggctctggccaggggacatggccagcagcagctgcaactaaaggccctgcccacactttgaggtcacacacgttttcctacctcatgaaagggcctccactcccagcctctctcacaggaatatctgccccaatggcaggagctttgcggtgattcccaggaagcctgagggttgtatcagatgaggacaactagctagggcaggaggtgaaggatggcctcaggccaccctgtgagagctatagttagactcctagaatcttggccttgtagcccccagtgacctcagagactgtctggctaccatgtggtaaatgaagctgtgaccagagatgtcacctgacttgattgtggtcacacatccagatagaaggtggcctctgggtctccagcttgccttgactcacaactagaggcctcagtggtggtcgtgaggtcaagggtccacatgggtcacgggccctacctgtggataacttggccagccaggaagggcccgcttctcaggtgtgcgtcaggccagagggcgctgcgctcaggctgggtgtccggtggtcagcatccttcatgcacattccaggactctgcttgggggagttaacactccatcagctctgatccaggtggagttcctggggcctccctgggtcttaggccaggcctgtccaggtggtggcagggccagacacaggctgttaccccagcagccttcccctcggggtgtgggagagcccagctctctcccgggggacactgtggtcctaggctttgcttcatgattcccttgggccccctttgtttccttttgtttccttatctttgttgtgctttgaatgggggccgctggctcttcgttgaggactgagggggtgtccgacccagcatggcacagggtgcaaagtccctgtctcctctgagtgggcttctccctctgcagagggggaatgctgatccaccctctccagggtggctggagatgagcctctctgggttgccccttcctggctgccactagcccctaaccgtggtgccgccagcagacgcactgcttccctgccttcacccccatccccatcacagctctagattccaaaacattgggggccatgagtgtcctcccatcccttcttcctgccctgg

SEQ ID NO: 9065 - DNA, 6000 bp, Homo sapiens
ggttctttccactctgccatacaaggcagtcattaaagatcatgaactgaaaatcaggtgccagtgatgagctgtgtcattgtgggcaaggtatctgtgccctgtgttgtaaatatttgtgattacttttcatccagaccttaacagttaatggctgtgtgtgtacctaacactgttattttagaactcccagaatgctagaaaaatgcctacctttaagtgctaaaagtagggagactctaaattttcagttttctctggtaataaatgtgagtgatttatcttctaggctaatgttgtcctttaattgtgtgaaatattaaatgaattagcctattaaatgaatagtcaaatgaagaaaatagtccagacaatcatgttgggaaaaaagctattaagttattatttttgcatttcagaaatgaatttttctcagtataagggtgaaacttagcatttcataaatgcatttttatattttaataggttttggttcttcaaaattgctgcccttattggaatcatggttggctctttctacatccctgggggctatttcagctcaggtagggttcaccattgagggggttaattttaaactatataaactctatagatgattgagttaaagctacattttaggccgggtgcagtggctcacacctgtaagctcagcactttgggaggccaagacgggcggatcacctgaggtcaggagtttgagaccaacctggccaatatggtgaagccctgtctctactaaaaatacaaaaattagccaggcgtggtggtgcacgcctgtgattccaggtactcagaaggctgaggcagcaaaattgcctgaacctgggaggcagaggttgcagtgtgccaagatcgtgccactgcactccagcctgggcgacagatcaagactctgtctcaaaaaacaaaacaaaacaaaactaccttttaattactgtttttgtagaactgacaagtaaatgagatggtatccgattaatatgacttagtacctgcaactcactatatatatatatatattttagacagtctcactctgtctcccaggctggagtgccgtggcacgatctcagctcactgcaacctccacctcctgggttcaagcagttctctgcgtcagtctcccgagtagctgggattacaggcgcccaccaccacgcccagctaatttttgtattttaggcagagacggggtttcaccatcttggccaggctggtcttgaactcttgacctcatgatccacctgcctcagcctcctgaagtgctgggattacaggtgtgagccaccacgcccggctgcaactcattattaatatgtggatttaggtcaggaggcattcactgcacctctcagattttctggaaccatatgttaatcttttggcaatatcttaatagtttgtgttctcacttgatggaatacaaagctaatcagagagcctgtcaaaataaggacttacaactcttgtgctcccctatctctgtcttaacctacttcctaagcatggcatcaggtgacatctttagatttctactgtgatttaaaagaaaagacttatagtatcatttggaactcaggtcccaggcttcccttggcacaagctaaaacatattttaaaaggtctgaaacccagtagaaagcttttaagaatgccgttgagtttggaatcttgctgtactgctggagacagaatgtctttaccacctctgtcttgttttaattgaaatccgttcagaatgttggatcttctgaaatgttactctatggtagagaataactttgttctcttggttcttgtagtctggtttgttgttggcatgataggggccgccctcttcatcctcattcagctggtgctgctggtagattttgctcattcttggaatgaatcatgggtaaatcgaatggaagaaggaaacccaaggttgtggtatgctggtaggtatctctactcacctatgttagccatactgctacattaagcacggtgtacaataaaaatcatcattatagtcccagcagctatagtcctcagggacagaagtccaaggtgggagaatggcttgaatccaggagttcaagaccagtctaggcagcatattgagactccatctttacattagaaaaaaaaaatttgccaggcatggtggcatatacctatagtcctagctactcagcacgctaaggcaggagaatctctggaatccaggagttcaaggctgcagtaagctatcatcatgccactgtactgcagcctgggtgacagagcaagaccctgtctctaaaaataataataacattaaataaaaggaaaaaaatccacaatttccagaatttggctctgaattatatgcatcactggaagaaagtagcacagataatataaattgttcgattttcccaatttatgtattttgagagtcataatttaattacatgtgtttagataaggaaaaacagttatatttagtgacttagttctggttttgataaccttgtttccatggagaggaaactcagatgggttcaacatatgggacagctgcccacctactttaggcagataggagtgagtagtccttatggccttattcagagaggggccccatacctgctatgaaaaactttctggtgggaaaggggcacttacaatttctagagtgataatgggatttaacagtagcttgcgaatatattttggctatgttagagcacttactacttcataatatacatttgcacacatttctgattatttccttaggacagattcccagaaatagaagagtcaaagtgtatgaatattttaaaatgctttcagtacatactattgaattgcgcagttttattttcatttgatttagttttttaaaatatttacatgtttttaaaaatactatgtttaccataaagacaaatgatagaactttataaagactaaaacatgcaaatctccacctatctgcaacccattttcctttccagatgtagccactcttgtgaacctttatgtatttatgcattcaccttgcttttgtatttaaatgtaaacaggattgtactgtatgttgttccatgacttgctcttttcacttcctacatgatgaatatccttccttaccagtgagtgtaggtatgtcttactcatttaacctgcattcaagctcctggcatggagtttactgtaagctgcatggtattccattccatacaattccatggcattccatagcggagtataccataatttatttaacctttaccctagtgttggtcatttaaattgtttgtaatgacaattttatttttatctattttttttctttttttttgagattgggtctcactctctcacccaggctggagtacagtggcacaatcatggctcactgcaacctctgccttcctggctcaagctatccacctcagcctcccaagtagctgggactacaggtgcacaccaccacacccacactaccacgcctacaccaccacgaccggctaatttttgtgttttttgtagagacagggttttgccatgttgccggaactcctggactcaatcgatccacctgccttgccctcccaaagtgttaggattgcaggcgtgagccaccacacccggctgttattttctttaattcattttggatcatacaactctagaagaatttattgagttgcaaattggtcatactttacagtaactaagtgtagaaaaatcttgtatattcagaggtgaaaacattaagtgtgctagtaacttaatgtacatcatttaattttagacatgcaaaattcattgagataagtagaaactagttttcttaatctgggctttgacttgaatacaagttagctgagctcatcattcttgcagttggtctgagtgtactgtatgtgctgtttcatgttttctaattttcagagctacacagctaattgttttgtttgttgtttgagatggggttttgttctgttgtccaggctggagtgcagtggcaccatctcggctcactgcaacctctatgtcttgggctcaagcaatccccctgcctcagcttcccaagtagctggggctacagccttatgccaccatgcctggctgatttttgtattttttgtagagacagggtttggccatgttgcctgggctggtctggaactcaggctcaagcaatccagccaccttggcctcccaaagtgctgggattacaggcatgagccaccatgttcagccaacacagctaattgttgatttttagtgtgaatggaaaagaccattactttagatattaaaaaatagcaaatgagccacttttccagttcagggacagtcttattgtttgtgatgggaaatggatttagatagccaatggctgcagaggaaaaaactgtcataaaaagataccagtgtgtgtattctgttttcctctaacaccatcctggcatggagcttgctgtgaactgggtcattttgagggtaaaggaatcatttaggttcctaagaaaagctcacaatacacattaattaacatataggtagcagtaaactctagctggaatgatcaaatgtctggtaatcaacccatgaaatcaaatcaggtaattcaggaagtgaattcagttgcttggtggattttggaatttaacatcaagccaattgaatacaatcttgatactttaaccttgagacctctgtaattttactgtaaattaccccagaaaagtgacataatgtctcctcatttttatatggagtggaagaaaattggccttcattattagtttattatagttgtggtcattcatattggtttccctttctccagctttactgtctttcacaagcgccttttatatcctgtcaatcatctgtgtcgggctgctctatacatattacaccaaaccagatggctgcacagaaaacaagttcttcatcagtattaacctgatcctttgcgttgtggcttctattatatcgatccacccaaaaattcaggtatgattgtttactacttctttctcctgtgaaaggtttttaattctaagcttaaaatctaggtaccctttcttatgaatttatgtctaagtttatccacttgaacatttttccatattataaagtcttcataattctatttcatgcctatatcataattaaatgaatttcactatcattaaaaaaaaacccaggtaacttgaaaatttatagtgcttttttttttttttttttttttttttgagatggagtctcgctctgtcaaccaggctggagtgcagtggcacaatctcggctcactgcaacctctgcctcctgggttcaagcagttctctgcctcagcctcccgagtagctgggatcacaggcagccaccaccgggcctggccagtttttgtatttttggtagagatagggtttcaccatcttggccaggctgaactcttgacctcgtgatccacccgcctcggcctcccaaggtgctgggattacaggcgtgagccaccacgcctggccgggaatgagtctttttttttttttttttttgagacaaagtctcactcttgtcccctaggctggagtgcgatggtgcaatctcagctcactacaacctccacctcctgggttccagtgattctccagccttggccaggcgcctgccaccatgcccggctaatttttgtatttttagttgagacggggtttcaccatgttggcaaggctggtctcgaactcctgacctcaggtgatccacccatctcagcctcccaaagtgctggttttacagttgtgagccaccgcatgtggctgggaatgattcttatgagtcattagccaagatattttaggggaattaaactgaaaaataattgattttaatatttcaaaacaaaactcatgctcttgagttctaaataccatagtttaggctgggtgtggtggcttaacgcctgtaatcccagcactttgggag

SEQ ID NO: 9066 - DNA, 6000 bp, Homo sapiens
aagtaatacattttataaaacattcaaacattaaagaaatgctaaaaagaaaaaaaaaagaaacgcttcccactccctatcaccagtaattgcagccccaaaggtagccacttggtgtatacatcctatgagatcttagactcattcactcgaaaatattaactcacatttaatagataatacatctcaaggttcaaaattcaaaaagtccaaacaggaatttagtagcaattcttcaccccatccagtcccccagccacctagtctgtatccccaaggcaaccaatgtaattttctcatgcatcttccagagctattctgtacatgtacaagaaaataaggtacatgtatttattttttttacatgaatggtagctataaacacactatacacacggcttgcctttttcacttaacaatacattttgaagattattccatatgagtacataaagggcttcctctttctcttatttaatgggtgttatggatacactaaaatttatttcaccagtcccctgccgatggacacttatgctgtttccaatcttttgctacaacaaacaatgctacagtgaataacctcacacatacatcattttgtgcttgtgtgagtatatctgcaggataattttcaggaagtggagaagcttggtcaaagagcacatgcattcggaatctcgatagataatgccgaaatgtaccagacgacactcccgtgagccacgtgtgagagtatccatttcccctcctcctcacctacagtgcaggttcactgatgactactaagcaaggaaatgacatgctctggttttaattttaacaagatcccttgggctgctgctacagagcttggctcagaggcaggaattagaggcagggaggccctggagcccaggatgcccagcatagagtcccaaatggcaaaaaccaaaagcctgcgccctttcttgacagtcactcagactccttaacctacctgtctagctaggaggccagggatgatgaagaattcatagtgaggattgattgagatgccgagaagagagaatagggggtggcagtgagatcctgccaaggacaaaccttgggggccaacacgaatctgcaggactaggttgggggaggaggcagagtttctttccatgtagtaggatttattcatctaggcaaggggtaccatcaacagaaacaggaggagtgtaaattaagaaagctactagagcagaggaatgagtgaatgtgccctggaatctgatgcagagctaaaaaattcagctttaaccatattggctttaagatgagcgaaaacagggaaagaaacacctagaacttctagcaggccatgtgaaatacaggtgtggagctccaagaatggttgggtctcttaaagcttcagtttccccatgtgcacaggggagagaatcatacccatctcacttgatggtcgtgaggattcaatgggacagttcactcattcattcaaccactatttattgagtgcctattatgtgcctggctctgtgctaggcactaggaatgcttcagtaggcaaatctaaggctctgcattcatggcacttttattgaagtagagaatatagaagatgagcatgtacacatataacataacgtcaagcagtgacgagtgtgaggacgaaacctaatgcagaggaaggacttagattaagacttcacagccaggcatggtgactcatgcctgtaatcccaacactttgggaggccgaagcgggtggatcacttgaggccaggagtttgacaccagcctggccaacatggtgaaacccgatctctactaaaatacaaaaattagccgggagtggtggcacatgcctgtaatcccagctactcgggaggttgaggcaggagaattgcctgaacccaggaggcagaggttgcagtgagccaagatcgcaccactgcactccagcctgagtgacagagcaagactccatctcaaaaagaaaagaaagaaagaaggaaggaaggaaggaaggaaggaaggaaggaagaaaggaagaaaggaagaagaaagaaagaaaaagaaagagaggaaagaaagaaagaaagaaaaagaaagaggaaagagaaagaaagaaagagaaagaaagaaaaagaaagaaagaaagaaagaaagaaagaaagaaagaaagaaagaaagaaggaaagaaaaagaaagagaaagaaagaaagaaagaaaaaagaaagaaagaaaaagaaagaaatcacaacaggcctttctggggaagtgaccttggggcagagaccaagtgcagtgaaggtatgagccatgcagatttctggggaccaacactgcaggccaagggaacaggaagtatgtaaagtgctcagcctgagccccagcacaaaaggatagtgatggtgatgaggaagccttcatgcattcagcctgaggaggtggggaccctagggttgataagccttggggagatggggagaagaaagaacatagaaataagagaagggccaagactgagtcttgggaggtggcagggctgggcagatgaaggatcagagagtggggaggacatgagagtgggaaggacagccagtttctaagaaacagcatcccccgcagcagagggcccagaagatggtgacaactgggaggccaccgggcctgggggagcagaacagttcccaagaggtcagaaagtgaggaccaggcaaggcagttgaaggagttcaaatggggtccctgctccagagcccctcaactcttcaatctgaaagggtcctttctggcacgtcccaggaagaaccaggttttgcctccccttgcccacagccccatggcaagagctgccctggtgccattcccagccccagctctagttccccagccaggaatattctgctgatgcgggtctatatttagcagctgctgcgaggtacagtctgttcttgctgtgcagatagcagggagcagagccggaacggggcctgggaggaaggtgtgagggaagggaggaggcggggcgccgcgaggccccaatgccagaggaggaattaacttgtgtgttttaaaggccaggcctgccagcaggccccccacaggggcgacagggatggcatttgtgtgctaatgaggcatcacacgggctccagggccccttttgcagcatttggaggggacagcaggggaggccaggacaacagctggaactggggacgatgggtgaagacaaggctgcgggagctgaggccaggttataattaccagcccccgcccaccaccaccccagcaggaatagaaatgttctccgagatttcaagatctctgctgaaaattgtcaactgagccagagtcatccattttacagggagggaatgaaactaacatttgttgagcaccttctaagtgccagatcctggggtcaggataatgaagtagacctggtttctgccctcacggagcttctgctccagcagagaagcaaatggatagctacacccaggctgtgagaggggcagtggaggggcactgggagtcagccagtcaaaacgtcatttgagcacttgctgtgtgccaggccctatagacacgggatgaacaagaccagcatggatttctgcctctgtgaaacttgtttatggaggtactcaatccagaacttgaggaaagagatcagcaaggcatctccaaaatgtgaggcctgctgctggaagcttcctctcattcagtcctctcaacagccctaccaggtgggtgtctccatttcacataagaggaaacagaggctcagagaggcccaggaacttgcccatggtcagctagcatgtaaatggtggaaagaagacttgagcccatatctgtctggccccagagtcctcctgcagcctatctgagtctgtgcagccccagcacctgtagtaggccctcggcaagactgtaatgaatgaatgagtgaacggatgaagtcaaagagccagaagctttcaagaacaacttcatggactgttttggaatatttgtacccctagatctctcagagggcaatagtctccaccgtgcttctcccaacatcaggaggaagacagtggagtggaacatagtagataggaaaatatgttatcaattcctccccgccctgcacacggctgcttactaatgtgactttgccactgttctgggcaagaggtggagtctgtttccctaccccttgaacctgggttcgcctgggactactttggccaatagaatgtggcagaagtgatgttatgcaaattctgacattaggccttaagagaccttgcagctttcacgtttactgtcctggaacacagtcctgagactgctatgtaaggaagccagcctactggaggatgaaagaaccaatgtgtccccgccgacagccaagaccaactgccagacatgtaaatgagccatcttggaccttccagtcagctgctcctccggtttaggctcagatgcgtgagtaagcccagacaaaatcagcagaggaatggcccagccaactggatttctctatcagtcatctagagctatgtaaaaaaaaaaaaaaaagaaaaaaaaaaacccaaaacctggtagcttaaagcaacaataatttattatttgtcacaatttggtgtgtcagcttggcagttattttgctggggtcactcatgcagcaacagtcagctgtcgggtcgctgggagtgacttcactgggacagctggcaggactaggcctccctctccatgtggccttttatcctgggcttcttcacagtacaatggtctcaggattccaagaggacaggccgcagcatacaggggcttatcaaacctctgcttttgtcacacttgctgatgtcctattggccaaagcacacttgctgatgtcccattggccagagtcagtgtgggagggaatgacccaagggcgtggataccggaaggtgtggttcactgggcactgtcaccatagcaacctaccctgttccctggatcccgagaacaaggcccagggggcccaactcacacacacccagagatggcacctgaatcctacacaccacaaggcttcaggaccagtttccaagtgagaagagtgtcgtgtccccagttcctcaggagctggaagtgacagggacagcaaagaaggcagccacgtggagcctctctcactcacagaggtggagccaggcccctgctccagcccccactcagagctgggacactgagcctttggtgcccaagcccatagatacacagtgactccacatcctaccacgaatcctgtacattcactgaggtcctggatggcaagtgaccagcacaaagcttagcacacagcaagtgctcggctaaagtcactccctctccacctttccacctgggatcccctgctccctggcctggtggctgctgcactgtaagcctacctgccctcccctccccaccccccaccatctttcttcacccttcctgcgtctccctctctgttttctgtatgtctgttcccgctctctcagttgttctttgcccatttttcttccctcctttctttctcttcctctttgtttctctctaggtctctgtttctctcttactgtctctttctgggtatctctggctttctctctggtttatctacctccccccgcaatcttcccttctctgtttttctgtccctttcagtctccctctctgtctgttcccctcccttcccctcccctaccttcctttcttcccttcctctctgtctctttcctcctgtctctcactaggtttctccctgtctctctttccctgggactccttttcttctttctctcctcttccctgtccatcaccttcgctctcttcctcccctctgtctgccttccattctctctttccaaccccccagggtggagaatatgacacaccccaccttccctgtacagcccctgctgtccagggctgcaaagcctcagcgtcctggctatgcactttctacacgtgtgacct

SEQ ID NO: 9067 - DNA, 6000 bp, Homo sapiens
aggaaatgaagaacaagcaagtggggaaccaggtgagcaacggtgtggaaaaaggaaaatggcagcagaggaagcaggaagagtcagggagcggtgggatcagaaggcttcctggtcaccccctcttagcatgagacccaccagttccatttctttagtatttactctttaatatgtattgactggattatttttaattttgttttcgggggggcggggcacaaaattgagatcccacagtgacttctgtttgtgtcttgcttcttttcacctaatacatatttcccttctctcgcttctgattttgggtaacttcaggtagatgatgccccagtactcagatctcattttgctgtattcgtttattgcatttttaggttctccttcatattattgtaaggagttgtaatataaaaccccttataaaaaccagatctcttgagaaagtgaaggatcacctcctaatttatctttgctatcattccaaatcagttttgcctatactgattagttccaaaaggaactgttgtgagccccatcagaaaagagaccttggcaggatctcctgctgaccaggggtcacgatgtgacattttgcaacttgctccccacagtactgcatctggattgatggcctcagtgcccttctggggaaggacatgtccagtgagctgaccaagagtgacctggacaccctgctgagcatggagatgaagctgcggctcctggacctggagaacatccagattcccgaagccccaccccccatccccaaggagcccagcagctatgactttgtctatcactatggctgagcctggagccagaaacgacggtacccaggagaagggattttgggcccaggagaaacacttacattctggtgccttgtcttttgcttgtacagaatctgtagtgattttggtggccagtaaatgccagccatttctcaaacccacctcggaccacccagagtttcctcttggtccctgtctactaagagtcatgaaggcagggtgctctgcccactccatcaccatgaagcctgggattgggccacgaggaacaaacagcagatgcccttgccttccagtccaagaaactgcttcttgaaatggatttaacaacagccactcaccttttcctcctgagcctgctctctgatcagctggatccccacgtgagcaacagctggcccaggaaaggctgcctgcagaggacaggtgtgttgggcgtgttgagagccttgaagtgactacctgtatcttagatctgagtacaagcctgaggcttttgcttttgtcttttttgatgagggctcactccagcttcatatggtgccaagacgttgctgcttctgaggttggctctaacatctctggtctttagagccaccagatctctctggcccatacagatatcagagcagacggaaatttctccctgcaagcgctcagtctcatcccagcaagtcaaagacctcctggccaagtcctgccctcttaagtctccaggaacgctgcagggaaaacccagctgaggcctgggcctagactgtggtgaggtcactagattctactgctcttcccccacattaataccttttccttcctcagagagaaatctcccctaacctgaattgcagccccctccagtttgctttcctttggccttccagaccccaggaagttggccttcccttcctagtgctatggtttctgccattggccatgatttcagggagctggctgaggccggctgaggccacacctgtgccagtggggcttccctggtgctgcagcacttgtaaaccacacacacagcctctctccctggacatacgttagcacattggcattcagtattggtggcctggcatggtaggtactacccaatgaagagtgtactatatattttcattactataggccatacttatacagacgtgtatatatatttatataagatctacctatcttaggatggaaccttggggaaaaataaaattgaggggaagtaaaaagtatgtaacacttccagttgtgagccaagattgtaaccagagagcagccaggagcttcctgtcagtaaccatgttttcaataaatactctttcatgtacaaactgtggttcctgttaacagctgtttgtctgtacttgccccctgcccaatggtgaagatttcaccttgacaagacttgatctccatgtatctgggagactctggagagctccagctggagcccttagtcaccttccaagagtcccttcctcctcatcattcgctcctcccacacatacacacacacagacacacacctgctggttaagagtgttcacagattgctgcactgggacgaagcgttttctgctcaaccctgctgggtacagcaaggtaaggcatactgtacacccccatgaacacatcctccctcttctccctgccagggacacagccagggaacagctcgagtacttgtgccttacaaagaagacacgctctttaccctgtgtgttgcctgtgcatagtgcccagccttccagctggtgttttaggctgttgctccaaaccttggccttggtagctgggagacttaaatgagggtggtgatgaaaatagatctcttgcctctgagagagaagggtgtgaggacaggctctttcaaaaggcatagaaagtgcatgcaatacaagcctgaggactgaataaagccaagaccttgggcagtgatgggtaccattgtaggtgcttggtaagcactgaatgaactaatgcctgcatgatgccagctggcggcggtgacagccgcagtttgcataaaacactgcttacactctggccttgagccttctgttcagaggggccagggatcccagctgagtcacttgtaaggatccatgtttgcagctggtcttactgccagagagcccaggaggaggctagaggagggcgaaaggcacaaaactgggtctgaatgtgcaaccctagcttgccctggcctaatgttcttgactgcaaatgctgcccttttaatccatcccgcaagatgaagaaaatctgaactccctaggctggcattttggggccactgcaacctgcctcttggctactttaaccaccacagttacaaacaacctgtgagccccaggcacggctggagctttctcaccctcctttaggattctcccatttcctctatctgggatgctctctccctactcaacctattgaagttgagataattcttagaaagtttcatacagaaaatatttcacaaatgtttcgtattacttctggatcgcccaagttttaagttgtaatggccccagctggcctgagctcccagaagaaaaagcccatgagatacttatcttcgtggttcattccatggttgcccagcattagactggacataagaaaaacaatttgttcagtaaaagtaaacaagttaccattttttggatgctcactgtatgcagaacactagcaggcaccggggttccaaagcaagcccctgattgagcgcgggagagacgcagacaattacacggctgtgctctgagcctgagggacttcgcggaggacaaaactacgctgtacctcagaaagaccagaccacctcagaacccgaccacaacagacgccccgcccccgtgctgccccgccccgccttttcgccccggctccgcccagcccctgggtagcttccggcggaagttaccgcccgtgccgcggttcggcggcggcatccggcctcgcacttccggtggggagattccggcctggagctcccagggccgaggtgagtgggtgtgcggccggcctcccggcgcactcccagaggctggggggccggggctggagaagggaagcgggctccccacccgggatctgcgcgggttgacatggggcacgccacgcccctgcccctccccgggcctcagtttcgccgtctgtggagggggcaggggtctccaagcgccctcctgcaaggcacctgccggacgccggctcatctggtatttcctgagcacctgcgacgtcctgggtgcgggacccgggccggaatcggacacggccctgccctctgaggggctgcttcccgcggtgggattggggcgggcagtaaacacgtgagcaaacaaggaaacgtcagaggtgggagtgccacgaggattgggaggggtggggcattggagaaagtattcagccaagcggaggtctgcggaagggagctgaaggcaggaagagcagcaagtaaagaaaaacacaggtttgatgtgtttgacacgtggcagggggccgctgtggcgggtgctgggaccagtggcagaagaatgaggttacagaggccttccttgtggaccaggctgaggagctgggcttagccttagggcatgatctgtttcgtgtgccatctctctggctgctttatagattccaggccttaggggcgaaagaggaaacagggagaccagttagaccagtggcagtcagcaggtgaaagataattgtggcttagactgtggtagtgggaatggagaggaagagaagtagaggggtcaagaagtgtattgaaagtggaactgacagggcaggatttgagaaatgacagaaataagtggtcaaagatgacttcatcatagatttttggttttggcttaagtaaccaagtgtattatgctggcatttactaaatgactttgggatagattgggagcgtgagaaataattacgaaatcttcttagggcatcttaagttttagatatttggagtgcagctaccaaataggcagttagatatatgagtctgatacagaaaaggtcagggctgatgtaaagaatttagaaatcattggcaagtggattgggtaggatgagattatgtagggtaagatttaagagagaagagaagccaggttccaagctttaggcacccaatttttatagattgagttgacaagaaggtgccagcaaaaaagaccaataaggagtccagaaaagcagaagaaaaaccaggagaatgtggtatcgtggcacccaagagaaggttttttctaggaggaggaagtgatccattgtgtaaggtaagaatagagactaagccggcccggcacggtggctcacgcctgtaatcccagaactttgggaggccaaggcgggcagatcacctgaggccgggagttcgagaccagcctgaccaacatggagaaaccctgtctccactaaaaatacaaaattagccgggcatggtggcacatgcctgtattcccagctcctcgggagcctgaggcgggagaatcacttgaacccgtgaggcggagtttgcggtgagccgagatcacgccattgcactccagccttgaaactccatctcaaaacaacaacaacaacaaaaagaatagagactaagccttcgaaggggcagcagggaggagggtgtggtgactcattggagcagtggagatgggctgaagtgagagcagggggtgaaggagttggactggcagtgcggggtcctctggggaagtttcactgttaaggggaccaggaggggagtaagcctctaccatgagccagcatttaatgctgtacctgatgccactttacagttggagaaactgagtccagaggtcaagtaacttagggtcacacagtagtgagtagggacaccaggatttgattctcagtgtctaactccaaagcccacactcttaagcactaaaccatgctgcccaagttacagttaggaagatggagggaagcaggtgtgccagtgatgcaccagccagccttaccttgatgtgactgctgcccccagctaagctgctctctgtggaaagtggggcagaatatggactttccttcctgagcaaatgagatttcaaaaagagttgtttactcctttaaatcttgtttcccttataaaataagggtggggaccttttcagtttcacgtctgtgtctccagtggtgggcctacaggagtgcttgataa

SEQ ID NO: 9068 - DNA, 6000 bp, Homo sapiens
taataataatagcttccatttcgaagtgcatatcatgtgcccagcacggttctatgtgttttaccttgttacacatttaatcatcacaaaaaccctacaagatgaatattatctacaatcttcttttacagatgaggaaactaaagcacagagaggttaaataactcactcttactcaaacatgtcaagcacacttcctctctggggcctctcctgtctggaaagatcttcccccaggaatccattcacagggttcaaatgtcaccttttcgttgacaccttctcaaccactttatttaaaattaggcccggcatggtagctcagatgtgtaatcccagaagtttgggagggaggccgaggcaacaggatcacttgaggccaggagttcgtaaccagcctgcactacatagggagaccccatctctacaaaaaatggtaacaattggctgggggtggtggcacatgcttgtggtcccagctactcagaaggctaaggtaggaggattgattgcttgagccccagcaggttgcatcactgcactgcagcctgggcaacaaagcaagaccctgtctcaataaaaataaaaataaaaaataaaataaaataaaattgcatcactccctcccacccccactctactacacatagggtaaccatatattgtatcatccaaactagaatgcttttgagagtaaaaaggggacactagcctgggcgcagtggctcacgcctgtaatcccagcactttgggaggccgaggcaggtggatcacttgaggtcaggagtttgagaccagcctatccaacacggtgaaaccccatctctactaaaaatacaaaaaaattagttgggcatggtggcatacacctatagtcccagctactcaggaggctgaggcctgagaatcacttgaacctgggaggttgaggttgcagtgagccaagatcatgccactgcactccagcctgggcaacagagtgagactccttctcaaaaaaaaggcgggggcactaataatagttatgccagggcaacaggcaaaaactggggctgtccctggcaagcccagatgcacgtcatccttcccatcccccttcctgctggatttatctcctgctagcccctgtcaatgacacattttccttatttgtttattgctggtttccacccactagaatgtaaactccatgagggcagtaataattattctctattttgtttacagctctgtccccagggcctagcacagtacctggcctatagtagtcactcaataaatatttattaaattaattggtgaataaatcactgaatgggcatctggtgctggtgggtgggaagtgaagaagaggccataggttctctttcaggctcagaaagggctaaaaagtagacccctccctcccctttactgcttggctgttctacccagagctcagctgcatattttgcagccagaggtcaaggccccaaagggccatgcttggtgtagtcaccccaggctcacagcacctctcctccagcaagagaaatcctttgggaccaggccactgtccttgttctttcagctcccagcctgtccccagtgccaacctgccagcagccatgtggagctgctggtccttgtccaacccaatcctaccctgtgtctgttctcactgcctggaacctgagcaccctccctctccaccccctgactgagcgttccagcacctgagaatctcaatgaagatgaagatatgggaaaatgagacatgaatttgactgaagcataaataggcacaaaactttgggagggtagtttggctgaggagtcgagtttcaaagtgcttgtcacctacaacccagcaatatcacctgtagaaagatgtcctcagaaacattcatgtgtgcaaagatggctggataagcctgctcactgcagcactgtttataagagacaacaaaacaaaaaaaaatgaaacaaaactggagaagtaacattgttaaaatgtcctacagattccatgtaattcttatcaatattccaatgacatttttgtagaaataaaaaattctaaaatttatatagaatcataatagactccatatagtcaaagcaatcttgagcaaaaagaacaaagctggaggcatcatattgcctgacttcaaaatatactacaaagttattgtaatcaaaacagcatgtcactggcataaaaacaggcacatagaccaatggaacagaatagagagcccagaaataaatccacgcactatagtcaattgagtttcatcaaacatgccaagaacgcgtaatggagaaaggacagtcttttctataaatggtgttgggacaactggatattcatgtgaaagaatttagactcttatcttacatcatatgcaaaaatcaactcaaaatggattagacttaaatgtaagagccaaaactataaaactcttataagaaaacagggacaaaatgtcatggcattggcctgagcaacgattttttgtgtaggactctcaaaacacaggcagcaaaagtgaaaatagacaaatggaattgcatcaaactaaaacgtttctgcacagtcaagaaaaaagaaaaaaaaagagtgaaaagacaaactacagaatgggagaaaatttttgcaaaccatacatctgatgaggggttaatatccaaatatataaggaatacaatccaatagtaagaaaggacaaaacctgaattaaaagtaggcaaaagatccaaagaaatctttctcaaaagaagacataaaaatggacaacgggtatattaaaaaaaaatgctcaacatcactaatcatcagcgaaatgcaaattaaacccacaatgagatatcacctctgacctgttagaatcgctattttaaaacataagaaagataataagtgttggcaaggatgtggagaaaagggaaccgttgcaccctgttgataggaatgtaaattagtacagacattatggacaacagtatggaggttcttcaaaaaaaataaaaatagaactaccttatgatccagcaaccctactactgggtacatatccaaaggaaacaaaatcagtatattgaagagatgtctgcagtcccatgttaattgcagcatcattcacaattctcaatctgagtgtccatcactaaatgaatggataaaaatatggtacatttatatacacaatgggatactattcagcctttaaaaagaatggaatgctgtcatttacagcaacatggatggaacaggaggatattgtgttaaatgaaataagctaggcacagaaagacaaatatcccatgatctcacttatatgaggaaggtaagaaaagttgaactcatgcaagcagagtagaatggtggttaccaggcggtggggtagggggagggagatagggaggattttgagaagttggtcaaaggatacaaaatttcagttagataggaggaaacattcatgaaatctattgcacgacatggtgactatagataataacaatgggttgtattcttgaaaaatgctaagataatagattttaagtgtcctcacccccgaaatgatcagtatgttaggtaacgttaactagctggatttagccattccacaatgtatacatatttcaaaacatgttacttacgataaacacgtacaatttttacttttccttatgtacgtcttcatctggctgttcatttttatcttttatactatcttttataataaactggcaatagtaagtaaagtgttttcctgagaaacaacaaactggaaacaactgtttagcaacaagaaactgcctgaccaggtagaaggacgtggtagctctgtatgtattgatatggaatatagtctgagataaattgtttaggaaaatgaaaagcaagttgccaaagaacccacagtatgatgtcatttatgttggaaaaaacgccacaacgatgtgtgagtgtgcacactgaatgaaagaaaattctggaaagaaactaacggccagcagtgtcacaagggggataggtagtttatttatttatgtgtgcgtgtgcaaagttccgtattgtaagaatttgctacagcctgtgttattataagctttgtaatgaaacaggtagaaactgaaaaagtttaattattcccaattcagtttaggttctgtctccggaagactttcccggattccccagcccccactccccaccccatcttaccaccccctctgccagctctgagtctcaattttcttttctgtaaggattttcatcatttaaccttatttcttctgaatgcactaaatggtagttatcctagcacttaagaggatgtcggaaacatggttcattgtctgacccttccgactctgacttgtatgagcacattttggggggaatgtaggagtcaggggaagaggagttccaaaaagagactactagagggtacagctgtcccggaagagacttctgaagagagcaaagcgcgtccgacgtttttctcgagaggcgccgaagttttccggaaagagacgaccaactgagaggtgggcccccaaagccggctgcgagagtcaccgaagatttccggagagccaaggagtcgggaagagccacttactgagcgttgccgaacgtgtacggagatagccgaagaggcggaaggcggggccacaagagcccttcctgcagggaacctcaggcttcagagagccgaaaagttgggaggcgtaaccacttacaggccggaagtgtccggggtggacgcattcgggtagccgaagaagtcccaggattgccgaagaagtcccaggatttccgaagcgagccgaagcatcgcgacagttttcagagacagctgatcggttggagctgttgcgccgagcagtcatggcggcggccagagctactacgccggccgatggcgaggagcccgccccggaggctgaggctctggccgcagcccgggagcggagcagccgcttcttgagcggcctggagctggtgaagcagggtgccgaggcgcgcgtgttccgtggccgcttccagggccgcgcggcggtgatcaagcaccgcttccccaagggctaccggcacccggcgctggaggcgcggcttggcagacggcggacggtgcaggaggcccgggcgctcctccgctgtcgccgcgctggtaaggtgggccgggatcccggcgtgggcggccccgaggctctggggcctgggcgggtgagggactcccctgcgctccgaagctggatttccctcagtttctccttctgtgccttctgcggtgtccggcctttcggaaatgttattctttcatcccttttttcattcgttaagtcttaagaaaccacgtggccatgcagcgtcaagcttttgtcctgaggccgttctgcctggttcaaatctgggatctgtcattattgctcaatgttgaacatgtttaacttccctgagccttggtttccccatttgactcgtttcaattttcgatcattatctttccatttattagttttaagaaacatgtaatgacaagtacttgccccactggagccaggctccctgggttgaaatactaactctgctgcttgtgtagcctttcaacaagttatttagcctctcagcctcggttttctcacctgtaaaatgggagacatagtagcagtatccatgtcatagggatgttgtgaccattagaggaggtatgtgtgtcacgtattatgttcaaatgtgtgcctggcacatagtgcccaataaatgttggatttcattaaattgcctattttttcattaaacatcattgtgcgccagcaccataaactttgtcctcagatgagaaagtgacactcagagagaagtaacttgcccaaggttacacggttactaagtggccggtccaggccctcagctccttatgcctctgactcagaagccctggctttttacttttacgcttcttgcctttcttttatcagtattttttaggtaccagtgggtac

SEQ ID NO: 9069 - DNA, 6000 bp, Homo sapiens
attatttatcctacaaggtcaaagaggaaaatcagaaaaccataggttcagacctgcataaagcaccagtcattaacctcatgtaacaagtgatgcctttcatgtctaaatgaaaactgcggaaaggagccaggtgtaggcgagcagcgcacggctttcgcagggagggtgaggggaatacccttctctggtgtttgcagggagcaccatcatgtacggggcgctgctgctgtttgagtcggagttcgtgcacatcgtggccatctccttcacctcgctgatcctcaccgagctgctcatggtggcgctgaccatccagacctggcactggctcatgacagtggcggagctgctcagcctggcctgctacatcgcctccctggtgttcttacacgagttcatcggtaagacccctgaatgcttaaaccccgtccgtcacccccagtgaatctggcccagaggtctcactgccgtatgaaggaaggggggttcccagcgctcggcctgggctcttcctccagcagtccttcccgctcagctgtccacgttttcttaacaggtgttctctagggacaggtggtagttgtgcctcagggtgtgaaattgaggacagagggcgtgattgcagtagacagtgtttttgtttttctttttgagtcggagtcttgctctgtcaccttttttgggccacaaaatctttttgttcccatgaaatcttaatctgaagtccaatctatgaaactgataaaaggggacttgtgatagcaaagtggcagtgctgggaggtgccgagccccagaaccttgcccgtgcagccctgccttgctgctgtgtcctgatagagctcctgagggactccagggatctcagaatacaatctgctgctcctcacagcaaaccaagtgctgaaggtactcgccagttccgtagacgtgggagcacctgccgtgtgccaggattatggtggcagatgaggtggacgggctcgccagggagctgcccttctcgttgggaacacacgataaacacacattaagtgagtgtgagcacaggaatatcagatgtgatcaaagttaccaagaaagaaaaatggggtgaggtgctagacgcccaggcacaccccaaataaaaaatgttatggaggccgggcacaatggctcacacctgtaatcccagcattttgggaggcagaggcgggtggatcacgaggtcaggagtttgagaccggtctggtcaacatggtgaaaccccatctctactaaaaatacaaaaatcagcagggcgtggtggcacacacctgtagtcccagctacttgggtggctgaggcagaagaatcgcctgaacccgggaggcgaaggttgcagtgagctgagatcacgccactgcactctagcctgggcgacagagtaagactccatttctaaataaataaataaataaataaataataaaaaatgttatgggaatgtagagatgggggagtgtcagcaccatcctaatgtggggtggtggcagatttctctgacctcagtagtgattccaggtactcttgggcttgtccagcgtcagccactgtctctagatggacaagcctggtttcatcactcttccatgctgacctcacttgctttgccatatcagttaatttcttcccaattgattgagccacaagtccctgcagggccaccaagatgaccccatgctatgctacggaccccatcgggtgctgacacgggctttaattcctgtctagaaacctgtttctagttcaactagaacttgcaacacgggcacggttcagatgatccagcattttctgtgttgtgctgtggatagattctgaactctaatcttggtttcccccgcacggggcaaactcaagccgctatggctttggaacctcagggccaggggtcatcctgaaagtctagctggtttagcagacagtcctctttacacctctttcctcctcagtaggagcatttaattttctgtctgtgttattcaaacaaaaaaccctcaagagtgatactgtttctcctttatcagctgggggagcagggcccggaggctgcttctctgctaagaagctcatgtgtgttcaggattgcaggatagactctctctgggggaaactttcagttaatgacaaccccctcacgccccatcctccgtgggaaacctgcagggcccaggctctctagcaatggcccatcccttgctcctttacctcaggccttctcagtgggggtggtgtggaccccaccgcctggggaacaaacagtggtctttggtggggtgtgaacaaaccctaaccttttacgtataaaggagatgtatatataatattataaacagatacacagtatacctgtgacattaacatgtcatggaggtggtcaattaggagaagaagaaaagtctaaaaatgttccttaaggggcaataacaacaaaaaggcagagaaactcgaccttaccctggaagcatctttgatcgcggctcttttgccagcttccaaagctccttaggaaggttttagtaaaggtaaaagaaacatcccctgaaaagtaaaggtttcacagttgcagccccagtttctagaaaggatttgtgagcatttactgtgcgctccaggaactaaaggagcatccctgtgaacagtggagttttaaagcagtttcacccttgtcactagtctctagaaagcgttttgtgagacctagtatgtgctcaaaggcttgggcctgaggtggtcacagagatgtggcccctgctcaggaagctcagcttgtttgtgatagggacacaccacaggaccgggtcagaggtgtaggaaaaccacagggtgagttgagccttgggcctggcacttagtaggtgctgcctcagtggcagctgcatttcagcatcctgtgctcagaaagtggagaaggggcttattctggcttctgctatattgaaagccacaaactgtcactcctctcttaagaaaacctcataaccgggtttataatcctgcagcaggaaaggcagtacgcccgccccccccaccttccatcagagtccctgagggtcagcttaagcctttctctgacaagggggtctgaacactttgcaccatgacccagactcatcctgtggctttctgcgaccatcactggaagcagagggtgcatttgaatgtcattttctgctcgccagtggccgggacttagaaagactctccaactgttagacaacaccaaatcaaaagcatctctgagttttcttcccctgtaattttctttccttctttttttctcttttttttgagacagtgtcttattctgttgcccagggtggagtgcggtggtgcaatgttggctcactgcagtctcaagctccccgggctcagatgatcctcccacctcagcctcctgaacagctgggactataggcatgtaccaccatgcctggctagtttttgtattttttgtagagacagggttttgctgtgttgcccaagctggtctcaaactcctgggttcaattcttctgcccgccttggcctcccagagtgctgggattaaggcatgagccactgcatctggtggcccccatagttttcttctcctgggtgttaaaagtagcatttcactgtcaggaagctacagaagagagagcgaggaaaatcaagctgcggcgctgtgtgctcttagccatggtaccttcccttacagtccatggagaaagagggccaatgccaggaggctgtgggtttgtgacgggagatgactttccctttgatagttgtgacgcctgtttctggaccccatgcaccttccggaatattcctgcctgctcactgccgtcttcccctttccttgcagatgtgtacttcatcgccaccttgtcattcttgtggaaagtctccgtcatcactctggtcagctgcctccccctctatgtcctcaagtacctgcgaagacggttctctccccccagctactcaaagctcacatcataggccgtgcgttcgctggagggggccctggtcttggcgcttccctgatggacagagctcaagttccatttatattaaccgccacctgtggattttgcagtaattgctaacacatgcagttttaatgggaagtggctctgcgcctaaacggagtcctaacgctgcatcaacgggagggagggtcctgaaagagacccatctgggcctgtctgaacccctcgttcttcatgtttaggtgaatatgaatatgttaaagctggtggctcagctgggagatttatatgggtcactgtgcgagcttccttatgacttgaattttgttgtcacatgataaaagtttctgtgtagctgaaggttgtagaaggcttgtgtgtgtgtgtgtgtgtgtgtgtgtgtgtgtgtgtgtttttaaagagtcctaatgtgtatgtactctttatgtctttcttgctcttacaaagaggtgtcagaaaaatagaaagctcttggtgtcggtttgggaggaaaagacagtgacatttggtaaaaagttatccacacaataatctccattcggaaatgctcagtatcgtctccagccagccctgcttatccaggttacactggattcctgggatcgtaaccagtaaatgagaggagagggagagagagtgtcctaagtccaatctgttatccttgatctgattcagcatccatagtgtgtgagttaacttcacctgccacctcgtaaaagaatttcagaggtgtgatcccgctttattgggacctggtaacaatcacaaagccagtggctgtttgagaaggacctcagacattttcagcagagttgttttagcaggaaacgtgccactgaatggcccctaaatgtgtcgacagtgtgataagagactcaactaattctttaggcaacatggcagatgtgactcagatcctccaagaccaaagcggaaaggtcagggggctgggactcttctcttccatagaagcctgtttcctgttaggaggcataatggaagatgaccccacaaaggcagaggcatctttcggaacaacactggtggcagctttcagaacaaggaacccctggtgggaggacgcccaagctacagcgttgggatctgggatctgttccactgccggcagatttcaaggggaacttgctgaaaggcagccagtggtgaagatttctcccctcccaggatggactacatgccggcatgtttcttataaagctgtggctgcttgtttcagaggaagggagtttgcagtcgcgggacgtggtagagcaaggcattcttgggttttcaagttgcttcttgcagaagccacatatgcatgccataagggttaagttggtggatctttaagagccaagtgtggttgagatcttggatttgcgtttacttcttgatgaatacatatccttcaaaccctctgcctggcgctacttctgtgtgcttcagagatgtacatcacagcctggtttctgatgcctactaactcctgctcttggagagctggagacacgaggatcagatagtcccttgcctttggagcactcttgataagcttttgtattttgtgttgtccttttaaaatgttctagaatgactttacgttgcaggtactggttaattggctgttgacaccacatctattttgtcttatgattctgcagttttgcagtacttttctctatctgattcagccatttctgccagagggaaaaggtcggcagaaaagatgtattgagtgaatagttaaggataggatctttgtccaaaaatttcagaaagattgagcaaatctgacgtattcattgagtgagtttctgtgttttcaaaggtggaggagaaatttgtgctggaagtttttaagcctccgttttcttggaaatcagtctgtaacactggcaagtcttaagatagtcccatttagactttgcagatgctgaacctggctctgtaacgctgggaagtcttaagatagtcct

SEQ ID NO: 9070 - DNA, 6000 bp, Homo sapiens
cgttttgcccatagctgcgcttggctgtagcagcagggttcagtggtatgacagagacccgccggcccacaaaccagaaaatattttactctctggctctttatggaaacagttttcagacccttggtctagaagcatctaaatggggaaggcgcaggtggactgggtgcgcccacttcaaagaagaggagtccaccccgagccctgggagtctgggagtggttggaggctgctgggagcagggggctcgtcagcagtggctgtaggattggaacctgtccttgtcctccacctggggtgactggcagacatagccagaggctggggaaggttccagacaattctgaagctgggcccacctcccccgacttctcaagccactttggaacctaattccacaaagatgacttgcacgggtcacccagcaacttccgcacttaagtagcaacctgagcactccctgactgcatagcacgccggcgcctggcactggggaaacggtagcagctcctgcagggcgagtgagacccctgaataggccaccgggggcagagggacaaaggctgtggtgcaggaggggactggaggagatgggaggaggtgcctgacccgcctggggggctaacggagagctctggggttagcacacctgggcagaggcttgaggggccagtcaaagttcttcaggaaagggaggaaagaggggccattggtccagacccaggatgggctcagatccaaaggcaagacgtgagagtctgtgttcactgggcaccttgcagaacacactgtatggtgcattgcaggcgctgtcatcagcccgctatacagataggaaaacccgttaaaggaaacagctatactacggccgtggacatctagggggtatgggcctcggtaaggggttggaactttctctcctggaggcagcggggggcccagacggtttaagcagaggagtggcagggtgtggggtggggggcatgagggagatgttcccacttctgtgaggaggaagggccctggggaagggcaagagtggaggagaccctgggagacccctcaaggacctcaaagaccagcggcactcgcagcctctgggagatggtgagacacgcaggctcgccagccctcctgctacagaatctgcatttttgcaggctgcagatggactgtctgcacatggaggccctggttccataggactttgctgtccactaggcacagatgctggggagagaggtggatagaactgtctaatagaaggagaagtgagaggggatcaagggtgggtggaacaagggtggtggggagaggagctgtcaggaatgatcctgtggatctggctttgcaacttgaagaatatcagagccattcgctaaatcaggagacgaggcagttaagacctccttaaggggtaggagcggtcctgacgggacagttttgaggggccacagagcctcctagtggccatatgggaaattaccaccctctggccgttcctacccaggctgcaggtgagcggtatcctacctgggaaccctcaaaaaacctgccccaagggaacgtttgaggtgatggacatactcattatcttgattgtggtgagaggttcttggtataaatatatgcccgaaccaaattgtatgctttgaatatgtccatttatttgcatatcagttatatttcaatgaagctataaaagtaacagacatccctttccccgggcccagggctcaccgtcatggcatttggggaaactcagaggaactggtcctggcatggggtctcattttcctcagagcagatggcataagcttcatgaagtggcagctgtgcccctgcacccagaccagagcttggcgccacagtggaaccacacacctcctttgccagaggctgaatcactgttttatggcagagcagccgccttgggcactttcctcaactctcctgtttttcacctgtgaactgggacatcagtaatgatgggctcactagatcaagggagagaaagactgtaaagaaataaatgcatagaagcaatgattaagttaggacaggtgctggaaagggaatcaacagatgacaaggttcacgggagaggcccttcagatgctggtctccaagggtctgcaggggacgctggaactgaaagtggacagcagcgggccgtgcagcctggcctgccgtgtaaaggacctggggctcgggctgagcttgttgaggccccagggggctggtcagcatggctggtgggagtgtggaggtgacacccagcacattcacatgctacctgagtgccacgtgggctccgggtggtttttacattcaaattcagcaagtgcttgagcaactatgaggcaagtactgtaatctcaagaactgtaattcaggtacagaaactgcagcgttgaaattaagtaacttgacgcaggtcacacagccagcagggggcccaggcccaggggagtggggccaggggtgaggggctgaggccatgttcagcctggtgagaagccactgaggcccacgggaagctacaggcagctttgagaagggggccccacaagtgggtgtatgttttggaaagtgtcaggctggattttcaggggacagcagagggcacctcagggatcagtgaggaggtgattgcgctcacgtcctggaaaagcgcccagggccaggggctggggaagctggttccgatgcagagaggtgggcgggttcaagagctgattccagggtaaaggcctaagagtcgaatctgggttgagcctttgctgtccctcctgcccaccccactgaccctgcttgtacgtttcttcctgtgcaggaaggatgcctgtggccctcggagagcacagtgtcaggcaacggaatcccagaggtgagacctccctcggcctcccctccaacacccccatcccaccctgggctgctcccgctgcggctggaacagtgtgggctgctaaaggctcacccctccgccctcctctgcagtgcccttgctgctgggatcctccttgccggagatcatctgctccctgcccctgagggagcagcccagctctctgctctctgcacacgggagcacggacgctgccactgtttggaggagggcggtgcagctctgcagtgctgccccccaggccagggcccccgcgggatcaggctctgggctcccgcccccgccagccctgctgccctctccctttccccagagagccaagtcccatgcagcagaactccagtctcaggatcgcttctggacaacccacctgagacagccgccctccctcactcccgctctgcttcctccagccgcaggtctacgccccgcctcggcccaccgaccgcctggccgtgccgcccttcgcccagcgggagcgcttccaccgcttccagcccacctatccgtacctgcagcacgagatcgacctgccacccaccatctcgctgtcagacggggaggagcccccaccctaccagggcccctgcaccctccagcttcgggaccccgagcagcagctggaactgaaccgggagtcggtgcgcgcacccccaaacagaaccatcttcgacagtgacctgatggatagtgccaggctgggcggcccctgcccccccagcagtaactcgggcatcagcgccacgtgctacggcagcggcgggcgcatggaggggccgccgcccacctacagcgaggtcatcggccactacccggggtcctccttccagcaccagcagagcagtgggccgccctccttgctggaggggacccggctccaccacacacacatcgcgcccctagagagcgcagccatctggagcaaagagaaggataaacagaaaggacaccctctctagggtccccaggggggccgggctggggctgcgtaggtgaaaaggcagaacactccgcgcttcttagaagaggagtgagaggaaggcggggggcgcagcaacgcatcgtgtggccctcccctcccacctccctgtgtataaatatttacatgtgatgtctggtctgaatgcacaagctaagagagcttgcaaaaaaaaaaagaaaaaagaaaaaaaaaaaccacgtttctttgttgagctgtgtcttgaaggcaaaagaaaaaaaatttctacagtagtctttcttgtttctagttgagctgcgtgcgtgaatgcttattttcttttgtttatgataatttcacttaactttaaagacatatttgcacaaaacctttgtttaaagatctgcaatattatatatataaatatatataagataagagaaactgtatgtgcgagggcaggagtatttttgtattagaagaggcctattaaaaaaaaaagttgttttctgaactagaagaggaaaaaaatggcaatttttgagtgccaagtcagaaagtgtgtattaccttgtaaagaaaaaaattacaaagcaggggtttagagttatttatataaatgttgagattttgcactattttttaatataaatatgtcagtgcttgcttgatggaaacttctcttgtgtctgttgagactttaagggagaaatgtcggaatttcagagtcgcctgacggcagagggtgagcccccgtggagtctgcagagaggccttggccaggagcggcgggctttcccgaggggccactgtccctgcagagtggatgcttctgcctagtgacaggttatcaccacgttatatattccctaccgaaggagacaccttttcccccctgacccagaacagcctttaaatcacaagcaaaataggaaagttaaccacggaggcaccgagttccaggtagtggttttgcctttcccaaaaatgaaaataaactgttaccgaaggaattagtttttcctcttcttttttccaactgtgaaggtccccgtggggtggagcatggtgcccctcacaagccgcagcggctggtgcccgggctaccagggacatgccagagggctcgatgacttgtctctgcagggcgctttggtggttgttcagctggctaaaggttcaccggtgaaggcaggtgcggtaactgccgcactggaccctaggaagccccaggtattcgcaatctgacctcctcctgtctgtttcccttcacggatcaattctcacttaagaggccaataaacaacccaacatgaaaaggtgacaagcctgggtttctcccaggataggtgaaagggttaaaatgagtaaagcagttgagcaaacaccaacccgagcttcgggcgcagaattcttcaccttctcttcccctttccatctcctttccccgcggaaacaacgcttcccttctggtgtgtctgttgatctgtgttttcatttacatctctcttagactccgctcttgttctccaggttttcaccagatagatttggggttggcgggacctgctggtgacgtgcaggtgaaggacaggaaggggcatgtgagcgtaaatagaggtgaccagaggagagcatgaggggtggggctttgggacccaccggggccagtggctggagcttgacgtctttcctccccatgggggtgggagggcccccagctggaagagcagactcccagctgctaccccctcccttcccatgggagtggctttccattttgggcagaatgctgactagtagactaacataaaagatataaaaggcaataactattgtttgtgagcaacttttttataacttccaaaacaaaaacctgagcacagttttgaagttctagccactcgagctcatgcatgtgaaacgtgtgctttacgaaggtggcagctgacagacgtgggctctgcatgccgccagcctagtagaaagttctcgttcattggcaacagcagaacctgcctctccgtgaagtcgtcagcctaaaatttgtttctctcttgaagaggattctttgaaaaggtcctgcagagaaatcagtacaggttatcccgaaaggtacaaggacgcacttgtaaagatgattaaaacg

SEQ ID NO: 9071 - DNA, 6000 bp, Homo sapiens
acttttcagaacactgcatccttcttcacttgaagtgtgattaatataaataattatagactaatttcttctttctaatggatgcatagtattccacaaagacatataatgtacataactcgtcttccattgatggatatttaagtggtgtcccagttatctgttagcacagaacaaaaccccccaaacctagtggtataacacaataaccacttgaatatgcttgtgggttctgtgtgtcaggaattcaggcaggacacagtgaggccagcttgtttctactctgcaatgtttgagtcttcagctaggaagatttgaagatttgaaggctgaagctgattcaaatggctggccactggaatcatcttgttcttccccttccccttcgccttctacagtgcaatggcatgatgtcggctcactgcaacctctgcctcccgggttcaagcaattctcctgcctcatcctccctagtagctgggattacaggtgcacgccaccatgcccggctatttttgtatttttagtagagacggggttttgccatgtggccaggctggtctcgaactcctgaactcagggtatccacccgccttggcctcccaaagtgctgggattacaggtgtgagccaccgtgcctggcctcatctggttcttcttcactcacttcttttatgcttgaactgggatgactcaaagctaagcttagctgggactgtggtgccttcatgtgtcctctcctgatggtcttggcatcctgacagcatggcagcctctaagcagacatggagccctaggtaggcatggtgcctcaggctccaagagctagagttctagcagaagttgcctgtacttttatgtctggaccttagaagtcagagtgttacttccaccgtactccattggttgaagcagtcatcagctcacccaagattcagagagggtacaaggatcccacctctctacagaggagtgctaaagaatttgtagctatattttaaaaccaccacaggttgtttccaatctgtagctattcctgtagttcattttacaggctaacatctcttgaatgtcttcatttctctgcaccaggccaagacactgtcatctctgatctctttgctgatctcttgctgtcactcttgtgctcaacatgctgttctcttgacagcagccagaggtcttttcagaatgaaaatcagatcacatcccacccctcttcataacccttccatggctccccactacccttgggctgaagctcaaactccttaccttggcttatgaggccccacaaggtctcacttctgcctgcctctccaatgccatctcctgtcaccatttggggcctttagttttgagctgcaagagttcctcccatcacacacacacacatacacacacacacacacacttaaatgagtaagtaaatagaacatacaaaacgcttaaacactttgcacatagtgagcataataagtttgctactattattagactgtcttcagtaaatatttactgggctgcctactcagtgccaagcactatgggaggctcacagatacaacacgaacaagaaatatgtggccttggccagacgcggtggctcacgcttacaatcccagcactttgggaggccgaggcaggtggatcacttgagctcaggagttcaagaccagcctgggcatcatggcaaaaccctgtctctattaaaaatacaaaaaattagctaggcatggtagtgcgtgcctgtagtcccagctcctcaggcgactgaggtgggaggatcacctgagccttgggagatcgaggctgcagtgagccgtgatcatgccaccgcactccagcctggacaacagagtgagacgctgtctcaaaaaaataaaaattaaaaaaaaagaaaaagaaaaactaaaaaggaagatgtggccctatcttgccgagctcattcttctgtgtgtccccagcccctagcacaaggagaaacagaatagatgctcaagacacaaaggcatgtctgtgcaagggtgcttgatgacggttggaggggcacaatgactttcccaagatcacacagcaaatgtgggacaaaatcaaggctgacagctcatgacagggtgggaggcagatgcagctgcctggcacaggctggctctccagggagatgggcagtgggcacgcattgcccagggcagaactggggctaggggaggaaacaacaagggaggctgtcattagctccttccaaagtggaggtcacttctctcccaaccccgagtcctccacccaaactcccttctcaaggtacaagggctgatcccgtaccagggatgggtagggactcaaagaggaaaagaggatgaaaagaggatggggactgagtgagatgtgaggactccagagggattagcggctctcaaggcaagtgggaggggacttcccggtaggagcccggagacagatgggagcctgtgaagagggcgggggcccggcgaggagaagcggtttctacgctggggtggggctccatgagggggatggagacctggaaaagggactgacggtgcagcgaggagaggaaggctcggttaagggatgggtcttccacgggaggggtggggaactgcgggagtgacggcagcttcggtgaggagtctgaggggctgcgtgaggggctggggcccagggagtccgaggggtctctgtgagggcgctggggtgtccgagcgagcagggaactctggaaggggacaggagccgggggagctgcaggcggccgccgtctgcagagccaggccctgaggcgggccggcgccccctcccccgccccgaactgcggcgcaggcgcgaaccggacccgcctttgctcggcggagacagcaggcagagaggtgagcttagccctgccccacgcgcggccaggccccagccccagcccctggagaacccccgcgctctgcccgcatcctcagcccgggccgtgtcccgccagggccgggacctttgcgcctgagcctcggctttgggaggtgggggtcccagggaagcagcaggggcgggagacagaaacagccccatcgcccctcgacgcctcagggttgataggctgggtagaggcttcaaaggacacccccacccccgccaacacttcaaaaacccattcctacccctctctgcctcagtttctctctagggaaaaggacgcagttggtgtggagcagggcatcggtggtcctgtcaggaagagtggcgcgggtgccggtggggaagggaggcgggaaatggcctgatttccccggccgacaccccctacccatcccccccgggagggcgccccttctcccccgcccgggcagcgctggacgctgtagtgggcgagtctgagggtctgggaaggacacaactgaatgaggctgtgcagaggcgacagattccgtccatcttcgggccctggcttccgtcacttccgcccgtgcctgccgcccctcgcctcctccctccgccgcagtctccccacgtcggacagcgcagccccctccgcctcccgctcccctcccaccgagctcctcccggctcccgggctggggacgcctccctagcggttcccatggcaaccctcgtcccgggtgcctgcgccccgccccccgcccgccagacctactccgtgcagccctgaaacgccaggcggaggggccaggccgagcgggaggcagcgtcaaggtcaccttccctctccagtagcagcaggactgagtgattccatctatttggagtcgcggaagcggtgaattggaggggaggagctgacccaggtcaacagccccgaagccccctccacacctcctcacctgtggccttgaacagtggtctccgcacggaggctcctaccgtcccccaggccccatttcttctccccacccgggcctccccagcgcctcgccggggcgggtaccgcgctggccgcaccctccgcacagcccgccccgcccgcctcctccggcgagccctcctctccagacctctcgccctcctcctccgacggtccttcgctttcagtctctgccttttcccgttctctgtcgtggcttttgttgttgttgtttttcctcctttccttccccgctcttcttttccctgaattgtaagtgaggagggtgtacagccactatttatggacaggctttcttgacagcaatcttgtgtgccgtgtgactccaagcagaacctccaaccgtgtgtgtgtgtgtgtgtgtgtgtgtgtgtgtgtgtgtgtgtgtcgtacctatctgggtatgtctctgtatgctttgtgagtatgtctgtgtgtttctctgtgctgtttcggtgagtttctctatgcagggatttgaggaccacatctgattggaagtgaggggcagctgtcaggacctttatcttaccctttggaacaagcacattgtttcattttgcaggaggctgctaattaaggctgagggccatcatggagactggggtagaagcccagtcctcccccaacacctcctggctttggttcgggccaaacctgtatatggatatacaagtaccttccattcccaagatccgtgtccacttttgtggaaaaaaaaaaaaaggttatttgataggtttctctggaaatctaacagcccttaagcctaagagtctttaatcctgagggaccctgactttcacttccaatggagtcaaaattcattggaatctggaggctttcaggggcagtcctggggaggacctttttatagccttgcagcttgggaactccagcccaagtgtcagccatgacaattacccccaggagggggtctgaaggggagcggagggtgaggctctctcattccagatatggagactaaaaagttcaagatggaagtaatagcaaaaaaattacagtactaatcacaacagctaccatttctcagcattagacacagtaactgtatgaaagaagtatgattattaggtctgttttacagatgaggaaactgagacccagaaaggtggaagcacttgtctaaggtcacgcctccaggaagcagtgtgtccacgactccagtccaagtggtcaggctccagagcccacagtcccaggtactgggtggcctccagagtaaacatgcacatttattgacacctccaattgccaggcactgggctaaggccttcagtgcattggctcattcgcagtgtgctttgggaaggacaggctgggattccaaaaggccagactgtgctatgcgtgtagggtgtctcgagtgggaggagaagcgggtggggcacaaagatttagggggcttatgaaggtcaccatgagcagctcccactaatccctccctccgtcagctgcaccttacctgctccccaggggtccatgatgccgagctgcaatcgttcctgcagctgcagccgcggccccagcgtggaggatggcaagtggtatggggtccgctcctacctgcacctcttctatgaggactgtgcaggcactgctctcagcgacgaccctgagggacctccggtcctgtgcccccgccggccctggccctcactgtgttggaaggtaaggccagatgagcacctcccatgattcctctgccttgatggaggaaatgagtctgaatttgaggctcagaggaaaaaagaagagatagcgtagtagttaggagtcttgcacagtcaagcaacagaaaacccaattcaaatgggtttaaataatgaagggagccttcattgtatttgtatttacatacaaattatttacataattatttacatatttattgtatgtaaataatggtggctcatgcctgtaatcccagcactttgggaggctgaggtgggcagatcacctgaggtctggagttcaacacctgctctgtcagcatggcgaaaccctttctctactaaaaatacaaaaatggaccgggtgcggtagttcacgcctgtaatcccagcactttggtaggcggaggctgaggc

SEQ ID NO: 9072 - DNA, 6000 bp, Homo sapiens
aaggtaaggatcctctcccgtgtctccctgttcaactgcagaatgtgttcaagccagttcttttcctttgaatgtggtaggctgtcttcacaaaggaagggggctttgacagtgctgcctgggcatttcatgccatttgggatggtcagaagagagaaggtgtgcagcgcgcgagcccagaggagaacgcgcccccacccggccccatcctctgactccaccgtgccagcgctcacttctccaacgtgggggtcccgaggtcttggtacaggtcagaagcacaaatcctgcaaacttacaaaaatcattatttgatagtttgcttattcaaatttttacgctaatttagtcttgtgaattttgcataatacatttttaattttttgttgtggtttctgatcgaagatagcaaacattgactgaaaaaaaaaaattagtgttggccaggcatggtggctcacacttgcaatcccagcactttgggaggctggggcaagaggatctcttgagcccaggagttgaagaccagcctgggcaacagagtgagaaccctatttctacaaaatttaaaaattagctaggcatggtggtacacacctgtcatcccagctacttgggagactgaggtgggaggatcacttgggcctgggaggtcaaggctacagtgagccatgattgtgccacaggtgacagagtgagaccttatatttaaagaaaaaagttaaaaacgtattacaggccaggcacagtggctcacgcctgtaatcccagcactttgggaggctgacgcgggtggatcacctgaggtcaggagttcgagaccaagctggtcaacatggtgaaaccttgtctctactaaaaatacaaaaattagccaggcatggtggcgcacgcctgaaattccagctactcaggaggctgaggcaggagaatcacttgaacatgggaagcagaggttgcagtaagctgagattgcgccactgtactccagcctgggggacagagtgagactctgaccccatccaaaagaaatgtattatgcaaaatccacaaaaccaaataaatcgaaatttaattaaaattgtcaaataatgatttatgtaagtttgtagcattgctacttctatctaaagtccttaaagcttacagctgcactaatacaggatgcctggttttctaccaaggcactcacaaaatgggctatggagagagttgtaacttccatttggttcaagcatttcttaagtcatgagctagtacattgctcttgtccacaaacgtgtcatggtctcagacaatgtagttcaagccttgctttcctgtagcttagttaaaaaagaaattgaaattagtgattctagagtgaccttacagttaaacctgattaaattagataaatttagaataagctcctaggatttttaaggccttacttgtttgagtaggtgacacacattcaagtgggacaaatgtccacgctccccagggtagtagcacagatgtccctcctactccaggctgcctcggaggcccacgtcctggctctcttagcatcctttgaggctggttgatgtgtatgtaaacagagtcatctgtattcttctccccatttttacttcacacccacggtggtgtccacaccgaggcctttggctttgctgctgagcaggataattagagagcgtttatgtcggcatgtgcagagcctccttagtttttttggctgaatgttattgcatggatgctgcacacttacctcatggaaccagtcctcttctgaaggacatttagataatgtccaatctttctctcttgacagtagaaaaaggctgcacctgacacatacttcattacccacacatgcaaggggcatcgctcagatgaagtctctattttttttccccgagatgaggtctctctctatcacccaggctggagtgcagtggcacaatcacagctcactgcaacctctgcctcccaggctcaaatgatcctgccacctcagcctcccaagtaaccgggaccatagatgcacaccgcaatgcccagctaatgtttaaatgttttgtagagatggacatcttgctgtgttgcccagggtggtcttgacctcctgggctcaagtaatcctgccacctcggcctcccaagatgaattactggagtggaatttctggataggaggaacgtgtttttcccttggacagatgcaacccacgtgtccccacagaatcacacctgtctacaacaaccagccacattcccagaccttcactttcatgcacacactgacataggaccttatccagccttgggttctggatccagcactctggcaggtgaagtggctcctcgttgtagttatcatggggtttagtgccaggagggaccccagaattgcctagtgccacacctttgcaatgtccagcggagctgaggcgcacctgagatcgcccgtgaggattggcacaggtctggatgtgggcttgggtcaccaggctgcagtagaacagcaggcttattctcctgacctgtcctccccctgccatgtttcacctggtccctgtgttcccacacacctgccagtaccacttgcatcactgtttcctgcagattttgaaaatcagaaaaaaaatatttatagaagcaaaggccagggatggtggctgacacctctaatcatagcactttgggaggctgaggcaggaaatggcttgaggccaggagttcaagaccaacatgggtaacacagagacacagcgtctctataagaagtttttttttgttttgatttgtttttttgggatggagtctcactctgtcacccaggctggagtgcagtggtgccatctcggctcactgcaagctccacctcctgggttcatgccattctcctgcctcagcctcccgagtagctgggactataggctcccaccaccacgcccggctaattttttgtatttttagtagaaacgtggtttcaccctgttagccaagatggtcttgatctcctgaccttgtgatccgcctgccttggcctcccaaagtgctgagattacaggcgtaagccaccgtgcccggccagaagtttttaaaaattagtcgggcatggtggctcacgcccttgtcccagctacttgggaggctgaggaaggaggatcacttgagcccaggaattcaaggctgcaaatgagctgtgatcaagccacttcactctagcctgggcaacacagtgagactctgtctccagaaaccaaaaaaacccaaaagggtggaagcagcacgtgtgaccctgtatgctgcacttgacagaccctgctttgctcttaccacgttcacagagcgctcagggaatccgggaactactggatgttgctaaacaggacattccgttcgacttctggaaggccacccctctggtcctcaaggccacagctggcttacgcctgttacctggagaaaaggcccagaagttactgcagaaggtgagcctggccattccccagtgccattagccagccctcaggggcaactgatgactgaaaacaactgctgtctcaccagtgccgcaccatcaggcaggacacagatgcttctgaagaaaagtttgcagcatcacttttaggtggagggatggtgggcagatgatgctttgttccttgtgacatttaaggttattcatgttttctggagtgaatctgtgttttataataaggaaagcaacttgattttagaagtgtactgtgggccgggcatggtggctcatgcctgtactcccagtaatctgggaggccaaggcgggcgaatcatttgagcccaggagttcaaggccagcctggccaacatagcaagaccccatctctaccaaaaacacaaaaattagctgggcattgtggcgcatgcctgtcatcccagttacttaggaagctgaggcgggaggatcgattgagcccaggaggtcaaagctgcactgaactgtgattatgccactgaactctagcctgggcagcagaacaagaccttgtctcaaaaaaataaataaaagcgcatggtgccttcaagggacttgatcctggtcagaagtttgtgtgtgctgagccccggtgctgcagctgaagcccgtttgttccccatggcagctgctcatcctgctcctggtccgatgctcagacgtgactgtcgaagggaccctgtggcctctcccagtcccagcacgtcagggccaatgtgtctccagctgcccagcattccgcagtgggtcctcctcaccctccgtgctgcctccactcatttacctgcaggaggagggcacagggcacgcctgtcagggtccctcacagggttggattgtgcacgcgtgcaggtggggtgtgcagaggtgctgaagcttctgtgggtagatcttgctgaaaggtgggcaaggaaataccccccgaggccagggccctggtgaaggtggccgtctgccttagagggcttccggctcctttatctcacatcccaaagcagggcagtgtttggagcccagcaggcccagtgtgccccagcttcccccagtctatgcagcccccagagcccttctaagccccagcgggcttaggacagggtctccagggcagcatgggcctcaacgagcccgggcggtggattaacttgcaatggattagagaggcctgaacacactcacagaacatggcaggtgcccctggggtttcgttactgcctgccaatagcatgatgcaaaacccttaaccataaattctaaaggatgaagaaagccggtctgagtgcagtggtatttacaactaattgatcacaaccagttacagattttttcgttcttctccacccacactgcttcacttgactagctagctagctaaataaataaatatattcattcattcattctaaaggatgaagtaacatctctctttacatttaggtgaaaaaagtatttaaagcatcgcctttccttgtaggggatgactgtgtttccatcatgaacggaacagatgaaggtaaatggctggaagcacctctgtacagtggggctgtgcagtgaggtgggtgggagcaatcctgctgcttctaaccatccgccacccctccccgccccatgtgggagcctcctcccccgtccgatgctcaagtaaagaatcatggctgttacagccccgttctgattcacaattgacatgtcacaaaaggatctttttggggtcagtgtcagagacagattatcatcttgaccaaccccaaacctggcatgaatgaagcttctaaaaacattgtgtttttagttttaagaacatttggagagaatctccagttgccaccacatttagaatgttgttgcgttgttaattctaagagacatttaaggttcctcactagctcctgataggtcttcagtatgaccttgagagtgagtgtgtatggaggaggaaggggagcactgggttctttttctgcttcttccaaaaagaggaggccagtaataaccagaggagagacgcagcatttggtgaagtactttaggattcagcatgctgtgtctcaggacagtcggccatagctgctggattcatttatgagaaatgctcctctctgccgatgatctgaaggctgggtgtagtgcggaagtgatccctttatgctccccagatctgcaaatagtcatttaacggtcctgtgtgttatgctttcagcatctcaagtgattaaaataatgcctgtgacactctcttgcaggcgtttcggcgtggatcaccatcaacttcctgacaggtgtgtgcacactgcatcacagaggctagccgatcacagacacctgcggagggctcgactgggcctttcgagagcaggagcctcatttctgctctttaagataacccctcagggtttggcagtgttgctgactgaccatagggtgttggggatgggtggggtcacccacctgtctcacaggtgtagatgctaggagtggggtgcttctctg

SEQ ID NO: 9073 - DNA, 6000 bp, Homo sapiens
ttttttagggtttttgtgtgtgtgtgagacagagtcttgctctattacccaggctggagtgcagtggcatgactcggctcactgcaacctctgcctcccgggctcaagcaatccatctgtttcagcctcccaagtagctgggaccacaggtgcgtactaccacgcctggctaattttttgtaaagacagggtttcaccatgttgcccaggctggtctcaaacacctgagctcaagcgattctggaggtaatttttctccccctcaaaaaaaaaatttttttacatatgtatatattgggtagttaacgtgttctttttttcttttttttgagacggaatctcgctctgtcgcgcaggctggagtgcagtggcacgatctctgctcactgcaacctttgcctcccgggttcaagcaattctccagcctcagcctcccgagtagctgagactacaggcatgagccaccacaccggctattttttgtatttttagtagagacggagtttcgccatgtgggccaggctggtctcaaactcctgacctcaggtgatccacctacctcggcctcccaaagtgctgggattgcaggcatgagccaccacgcctggccagagtagttaccgtgttctcagtgatgagagtacatcagagaacaaggtagacacactcctcccaaggagctcacagtcttttggggataggcggatattgatcaggtagccaaaatatgtaattacgaactgggatgagagcaagaaggggcagtattagggacctgagagggcatagaacagagtcctgctcagtctgagggtcagggaatactttctggaaggaatgatgcttgagcagagtctgaaagacaaggagggcttaagagcttctggtctgggggccccaccgggacaggtaggggaggtccctggatgctgctcctcaacccggcccctcttgctccagacggcaactctgtaccctggtgtggtttttggcatctgcttcgtattgaattgcttcatttggggaaagcactcatcaggagcggtaagtgcctcccctacccttccagcccctccccagcaagcgaggaccagttgcactcagccctactcccaaaagccacttcctgccattcccttcccttttctgagtccccagagttacgttcccagccatgagggcagagggccagctggggtttccccagccctgcccttggtgtgtcatgccctggccctggccttcctgtgagatctttcagtcaactgacccaagcccacttctctaaagggaggtttccacagtccagcggccaactggggaatttccctttgtcttaaccaagagtgagctgcccagtgtgagtttattaggtcattatcccaaagcaagcctgtcctcctcagtgtccctgcccctcagcaccagcccctgcaggtggaggagagaggaaaggaaggatcaggttgtattacccttagagctgggaatcctgccagccccagtccagtgtgttactagcagctgtccaagactcactgaggaggattttgaactcagttgtggggagggggagtggggtcttggtcaattagcaggactgcagttgagatgtggcaggcattttgctatcctagccttagcacgtagagccctctgccctccacctgggggtggcggtaaaggtccttgcatgaggcttcacgtccaggcttacagaggaggggtttctttcccagcaacttaggaagccaccctcaagacacagtcatgcccttcctctcacttcaccttttttatccctgtgttccttctccctttgagcattttcctcccagttaccagctgctcattataaacattcactgtagaaattttggaaagtgcagagaagttaaagaagaaatttaaaataaccccaaatctgctcacccagagataaatacaatgtaggtctttaatatatgttgtcttttttcctttttatagatatacttacaaaagaattacataatttaaaatttataaaataacagcaaacatttatatgatgcttgctttgtagtaatactgttctaaacactttatatatatatttctttttatgtgattcttgtaaaaagtaagtgtagagaagaggataaagaagaaaatgaaaaatcagttctaatcccccatatcccatctaaggaagtattgttagctctttggtataggcctttccaggcacaaatataaatagatacagttgtcccttggtattcataggggattggttccaggacccctgaagataccaaaattcaaggatgctcgagtcccatatataaagtggcatagtgtttacgtacacacatcctgtatattctgactcttctctagattacttaaaatacctaatacaatgtaaatgctatgtaaatagttgttatactatattgttttttaatttgtattgttgtattttttgtttgtttgttttgagacagggtctcactctgttgctcaggctggagtgcagtgctgtggtctcagctcactgcaacctctgcctcccgggctcaagtggtcctcccacctcagccccactgagtagctgggactacaggtgtcaccaccacactcggcaattaaaaaaaaaaattgtagagatacagtctcactgtgttgcctaggctggtctcaaactcctgggctcaagtgatctgcccacctaggcctcccaaagtgctgggattacaggcgtgagccactgtacccagcttattttattgtatttttttttttcctggacattttctttttttttttttttgagacgaagtctcactctctcactctgtcacccaggctggagtggagtggcaaggtctcagttcactgcaacctccacctcccaggttcaaatgattctcctgcctcagcctcccaagtaactgggattacaggtgccccccacagtgcccggctaattttttttttgtaattttagtagagactgggttttaccatgttggccaggctgatcttgaactcctgacctcaagtgatctgcccacctcagcctcccaaactgctggtattacaggcatgagccactgctcccggccttcctgaacattttctgtttgcagttgattaaatccacagatgcagaacccatggatacagaggaccgactatgttgtgtttttattaaaatggaatccttctatacacatagtttatagcctcctttttacacttaatagtatatcatgtagttttattctgacaagattgggagcactttgtacagtgttgttttttcccttcttttcttcacataatgtgccacatgtaatctcttcattttgacctcttcatctcttcacgttctcagtccactccttcctgttcctcccctacttcctccctggatggtgagctcctctgggatgctgaggtgccttcttcactgggagtccagatcagggctggggtcagcctcaagagattctggccaggagccctgtggtgggggcagggagtgtgcttctgctgcacaagtcgcctctccttctgtggagcccagaaggtcccctcccccttgcgcagcccccatcccgggcatcagggcctcgtgggggcctcatggtgccatgtctacaggtgccctttcccaccatggtggctctgctgtgcatgtggttcgggatctccctgcccctcgtctacttgggctactacttcggcttccgaaagcagccatatgacaaccctgtgcgcaccaaccagattccccggcagatccccgagcagcggtggtacatgaaccgatttgtggggtgagtcctccagcagaggcaagagcaggggaacgtggaagagggtacgcccccctccgccaccagaagggtgcggcaaccagagttcctgccgcttcagccggctctaatagagtttatgaaagcttaacttcactccaagatcaaggtgaccaggttgtaggcagacttggtgtcatcctaggaaccaggacaaggaaggggaaggatggaagggtatagtgagacaggttaagaccatcacttggaccttgggcaagtcaccccacctctctgcaccccagttgcccatctataaaatgaggagaataatgcccaccctgcctacctctcaagagattataatagtacagaaatatgccagaagaattagcaccaccacactcgtgtaggtgctctctcttcatgccagcttgggaaggagcttggggcttcctggtggcctggtctctaacaatgtcaacctctcgttctgtggcagcatcctcatggctgggatcttgcccttcggcgccatgttcatcgagctcttcttcatcttcagtgtgagtactggtgcctcccccacccctccacccatgctagccgggtcactcccactccactcgggtgctctgctgcctactgcctgagaaagttcagatgggccacttcacctctcggagccccattcttcaccctgaaattggacaacagccttccctctcagggcagcattgaaagtgaaatgaggctgggcgcggtggctcacacctgtaatttcagcactttgggaggccgaggtgggtggatcacaaggtcaggagttcgagaccagcctgtccaatatggtgaaaccctgtctctactagaaaatacaaaaattagccgggcatggtggcacacgcctgtagtcccagctacatgggaggctgaggcaggagaatcacttgaacctgggaggtggaggttgcagtgagccaagatcgcgccactgcactccagcctgggtgacagagagagactccatctaaaaaaaaaaaaaaaaatttaaatgagatatgtggtgtgtggggagcctggtgtgtggaaagggggacttggtaaatagaagctgcctcagtgatacttcagtcattccccaccatgactaatagcatcgttgcacctggtttcatttctgggtccttgcacatctttacctctctgtgttactcacagctcctgggagggtggacagaatgattcctgcttgtcagggtcattgtgaagttggaataagtcattgtaaaaatgcttgacttcaggaaatgctgttgtaatggtgatgatgactcctcccaaagagtgccaagatgaaagttggtaggaaggcccttcagaggcatgtaagtgtggctgacccagctcggggcccagcacagatggtaccttgtaccaagtcagtaccggacatgtatctgctattccagagtagtggcccagcccctccctgctgagaccacctcacccacacaggtttgcctgggagaagggtcagaggaggtgttggctgcccatggtaccaaagcccatgtgcacttcccagggaagccccctctgtttcatctgtgtgactctgggccagtcaccagcgtctctgatccttgactttcttagctctaccaggccaagctttcatagacacacacatgtagcaattgtatatgaggcatgtggcataaggcctagcgcttggtaagctgctcaagtggtggtggctgctctataattttgatttggataagaatcattattttctacaagctgctgagttcaggctggggtctacccagagcaggtcagtcaacccctggcccctccctaaggacagtgtggctcaccccctgctctggggaagaggggccagagccacatgccaggcccacgggccctgatggtgtcatgatgatgtgtccactcctgcccttgtgacaggttggtgtgccaggggaaggggagcagggtggtcaagccagctgaagccccactgtgtgtccacaggctatctgggagaatcagttctattacctctttggcttcctgttccttgttttcatcatcctggtggtatcctgttcacaaatcagcatcgtcatggtgtacttccagctgtgtgcagaggtgaggagagcagggccaggaggcgggggag

SEQ ID NO: 9074 - DNA, 6000 bp, Homo sapiens
ggagggacttcatgagaaatgggatgctatgggcaggaagaaggtgcctctgttcccattgctgcttagagcagccccaggaagctgaggatcctgagaggaggcagccttccttggatctcctttcctcaatccctatcctccctccacgagctaaggtacctaagttacattttgccaaactgtgccccactcagcatctgtcctcccatgccttggactgtcccgccctgctcctttgctcacagagggtcccttcaccagaaagctctgtatttccttgccactaagcgactctcaccacccatctagacgcaggcaaccttagtgtcttccagaaaggcccccagattgcctcccagaaggcaatcactttctccttaatccagaaaccatggtaacaaaattggcatgggcccaccccaagatcaaaaaatacctcatgcctgtcagctccttggctcctacccggagcacattgagtatcacatcctatttttatgggtaaaacaactgccatgtaaaaggcagttagtgcgccgggcgtggtggctcatgcctgtaatcccagcactttgggaggctgaggcgggtggatcacgaggttgggagtttgagaccagcctggccaacatggtgaaaccccgtctctactaaaaatacaaaaattagccgggcatggtggcgcgcgcctataatcccagctactcaggaggctgaggcaggagaatcgcttgaacccgggaggcagaggttgcagtaagccaagattgctccactgcactccagcctgggcaacagagtgagactctgtctcaaaaaaaaaaaaaaaaaagcagttagtgcagcagaggggccatcgagtagtggtcagccttcaggcaccctggtttcaggccgcggcctcagcactgcctagctgggaggtgagtgcaggcaaatctccacctctctgtaacatggggcatttacatttgggaaataggaacctccttcatactggttttgaggattcagtcagctaaaggatagctaaagtagattctcattcactgtagttatgttcacagagtcatagtgaatgctaaaccattgctcttctgggcagtatagggtcactgcaagcctgtggtcataatgtttctaccaaccaaccaatcaatccataaccttgttttatgtgtgtctctgttgaaagatttttttttttttttgagacagggtctcttgttgcccaggctagagtgtgcagtggtgcaatcttggctcactgcaccctctgcctcccaggttcaagtgattctcccacctcagcctcccaaatagctgggactacaggcatccaccaccacacccagctaatttttgtattttcagtagagacggggttttgctatgttggccaggctggtctcctgacctcaagtgatctgcccgcctcagcctcccaaagtgctgggattacaggcgtgagccactgtgcccagctgaaagattctttacttaatatactattgattcattaacattgaactcatggccagcagcactatgactcatgcatggatgaagcgtacctaacacttttctccataagggacatcacagccttcttgcactgagaacactgggcagtgcttcagcattatgtaggtgccattttaaacagtgaagtcaccaacagaaagcccacaaatgggaaaagtatagcactaaatagacctgcgaaaggacacttgtttacagtatgagagctgcagtgagaaggtggagtgtcaccttgttccacctcagctggggttgtgtgtagcgggcacatgtctgcgagccccttaagtgttggttttgcaagtaaattcaagtgagtaggtgattttgcacatatagaattagtaagtaggatcagctgtatatgaagtacctgctcaggcctggccatggttagcactcagtaaggtcagctgttagcatcagaatcattaccgaagggagtgcatcatagcttctgtaccaggctccaaggacagagctagctccctgagctttatggctttgtcttcatcagcctgacacctttttaacttcttggcttctgtggatgtttgggtccgaggtagatgcagatccttgaggccctgaatgcccccactgaagggtttgtttgttccaagtctacaaaccattgaatggtttcaggttgtggtgccactgaatagtttcaaacagtgacatgattggattcctcaaatggctggggtggaagagggacaagaggtcggaaggccagggggcatctgtggtagtctcagggaggctggctccagatcacggggagaaggtaaggatgggaggggcctggctgtgaagggcagaggaggatccccagaaggacttgggaggatgctgccgtgagaggggctgccagtccctcttgctggagtttgaaagtaaagtttgatgttgctaattcttctttttttttttttttttttttttgatggagtcttgctctgtcacccaggctggagtgcagtggcgcaatcctggctcactgcaacctttgcctcccgggttcaagcaattctcttgcctcagcctccctagtagctggaattacaggtctacaccaccacacccggctattttttgtatttttagtagagatgggttaccctgtgttggccaggctggtctcgaactcctgacctcagatgatccacccacctcggcctctcaaaacgttggaattacaggtgtgagcctccgcgcccggccagtgttgctatttcttaaggcacagtgagggaggtggctctccgactgaaacagtgggaaaggagagggtcacatggactgtcaacagagaagtggctttgagaaggcaatgtgtccctgatcctgacctagctgcttggaattctcttcccagctgcttctgccttgggagaaagaagcagaggaaaggagggaaggatttgaggctgggtgggtgggagtctttgagctgtttttatcatagcatacagatgagttgcccaatttagctgtgtggtttgacaagttacttgctggctgggagagggagtgggatcttaaccagccctcagcccttccactaatgagccttttccctagcttggcagtaccagcaaagggagttaagggagtctgcctttctctggggtcagcttcatccattcatgggggccttgagcccggccccactgtctttgctgtaaagcctgagccatggcttccaggttgtctgtggccccagggcacctgttcctcttgaggagtgtagaccgcctctcctttgccccctcaggcacctgggagccagcaggcatgaggcccgtgttaggcctcaggaccaagttcagcctggcctccaagacacatgcagggggctagcttcttgaggttgctgtgtcctccgcatccctcgggaaatggagtcacagccactcctgagtatttgaagctctgtttggccagcttataacctttacaataaaaaacaaaatgcaggccgggcacggtggctcacgcctgtaatcccagcactttgggaggccaaggtgggcggatcacgaggtcaagagttcaagaccagcctgaccaacatggtgaaaccccatctctactaaaaaaaaaaaaaaaaaaaaatacaaaaattagccaggcatggtggtgcatgcctgtaatcccagctactcaggaggctgaggcctgggaagtggaggatgcagtgagccaagatcgcaccactgcactccagcctgggcgacagaacaagactctgtctcaaaaaaaaaaaaaatgcagaaacaaattcattctgacctgataaatacagtttggaggataaaatcttggggtagaagacagaaataatgagataaaggaagcttctctagaagaagcaaggacttaggtgctgcgaggtagggaggctgggctagatacctggggctgggagcaggctgcacggaggatgcatcgcacaactggcttgtgtctgggctgtggcatgagggacctgcatggctgagagggggtcaggagaagcaagcatgcagcccatggggatgggtggtttcacgtgctgtggtttaggggctggcaggaagcatggagaacaggggaagggggctccagcagaaacccatgcatgtgtaaaggcttggatgcacggaggtgtgccgtgtttgggaatggtgcactgtgcatttggttctctgaagctggaaggggtatgctgagggggtgggaggggcatgagatgaagctgctgagatggatgggcagggaccaagcaaaaagggctcaggtttgggaggagccctagaaccttggatactaaagtgttgggagcctttgctatatggccaaataatctgggtttttggcaactgagggtttttgtagtgataatgaggtttattttctctttcaacaaattattgagagcctttgtgcttgaggcataaccccaatcctggcatgtggcatgatttgtcaggacagagttccctcaattgccccaggcctgtagctgtcagttgactcctccaagcccgtggactgatgtggtcagtgctctgatggagattcccaggtggaagaagagacggcagtcgggaggctctcagaggaagaaattctgaaacttgtgggtagctgagggaagccttccaggcagaagaacagtatgtgtgaaggccccagcgggggaggaagtggccggggtgaggtattggaagaggtgggggtgaggtatttcctcactatatttcctgcattcacacatttgaaatgagagctctcctgtacaaggttaggtcccatctccctgcttcagggaggcaatactcagagctgaggggtgcctgtcccccagggagcccctgaagccccaaaatcttgtatgctagacaacaccacttatctggctgtggcctgtgtgtgcctcaggagacagaggatccaagatcagctcactttcctcttaccgaatcaggcctggacttgctttctggctgggttactttccctctgatgactggctgcctaggccagggctcagggcgtctgagggtgcttagtagaactctgggcccagcagctctgagagagaggctggagggtcagtcctttgtccagaccctgactgtgggcagtcctgttgtcttccattgggaagaaggtgtgcctcttcccaccagaacctcgtgaatgctgcatgcacactcttcatggacagtgtcatccctaccccacagatgggaacaaggactctggtgtcacacagcctaagctaggcttagtgcccagttcttgctcccccatactaactgctaccctcctaagggagatatactcccttaaacattttgagcaaattgaggttggcttccgttttctgatctagggcaaaaaaccccatttgtttgggactttaggtcaaacaaatccattcctttcctgaaatcctcagtgagttagtcctgtctctgctggtggccatagatttcaagagttgctctaaacaaacgtccaggtcttggtggaaactgtccctgggccagtcagagaaccagcccagactccctgccagtggctggggagtggtagaaatttggctcgcccccccatccccaccctacccacaggcccagttgtgtctgtaccagaaatgaggagtgatgccaagcctaggcctggcccagccttagcttctgcaatgcaacctatgtaatcacacccattttacaaggaggaaactggggccatacaacaggtcagtgacaagagctgggacctgaactcaggctagtctggttccacactgccccctggcttctggacccttaccaccaaaatgactctgaaactagagaatttcaggatttcagacatcagtggagagggcattcgcagaggggatcttccctgcagtcacagtgatgggaggctccacacccatccttgagggag

SEQ ID NO: 9075 - DNA, 6000 bp, Homo sapiens
aaggtggcactggaggggagagaagggttgagggaaattgttgttgttgttgttgttgttgtttgaaagtttcgctcttgtcacccaggctggagtgctgtggctcgatctcggctcactgcaacctccgcctcccaggttcaagcgattcttctacctcagcctcccaagtagctgggactacaggtgcacacccccacgcctggctaatttttgtatttttagtagagatggagtttcaccatgttggtcaggctggtctcgaactcctgacctcaggtgatccacccgcctcagcctcccaaagtgctgggatcacaggcgtgagccatcacgcccagccaggaagttgtattttaaaataagtcttgagttttgttaatacattataggagaagttgaattgacgaggtaatgggcttccagatggagagacagggtgtacaaagcctggaggcttccaagtgcttgttgtgctttggggcagtgaggtgcttgtgcaactggagcagagatgggtggggaagtgcagtaggaagcacctggggaaaagcgggcctggttagaaagggtctggcgtggggccccagccagtgtgtgcctgggcagcacatcacagtaacaaagtctgaagagatgacaaagcacagtctgagaggcagccagagtagcggggagctgtttatggaggaaataggggaggggagggcagatgagagagatttgcggtcttttctataggcctccgtatttgattaggttcagggagttgtaggggaaaacctatgatggaagaaagcactggtgttctttgctcaagagggtgtttgattaattggggtattagcacagaaagttggaagcaagcagatcgggggtggacatttagggggcagttttcagccttcagtcgggaagatgagtctagaacgttggagggcagctggagtcagagtttccagtcccccgacagtagctggctgaagcctcagcactgggtgggctcactgagcaggctgagcatgttctgggaggtgtccctgcttctgctgctgtgtaaactccgccgtcaacatcttgggctttgaagccactgaacgccggactggtttaccttgatttgtctttgcaaagtgtaggaatgatgcttgtcttactccagaatagattgtttttagtgggctcttgagaagtggaggttttatagctcagacaccagagccaggctcttctggagccagggaattctagttcccctagttaaaagctgagtgactttggacaagttactttgcctttataatgcctcagttttcttacctgtaaacttaaggtgataagagtgcctgatccatgagatagattggggattaaatgagaaatgcacataaagcacttagaacagcgtttgacacattttaagtgctcagaaagaggtaatgatagaggtagaagtagaggtagtcattgttttggggtctccagtgttgtcgttccattgttaaagcaccagatggcgacaaagcacacattttcagctgccttgcattcccctgcttggactccttgagtagctttacttattctcttcagatccctaattgatgcaaagtgaagtattttgtttgtttcctttctctctctggcttctttaaaacttctggttgaaactcatttgttttgagactcttatttaaatttcattcataaaattaaaaaaatgctttggttggagtagcatgtacacacagtaaaacattggacaatacaaaatagctgttagtgaaaggcagcgtgctgcccttgccctccaccctgtcctactctccaggagcaccccgcgctttttttttttggtgggagaggagtctcactctgtcgtccaggctggagtgcagtggcacgatctcggctcactgcaacctctgcctcccgggttcaagggattctcctgcttcagcctcctgagtagctggaactacaggtgagcgccaccgtgcctagtctcccccccacctttttttttttgagacggagtctcgctctgtcgcccaggctggagtgcagtggcacgatcttggctcactgcaagctctgcctcccgggttcacatcagtctcccgcctcaagcctcccgagtagctgggactacaggtgcccaccaccacgcccagctaattttgtttttgtgtttttagtagagatggggtttcaccgtgttagccaggatggtctcgatctcctgaccttgtgatctgctcgccttgacctcccaaagtgctggtattacaggtgtgagccaccgcgcccagcctttttcttttttttgagacaggatgttgccctgccacccatgccagactgcagtggtgtaatcacagctcactgcagcctcaaacgattctccaacctcaccttcataaagtgttaggattacaggcgtgagccactgtgcccagccagcacccacttttaactgttattattaccacatctttttgaatagctgaattttatattacttcagccaaaatattggcagtctattgatttgatactgtttcttggagtcgaggagagtcgtagtagcgggggcttggcgattttgtgatgtgtttcctttgtgccagtcactgtgatgggcatttggcaaagtccctgatcttgggccactagtcactgggggaactagtaagtgcagtgtggtacgtgctttgggggagcacttgagagggtggatacctggcctctcctgggaggactgtcaggaagaggtgaacatctgagcagagttgaagataggacctggtttggcaggcaggaaggacaaggaaaaggtgctcccggcagggtgggtagcagggtcaaacacgtcaaatggcgagagcgtggtatagctgcaggaggctagagggtaagattttggagttggagttagggctatggtgatgcaggcagcatggagagggagggtcagtcttgagggcatttcatgctgtgtcagaagttggatcttgtctgagaaaaacagggaaccactgaagggttttaaaggtaaagcaacacggttacacttgtattttgtgaagatcagtcttgaagcagtgtgcagaatggattgcatggctttagaccgcttaggagatgactgactgggacaatgtaggtgagaaatggcaagggcctgctgtaaggcagtgacagaaaccagaggcgggactgggcctgagaaatgaaaaagaggtagacttgataggcttggagggtggggaaaagtcaaggatggttcccatgtttctggtttgggttgctggatgcatggtattacctgtgcatgagctgggaagtcctggtgaagaaatagaaggttttaagctcattttcttttttatttttatttttttgggggactgggtctcgctctgtctcccagactggagtgtagtggcatgaacatggctcactgcagcctcaacttcaagcagtcctcctacctcagcctcccaggtagctgggaccacaggcatgcgccacctgctctgctactttttgaattttttgtggagatggggtcttaccatgttacccaggctggtctcaactcctgagctcaagcagtcctgcctcagcctcccaaaggcctgggattacagatgtgagccactgcacccagcgttaagctcattttagatttgttgagcctgacttggccttggtgacatctaagtggagatgccagtaaagttggaatcagaagagactgccacttggtagctttgtcaccttcatcaggttacttgccaatttggagccccagtttctttttcaggtaaatggggatagtgataatctctaccaaaggatcatgttgttaaaaggaagagcttcctaaatacccagcacagtccatggccagacaggtgatccgggaagtggtttccttctttcctttctaaggttcggaaggactcaagcgccttcaggcttattgctctttgtacgaagtgagcaattttgggtaataccgtgtcctatggaaagtaactacttaactaaattcatgtagctcattccttaagccatctataatggctgagaatgttatctaaaaacgcctttgcttttcctggttcactacatgtgtcaccacttaacattgacttttccccactgtgtagaaagcatgtacctacatcagatctaaccttgatcccagcaatgtggattccctcttctacgctgcccaggccagccaggccctctcaggatgtgaggtgagtccgggttcctacgctgacaatgactttaactatttaaagtacatttttaaaggggaggagtcatgtcaaacatcctttttttaattatgagagtccattattgtgagtgggaattccattcctgtgattttttttttccttaagaaagtatagtttatgtttctcctaagtttttacttttcaagggttttaaataacctttttgtacagtttttgcttttcttctggtaggtcttgattttttcctttccatctgcctttaacacgtaaaaatgttcaaagtgtacccccacacgaggtttctggaagtcattttgttgaacataggagaaccatataagtagaaaggtaacttgtcagcatcttttcacatgggagtgttgtaccgaagttttgcaaacatttcatcctggtgtctggggattagagggggatgagcatgtgcgaggcggaggtgactttggcagctgctccgcattctgtctttgccatgcctgccacaaattgccaagacctgttctaaaactctgtgtctgccaattctttcttagatctctatttcaaatgagaccaaagatctgcttctggcagctgtcagtgaggactcatctgttacccagatctaccatgcagttgcagctctaagtggctttggccttcccttggcatcccaagaagcactcagtgcccttactgctcgtctcagcaaggaggagactgtgctggcgtgagttgtcatctcgagcatttctcaggcttcatttgtctcgggtcctatccgaagagggctcattcattggttcagcaaatactttctgggcaagtacttgcagtaaatacttccgtgtgccaggtgctctgcaaggcaccgcagacatgattgcatgaaggcaagtaaggtccgtgtcctcgtggagctcacatggacacagtcttctgcaagcctcgcagacagaaggcaagcgctgagccagagcatgagcacaccaccacctagagatccagttgccttgtgcggttggagggctagagcaagggcagataactgagaaggagccacgtgcatgtcttgttgaggcttggctagggcaggatgacatgttggcagtggaggctctgcaaagtgggggctctcaggatccctggaagttgtgaaagacagcatctggtgggtgaggtggttgctcagagggtggagtattctaggaatcagactctactactctgcaaaaggcttaggtgaaggagaagcacctttcctatttgttataaatggaaatattgtaacttcagggtgttttttgctaagctcttaagtgataatatatgtagttttaaatttttatttatttagagacaggatctcactctgtcacccaggctgaagtgcaatggtatgatcaaactcactgcagccttgaactctgggctcaagtgattttcctacctcagcctcccgagtagctggactacaggtgcaaactaccacgcctagctaatttttttttttttttgagacgtggtcttactctgttacccaggctagagtgcagtgacgcgatctcagttcactgcaacctccgcctcccgggttcaagcagttctcctgcctcagcgtcttcagtggctgggattacaggcgcgccaccacgcctggccaatttttgtatttttagtagagacagggtttcaccatgttggccaggtcttgaactcctga

SEQ ID NO: 9076 - DNA, 6000 bp, Homo sapiens; identical to SEQ ID NO: 3354

SEQ ID NO: 9077 - DNA, 6000 bp, Homo sapiens; identical to SEQ ID NO: 3360

SEQ ID NO: 9078 - DNA, 6000 bp, Homo sapiens
tagggactggtgatgactcttaacgagcatgctgccttcaagcatctgtttaacaaagcacatcttgcaccgcccttaatccatttaaccctgagtggacacagcacatgtttcagagagcacagggttgggggtaaggtcaccgatcaacaggatcccaaggcagaagttttcttagtacagaacaaaatgaaaagtctcccatgtctacttctttctacacagacatggcaaccatccgatttctcaatcttttccccacctttcccgcctttctattccacaaagccgccattgtcatcctggcccgttctcaatgagctgttgggcacacctcccagacggggtggtggccaggcagaggggctcctcacttcccagtaggggcggccgggcagaggcgcccgtcacctcccgggtggggccgctggccgggcggggggctgacctccccacctccctcccggacggggcagctggccgggcggggggctgaccccgccacctccctcccagatagggcggctggcctggcagaggggctcctcacttcccagtaggggcggccgggcagaggcgcccctcacctcccggatggggcggctggccgggtggggggctgacctccccacctccctcccggacggggcagctggccgggcggggggctgaccccgccacctccctcccagatagggcggctggcctggcagaggggctcctcacttcccagtaggggcggccaggcagaggcgcccctcacctcccggacggggcggctggccgggcgggaggctgacgccccgacctccctcccggacggggcggctggccgggcggggggctgaccccccacctccctccctgacggggcggctggccgggcggggggctgaccccccaacctccctcctggacggggcggctggcggggcgtggggctgacccccccacctccctcccggatggggctgctggcctggcggggggctgaccccccccacctccctcccggacggggcggccgccgggcggagacgccccccacctcccagacggggtggccgccgggcggagaggctccccacccctcagacggggcagccgccgggcggagggtctccccactcctcagacggggcggttgccgggcagagggtctcctcacctctcagacggggcggtggggcagagatgctcctcacctcccagacggggtcgtggccgggcagaggcgctcctcacatcccagacggggcggcggggcagaggcgctccccacatctcagacgatgggcggccgggcagagacgctcctcacttcctagatgtgatggcggccggaaagaggcgctcctcacctcctagatgggatggcggccggtcggagacgctcctcacctcccagactgggcagccaggcagaggggctccccacatcccagacgatgggtggccaggcagagacgctccccacttcccagacggggtggcggccgggcagaggctgcaatctcagcactctgggaggccaaggcaggcggctgggaggtggaggttgtagcgagccgagatcacgccactgcactccagcctgggcaccaccgagcactgagtgaacgagactccgcctgcaatcccggcacgtcgggaggccgaggccggcggatcacttgcggttaggggctggagaccggcctggccaacacagcgaaaccccgtctccaccaaaaccagtcaggcgtggcggcgcgagcctgcaatcgcaggcactctgtatttgccttgtaaaacagatcaattctagcccctcttactgtcttactcttacctcttattgccttaaacacaatttaaaatgacaaaaatccaagcacagtgggtcctgggggaaggtagaggaaataaattatactgtgtttagctttatctaaataccttttacagcatgtcaaggaattcattttcagttcattagtgctgtttcataagcatcttcagcaaactcacacaaatgttcacagatgagtatatgcataatctaggacataaagggcattgtttacattattaaaaagagtaacagtttcaaagagtattgccagtttctcccaaattcatgttttttcacttttttaacctcccatttcacattttagatgcttagttcctggttttgttacagacattatctgaaataaggaatagaagattaaaaatgatttgaagtgtatgctgtggttctagagacacatcatttttttttatctctaaaaaggaaaaattctaagtttagaaggagatttcatttgtaaaattgactgtactttataagcagtgtttaaattcattggtggtaaatatgcatgttggtatagtaaaatcccattttttacataatgctttaatggaaatggcagttttatgaaatgaaagtgactagtaaaagtctgaatgatgctcataagcttttacatcatttttattgaaggttttgtgtatgctaatccattaatacaggggaaaaggagaacactaacatggtttattttctataattactcaaatagaatataatttattttcaataaaattcttggagcaaattgcccagagtagggagaggaaggttggcctgttcttacaaatatcttgatttttacccacgggactttgttattttaccagtgatgttgtttcattgcatatattttcagtatagttccctccagatttttacaaataaaagcctgtgaaaggccaagaaatcccaagcatgtaaagacccaggattgtggagggagaaatctgggatgtttattttatcctgtttattattacaaatattgcttgtcttttaatagtttagacttccttttatgtggtttatataagttgaagcaccattaagattgctgtgtaatagcaattaactgtgatgtaatagattaacctggggaaattttcaaaaacagttaagtgtttacatttaaatttggcttatttttgtagagtaccttgaagaagaggtcagtgtaaggaataaacaaatacttaaatttgggatcctcacaccacaacttcataagggggagagggtgaactgaggtatcccgtaggtggttgaggtgtgtgtgcttgtgagttttctgtatttctttgcagttgggttcagcgaggagcagttttctgtgttcaccagtgttgatagcagacaaaatcacacagaaacaaatacgaaaattgttttatgtccagaatgtccctctaatatgcacatgagtaacgttggatcaaatttatgttttcaaaataagtctcatagcagaactagctgtcgtttgattttgggattgagtcccatttccttccttccttatcaccattttgatttcttaatttgtattaaggtaagcccatatcagattgattttttttttttccatgcccggagcacctcaagagtagagacaccagcctgaggatcttaattttgctggagataatccacacacaggtagttttcttcttggtgaatatgtagattgagatctttattctatgccagccacagtgctggggctacagagatggataaggtataatccttgtctcaggagcttagagtctcattgaaaagtttttcaaaacacacatttgaatgattttgttgagtcaacattacgtatttgtttgtgaacacataagcgcacaccctttccccaccttcacttcctgtttccttgcaaatgcaaagacaagagtaaaggacttgcctagaggaaacacagaaatactgatttacaggtgaaaaatatgtaaatttgaaaaggtgttgaaaaagacctaagtttttgtagccacctgactaataaacacagagatcacatgtccaccatagatgggtaaatgaaaaaaagcaagtttcaggttaataggaatagtattatttcattatttgttagcccctatcccttgcacatgtgtgtatgtattgtttgtgtaaacatagatgatgtggaaagatctcccatattgttaatattagttatctcaggggacaaaggaaagcttattcctgtttatacatcttttattgtttggtttaagaagcatgttttacttttttaattaaaaaatctaataaagtaggaagtgaataaataatagtaataaaaagtatcttcaggccactgagcctgttgcagtcttcccagtagcgtgagtaattagtaccgtctgtaatgcttcaggtgtggactgcccagcaggactctgaacttcttgctacagcctaaggtgatactaagttttctgtagcaacactataatgttgagagttactgtgtttatagaccattaacacctcaaagtctttcttccatctgctcctcttggcacactgctctagataatcattttggaatgagtttagtcctttacgctctccctgttagatttcatattgttactgtggaaatcagtatttagcatgggtaagaactggccttagatgcaagccatctggttacagatcctcactaccactatcatgaaaacttggacaagtaacttgtctccccaagcctcagttttctcatctgcaaaacagcaataatcataaagttgtgaggtttcaatgagatgccatatgttagaacacttacactaggtacctggtgaaatagtgggaacatggtaaatattagacgttactgctagtgcattaacctcagctcatctctttcatccattggcatgttaatgagataatcgtggatctcaaatcttcccttaactatatttacagctctcttttccacaaaccttctaaactttcctcatgagacccccaatcagtctctgtctcattctacaggtcccttcaccgatgttgtcaccaccaacctaaagcttggcaacccgacagaccgaaatgtgtgttttaaggtgaagactacagcaccacgtaggtactgtgtgaggcccaacagcggaatcatcgatgcaggggcctcaattaatgtatctggtaagtcctgagactggaggcctagagggtgggctcagaaggcccctggacagtaggttttcttaaagtttgtatttgcagtgtagcagaagaagatgatagaattctctccaccccacccccaccccaccccaccccaccccacaaccctccaccccgtgatcagaaagctgggtcccagtcgcctgtttttttcataattaatgcctccttgtttcaaagcttacagcccctttgcacctcaatagttagagcaaaactgaagtgataactttagactttacttcagaatgagttttgttttcactcccttgaaattaaatctgccctttggcaataaataaaaaagggctaaacaaacttaattttactttgtgggagaaagctaaatggagttattttcttatttaagctaaatgatttctgacattaagctcataccatttccagtgattggccactgcactttactgattgtgaaacgccaagagagatgagggctgagcaaattggaatatactcaagggtgtcagtttggtgcatgtctgatggttttctcttctgtctgggagtgcatgtattttccaaaatccaccttttgaaaaatactggtaaagtgcccaaattgagaattggatttcagaattaaggagatgtcagtgatgggttggagtttaaatgtattttagaaatggaataaacttttagctcattagaacttctccatccaagaaggagctgtgggggagtgtgtatttatcttgtaaatatcaagtgactcagtgtcacagaggcttctgcatcaatagaagctactgctcatttgaaatgagtatctctctggctttttccatgatagattttgattgtgatacacttggctattcatttgacacctaaaagaaaatgattcacctctttggaaagatataaggtgtttcattatctgatcgtttctgcaaactctt

SEQ ID NO: 9079 - DNA, 6000 bp, Homo sapiens
caatcctaatcagaaaatatgaagttcaaaatgctccagaattcaaaactttttgagtgttaacatgatgccacaggtggaaaatccctacacaagacctcatgtgacaggttgcagtcaaaactttgttttatgcacaaaactagtaaaaatattgtggccgggcacggtggctcacatctgtaatcccagcactttggggggctgaggcacatggatcacctgaggtcagcagttcgagaccagcgcggtcaacatggtgaaaccccgtctctgctaaaaatacaaaaaaattagctgggcatggtggcaggtgcctgtaacagctactcgggaggttgaggcaggaggatcgcttgaacctgggaggtagaggttgcagtgagccgagattgcaccattgcactccagcctgggcaacaagagtgaaactctgtctcaaaaaatatatatatatatattgtataaaattactttcaagctatgtatatgaaacattaatggtatatgaaacataaaggtataagaaacattaatgaattttgtgtttagacttgggtcccatccagaatatctcattatgtgtatgcaaatattccaaaatctaaaaaaaaaatcccaaatccaaaacacttctagtctcaagcttttcagataagggatactcagcctgtatatgtgtgtatttacaaattatatacataggctactgtcattccctataagaatattaataaatctttttttgataaatgaagttctaatattctcttcccatgcctcgagggtactcatgtgagcaccctactctagagacctagttgactctgaccgagctcagcaatgattctgacgctatagaagatttcccttctaattttggcaggttattgtgtaatggcaattggaaccactagcgttcaagtagaattaaattgttgttcaccgttaaaatctgattagggcattttattatcttgccagcagggatttgggtcctgatccccctgaaaccaactgcagaatggagtgttcaggctctggaagatccagttacattaattactccagtggttcccagtgaactgctatctcttctaatccagcatgtttccaataaaagctctgttcttcctcatagcccagtgtccccgtcttccaatttaattgtttaagagattaaacaattaaacatcttccccttgagtccaaatttttaattttaggtggtagactggagtttaccatttcctgctctgacccatagagatgtggatccacgtttatagacgtgatagtcaatttgcaggtctacttatgacaggggcgagcttacctggtgttctctgcttacttgaatccaagtacgtaggcagcaaatgggcgcagagcttctgtgctgctcagagcctctgtccactggaccatagatttcttagggccccaggaagtccgaatatggcatttctatggcagctgaaaccaataaggaaacctcagtctgtcagtacttctttctcgtgagctagatgtgatggcactaaccagcattctgccatcgagctcctgacactgcttgagggtgaactccagagccctccgtgtgtacctgcagcacacagggaaggaaaacatcatcttatggatgatgatgtctgtaatttgcatatctcatttttgacgttcagttttcccagttgctattgttgattgtctgtaactgtcatttattacctagggtacagtccttgacagaattgactataacgttgaacagtcctgtatcaaaactgaagatggtttgaaacagcttcacaaggtaatatgtctttcaagacttgggaatcttaggaactattttcaaataatcaagaattggtaagagggttcttttccaccataacgatcttcagcattcttgtgttgtccactctcaatacagtagtgtaaaaagggattcatcatttcatttaaagccaattgtgggggctgttgccgttttattgcagttaatgattccaggtgtatctcacacttaaatccaaaattgctaagaactcctttttgtgacagtaaattctaaagagattggagttctttcttttagaaaatatttcattcttttctaatgcttcttgttttaggaaatcaattgggcatttgctaaaatatgtgttgaaaatctgtctgcttgttgccgttgacttgggcctctcttgtgatacattcctgatgaattgctgatggagaatcattctgcagaagataaaaatctaatcttctctttaattaccacagcatatctgtattaccttgagaaaagagaagtttgttgaagtgagagtagtaattcttttattctgtgctaataaggtagctgtttcagggatgtttttatgatattctcttttaaaaaaatagatggaaagcatcttaggaatcttatcggttataagaaacatgcataaacggctgagactctcatatataattggttacgtattttctttaaaaggaatataacaatacttcacaaattaaataatatccatttccttgtatctttgagacccagtggagtttctagccatataatgagtgttttgccaattcactgttggactactctaccatttttctgaaatcagtcgcttcctataccagagatcgccccatttaatagcagtattgggtttacaaaaagtcagcccttgcactagtctaaccagaagccctgagctgtcttttcagggggcttgttgccatgtgtaggtggatatgagactccagcctgtggtgggaagagaagtctgaccttgtctatgcagggtttttttaagcatttagattaatttggttgccaagccctgtctattaaaagtgaaaactaacttaagtttctcactctgtaatacccaggttttgatgtgctgctgaattatgcattggttttgaagtttcttaaataaaaactagtgaaatatgttttgtaatataacacagataaaaggaaaagctttctctgcgggagtgagcaaatctagtgggaactaaaaattttgttttaggttctactttataaatcattttgagaggttttacagtatattatttagtattggcttccctggtgttctgggttacttattagaaaagtcagcgtgctccatcttccctccagccacaaggctgtaggcagcacgcgcgtgctcggcagtcggctagtctaagggtgattgagcgtcgggagctgctccccatgaccggactctcggtgctgtccccgtgcctgatgtttcctcctggtggatgaggggctcctccaggtgggcgggcaggctcacttaggaaacaagcccaccgcgggggatggagcaggagagattgccattctcgccagggctgccttcccgctgtctcctcctccctcctgtgccatagcaaggtctggaagaggcagcgcatgctctccctggacgtgcctcccggcgccctctgaactctgctgtcctctggctctcctttctcagtgctctgcgtctttcgccagccaggtggggccctttggcatttctctagcaggcatgatggagttcccgctcctgccgagcttccaggatgcggtgttaaggtgaagagatgtgcagggtgcagcctcgtccccagattgagcttggagggctcctttgctgtatcgttagcggcactgggaggacgcgcctcagagggatctttctgcatatgacatccatggggcacacgtgtctgtttttatttcaaaggatgagtttttgtttccaaatttaggggaggtcgaaatggggcctcttccgggtgtctgttgcctacctgccaggtacggtcctccagcccgttgtttccttccgcggtgaaggaactgtgcattcgctccaggaacacggaccgggaacaggcgacccgtgctgcaggggcacttgccacggcctgcaggaggaaaagccgggagaagcaggcccagctgcacccggaagcatgagctttcacttccctgtcaggctttgtcttagtagtaggtttccaacaaatccatttccacgtccagggtaaataagcagcaccaggatcatggggctcttccactcctggtgattgaattccgtgggattgattggagggattacaatcatgtagcctgtagcagagacctcagtcactgtgcagagagatctggaagcctcattctggaaacgagtgggacttgatttgggattttggggaaaatgacggccttttttccctcctctttttgtaggcagaacagtatcaaaagaagaatcggaagatgcttgtgattttaatattatttgtcatcatcattgtgctcattgttgtcctcgttggcgtgaagtctcgataagtggcattgggttttcgtgtgtgccgcgcgtgtggatctcccgggtgtgaggggcttggcctgcgccccgccagctgcccgcagaggtgcagcctcgaggaatctgagggcgtcggggcagcgaacctttgcatccacggactcctccttccctagtcctgctcaagcggtccggggaatgggtttttgtttttccttcattgttgagaatttaaggacctttgatactgctgcacaatagagattgagttctgggatcagttataatatatattttttttagaaagagaaaatgagctgagagtttacaggcactgcagaagctgttcagtattatatgtgtatatgctatttttttagcagccatgtctgagcagaatgttaacataatttttggaaaaattttctttaaaccatctggtttttaagaaatttggtaccaaaaattgatgagtagaggcaaaaatgccccttcatctttctctatatattttccagttgaaaacaaactaagaagtcctttaagaatttataatccgttccccattaacttaatttagcttttccatcactgttaatgatcagagtaacaaagtgtgaaaaataagaaaccatcattgatgttaattaacacatttagatgggccagttaaaacagcttcataagttttaaattaattgtaaatggaatattcctcatttaaaatttttgcactgcattttctactgtaaaccaaaagaggttactaagcaaaaccacctaaatttaagttggtgatttaaatgaatctcacattaaaagaaagcttgacagtgttatgaaagccaccagactcagccagtgtgtccccatgggtatccccagccatccttgctcaatccattacttatatactaactacataatgacctgttcaaaccagactctatttaatgaactgtgaatttacacagaggccattttaaatgggtcaccccatttaggattagtggatctcaaattattaaccaaacatcactccatttcaaagtaaaatattccaccagcgatttgatttattggctcttccattgccactgagcaatgcccaggaagcaggcacattgccaaggactgggggcatcttgactaggaagctcctcgtttgtgtgagcgtgggtcagaccgccaaagtaggacttcatcgtttacctacctattatcaatatggtgcttgaatatattcctataactgtagaacagtgtggaaagtgatggtaactttgaagttgttcatgttttattggctttgttttaattgacactagtagagttttaatggtctttgtgtaaattttaatggcttttccattgtttttgcttctcttaaaaagtttaagaagaatatgacctcattaaatgtgctgttttatttggaccagtcacacaaaatgtctctctagagttgactttaaagttgtttacagaaatttaaactcaattccagagattgaagttgtccaaacagctcatgggcttagtgtccaaacccctgcccagccttccctttccaagttggtgccacctccaggtagccattggtggttttcctattactgat

SEQ ID NO: 9080 - DNA, 6000 bp, Homo sapiens
tcctcttggtgttggtagtggtcctcttggtgatggggtggtggtggtggtggtcctcttggtggtggtcgcggtgctctcggtggtaggtggtggtggtggtggtggcggtgctcttggtgatggtggtggtggtcctcttggtgatggggtgatggtggtggcggtgctcttggtggtggcggtgctcttggtgatggtggtagtggtcctcttggtgatggggtgatggtggtggtggtcctcttggtgatggggtgatggtggtggcggtgctcttgctattgttgttgctgttctctgtgaggcctgatcagaccatgtaacaaccctagaaaggctatgaggaagagctcagccacctccttggggctgtttcaggcatttcttccctggcatctaggtgtcccacttgcacacctgaggcccatgaggtcccatgccatgcagaggttaagctccatgggtggtagataaattacccaaacaggtgatccaatgtctgcatgcagttgcagctggggccacagacccctacccaaaatgattgctcacccctgagaacagagtaaggcagtgccaagatacacaatgcagggaaaggctccagcagaccctggcagaggagaagcctccttccacgtagggaacagcatctgcctgcagagggctgctgccaggagccagccgaggctacatgcctgcctggacgctgtcatgaggttgctgccggggttgctcagctgcctggggtgagggtgtctgcatccaccccctctgtcctcatggggttctccagccccatgtacactgttgcctcccacctgatgggaggaccctcgtcttgtccccgttgcccatcaagtgcctgccaccgacagtggccccagccctttctcgggtgcacagtgccacagccggtgggtcgctggtcctctgcttccctggtgcctcgggctgagtctcctgctggggcatcactgggctgctctcgtccccgacagactcacccacttcttccacccctgcatggtcccagggcttcctgcccttgccgggcccatgtggctgactcctccgctgtcctgctgtttcccaccatgtctgaccatgagccgcctttttaaggaaagcagattggaccaagtgtttctcgcctttccgttgcttttggttcttccaaaggttttgaaagtggttggaaaacattcttattttctcagggaccattttcagcttctctaccaaggatgaagagttggagtaaaaatgaattacaaactggcagagtcagtatccacctatttaccacgagccggagactttcagtggttgccagcgtagaacgctcatttttattaaccctatttccttcaagtgtctccttccatggagattgacaggccccgcacatggacatggggagagaggaggtctctgtgtctgcagcgctctgacatcctgcaggacgggacaaggtggccccgaggacccgtcagtgcccacggggtgcccataaaactttagcagtggtacatatttacccaaacttcactaaatcactttctaatttaccagtcattgcttgagaggccggaaagattggaagcccaaagaactgagcagggccgattctaccgggagaaagggtcaccgagacactcaacagctcgcttatcggtcactctccgggctgcgcctcctcggggagttctgggtttgcgcgggaggctgccgatggcacgcggctcacagataatgcgggaatggactgcgtgtcttcctcccagtgtcttcagcacacggctgttgccagcggcggtgatgggcttgcctgcctcgggggagctgatgggaggagggggagctttgtggacactgaggagctctgtgaggtggagagcagctctgttccaaacgcccatatccgttagcatgggactcaacctgtcaccctacatcccaccaagctgccatccaaaaatcactgtttagtgtatctgttaaaagtagcatgtttcaaattgcacagaaaattccgaaagctgacagcacgcagctgggcacctgtctccgagccccccaggaaaggcctttgtaagctcttctagctggggacggcagaagttaccttagtctatttaggctgctacaactgcagacagactgggtggcttagaaataacagaaatgtacttttcacagttctggaggccagagtccaaggtcagagaaccagcagattcagtgtggggtgaggtcccgcttcctcattcatagctggtgcctgctcattgtgtcctggcatggcaaggggagagggatctctctggggcctcttttataatgtaattaaccccattcaggagggctccaccctgggccccttccaaaagccccacctcctgacatcatcaccttggggcttaggtttcaacacacaaaattcgaaatttgggggcacaaacatttagccatagcatcaacagactgttgcagaccatgccgggtcctcccctggaaggagcagggcagaggggaaatgagctggaggcatgtagaaataggccaggtgtggtggctcatgccagaatcccaacactctgggagactaaaacgggaggattgttcgaggctagaagttcgagaccagcctgggcaacacggcaaaaccccgtatgttaaaaagttagccaggtgtggtgacacacacctgtggtctcagctgcttgggagcctgaggaaggaggatcccttgagcccaggagttcaaggctacagtgagctatgattgcaccactgtactccagcctggatgacagagtgaaaccctatctctaataaaaagaaaagaaaatatatttaaaaattttaggtagtcatagaggagatcaaaataacagaattaatgcttattgttaattacttttttatggaaacctaaggaaagaaaagcaaaggtctagaggcagccgtggcagggtcccctttaaaacagatgaacccttctcatgagaatatagtgttgcagatacggtgacagggttcagctgtgtccccacccaaatctcaccttgaattttagttcccataatccccacatgtggtgggagggagccggtgagaggtaactgaattatgggggtgatttccccatgctcttctcatgatagtaagttctcaccagatctgatggttttataaggggctttttcccttcgttccacactcattctccttgctgccgccatgtgaagaaggatgtgtttgctttcccttctgccatgattgtaagtttcctgaggcctccccagccatgctgaactgtgagtcaaacctctttcctttataaattacccagtctcaggtaggtattagcagcgtgggaactgactagcgcatatagccagacacgtggatctttttgatgatgtctggaggatactacaacaaatttatgcattcttcctggtcttcccgccttcctgctatgctccagtcttggcgccttggcacttgctgttccttctgcccagaacatgcttccccacccagctccatcctgtgcctcctttgggttttggctcagacaccgccttttaatggggctctcctgacttccagccttaggcttgagctgtgctcttccctccaagatactgggtctcctggcagccatgttccttcctgggaggctgcagctcacgcacctgcattgcatgagtggattttcttcactgctttctcccccaatgagagtggaagaggtgacttttctgctcagtcaaaggtgcatcttcagtgcctggcacacagtaggtcctcgctcaagactcaacagatgaaagcccaaacctgaaatctgaaatcagtgacccagttgagggaccactggactgcatgggtcatgggggcagcaagccagtttgtgctctctggagcctcagagaccctggggttcaaatcctggccgcgccacttgtcctgctgtgggtgagcaactggccttccccgaaccttggttttctcatctgaaaaatgggcctcatattgctcgccttctggggtggccatgatgattaactgagatgagaggcgtggagtttccagaacactgcactgcacatagtaagtgctcaattaatgctagctctgattttcatctcttgtaattctcattttaactcttatttggagataattgtaaacttagaggagttgcaagaataagacaaagaagtctctgattttcttcactgactcatcacctgttatttcccatgggttctatacacaatgtctgctctagtctctctgtctcccctttctctctctcacatctatctcagaatacacacaatattttccctgaatcatttgagaattagttatggatatcacacctgttgcccctagatacttcagcatgtatttcctaagaatgggatatactttaactacaatgcaattactaaattcaggaaatgtaccaatgatacgagattcatatctaatctagatattccagttttgccaactgccccccaaatttttttttgaggcggcgacctcccgctaatcaagatgccatcccagagcagtcattgcatttgctgtcacgccctttcatctctttagtctgaaagattcctgggcctttctttgtcttgcctaacactgctgttcctgcagagcccaggctagttgttttctagaatgcctgcagtttaggcgcggctgatgtttcttgatgacacttttattattttcatcagtgttatcattacagaattgagggcctcattcgaaaagtacaaggccggttttctgggtaaaacactcctctctttagctggccgctcactgtctcggcaccgattttacatggcccattgcttgctggagtgacatgaatggttactatggcgccgttacgcatggggagttccagggaaaatgagcttcttgcctaaaacaagtgcaggaaaatattgagaactatcttgggcctgtcacttggggagcactgtagaaggttctggagaaggcattgagactataattctactttaatgagctgggctacctagattctatggtacagcaagagaagctgtttgtatgcacctgtatgtacgtgccttacttaaaattcagaaagaaaatcttcaggtgccagaattacttgtgaggctggtgaagagtgaaaagccacttcccaggccagacaggaaagagtgccctggttgggaccagacgggcctggctgcagacgtacactttgggcttcagcagccctggtgctgccttgagcttgacccgaattgcttcttcccagaggctgggtctccctcgcagcccctgctctcaaggatgggaatgagaaggtcgatgacaaggcacctctgctttacatccaagcgttgacttttgtggcttcctttaccccattgctctgccctttaaagggtcctggtgtgtttgggaatgggacagacaattttgtttttcacaatggtattgggctgtggatccagaactcaagttccagaggaaagcgatgccaaagtcaacagggatgcttcacggaggcagggaaaatgcaggaggtaagatccttgagccacggcttgtgatgatgccactgtaataaatgctaattaccttctctgccgcgccagggggttgctgctgttttcttccccttccaagtgtgttgcgtttggatgtgtagtggctgttaagaagtttgtcagcttctcctaagaaaacgtcagtatggaggcgcttaagtaggtctgtgtgggtgcagggctgcagggaggcagtacattttgtagctggaagattcgccgcctgtgtgtggggatgcagagagtgtggtggatacctagctgttacctggctcatctccaagggggcaaggcctgtgcaaggtggtggggtccaacaggggtttctcccccacatcctcggcgtggctgtgtgaataacccgcct

SEQ ID NO: 9081 - DNA, 6000 bp, Homo sapiens
ttccagcaggtgtatttcatttgcatttccctcatgaataatggtgttgagcagcttgccatggtgcctttgctgcctgtgacctctttggtgaaacatccggaggtgtcttctgcccacgtggaggcgcagcctgggctctgccgcccacctttcacccgaggagcctgcagcacgtggagagcatcagggtgtgctttctttacagtttggggcttttttgagacagggtctcgctctgtcacccaggctgcagtgcagtggtgccatcacggctcaccgccagccttgaccttcacctcagcctcccaagtagctgagactacaggcatgcaccgccatggctggctcttttttaatttgtctttttctaaagacagggtctcactgtcttgattaagctggtcttggaactcctgggcttcaagggaccctctcagctcggcctcccaaagtgctgggattgcaggtgtgagccatcatgcaagtctggggttgttttttttttgctaaacaggatgaatagaaatctcttttgggggatctcttagtccaaatcctttagctgaatgcgcgtgtcccggtgaggctgctcctctagatgctgcgggcattttgcagacgtcccaccaactgccatcagcgaccaattagaagatagggacagctgcacatgtcacacagcccttctgaccttgtgtgtgcttcaagtccgagattcctgacacaaagcagcgtgtgcccccccacccactctgtggccacagctggagtcctgggctgctgggtgctccaggtgccataccccacacacgcatagagcccgtgggctggcagcgggcacccacagtggcctctgcaaagcctgcctggctgcggctcgtttcctcactgcagcatgctcataggaatgtgggagtttcgcttgaagtgtgggtaaagagttctggggttgtttgagccatcccaggccacagggcctccaggaagtggaggaaatggtaaatccagggtcctcttggccactgcgttggcctctgcacacttggcccctgcggaccctggggcttctgctttactgtctgtgacataaacaagtgacgcttgccaccttcttgccgggaaagccaggctgggttttctcatttccaccttttccctgttttacacgagggcacgaggatggggctgcagtatcagtgacgcacctgtcaccagcgggccacagagctttgtgttagcccctctcaagccctttagcttctggaaccgtttaaattcttaaaaattatacaggaccccaaagagcttttgtttatgtgagctttatctattgacatttaccatactaggaattaagaggacatttaaaattatttagctacataaaaataacaataacaaacttactacctgttaacacacattttaaaatgaaaagtggctacattttccaaaacaaaaaacgtgaatctttagctcaatcaatgtttcaaatggaagcattatgacagtcaaaagctggcaactaaacataactggcacaagctctgccaccgagacaatggaggcctgagtagtaggctccctgcagaatgaaaggactggagctgccagcatcaacaccaacgcatctcccaacaagggtgagtgaaaacacacacctaaagacctcagagagcacgtaagcacacagctgtgcatccactctgagggtgagccaccaagcacacggtgaccccggggagcgcccgaagggagtgaagtatctgaaggaaagaaggaagtgagcgatgggcaaaggagaacctgaggaccctggcacagtctcagctgcaaacatctagtcttgcttaactggggtgcagaggccactgcacctcagggttctcacgaagcgcctgacctctctattttattactattattattattattttttttttttgagaaggagtcttcctctgtcgcccaggctggagtgcagtggtgcaatctcggctcactgcaacctccacctcccgggttcaggcgattctcgtgcatcagcctcctgagtagatggaattacaggcatgtgccagcatacctggctaatttttgcatttttagtagagtcggggtttcattcaccatgttgcccaggctggtcttgaactcctggcctcaagtaatccgcccgcctcggcctcccaaagttctgggtttacaggcgtgagccaccgcgcctgagccctctaagagcccccgcctggcgtcgctgtaggcaaatcccaaagaacgtgtcccttcagcagccggctggggcgccacaaacactatctgttgtcttcgctttagtttgtgtcaaagtgactcaaagttacacaacactggcgggcgactgccgcctttttaccctgtggcctttcccatccaggcgtccagagggtgagcccctgccctccaggacccctcccttccaggaccctacccgtctgggactcaggccttccctgactcctccctcccggactcacccctcccagatccctcccctccgggaccctctcccctcccgggccccctcccctccgggaacccctcccctcccggactcacccctcccagatccctcccctccaggagcccctcccctctcgggacccctctcctcccggacccaccccttcctgacccctgccctcccggacccctgcgggactagatgtatacagctgagaccatatcacggttctcaccctcgctctaccctcccggacccctgctctcccggacgcgtggactccagctcccgcctgggtccccaaagcgctgaacccatggtcacttctatgcgtagccctggtgcccgccgcccacagccggaccgcactcctcggcctccgcctaacccctggctcagccacacgagtgacagctctgcccgcccgggcgggcgacgccgaggggtgggctcggccccacctgagcagttccccagcgcccctctgaaacccgcctgtggtccctggcgccgcctctaggggccgccgccgctcccctatgacacagcaacaataggggccgctctggtccaagcgccctgcggcccgcgcttccgccggaaaagagccgccggcgcgggggcggaccggggaggagcgagtgcgatggacggtcgccctcgccaatcgttggcaggttagagccggctgcgcggcttacggggctcaatcggcggcgagagcggcaggcggggcgggccgaacgcgggtttccggcggggcccggcaggcgccgaggaggaagagcgagcccggacggcgcctctcgaacgagtgtgggcgcgaggcaggtgcgggagtcgccgggcctggggcggccgggggcgaccggaggcgggggcaggggctgctggaccaaggatggggcgggggcagccaagacgagaaggtggccggcgcggcgggtggggcctgcgggggccgggccgggcgggggttctggggtctcgggcgccgccccggttccgcctgcggctctgaacgtggggctcggcgggagctcgggcgggtctgccccgcggagcgggtcgccggggtggcgcgtcgaggctggtgccccgcggagacggcgtcaagcctagggccggccccactaggcttggcggggctgccccggcccagcgccgagtgcgggcggtgcgatcgtcgtgagcggggcaaacgcggaaaggcagcccggcgtgtctgagtctgccttaggcagctctgggcgcaggccccctgctcgcaaacaccccagggggcgggagcttgccggaccgcaggcgacagtgaccgccgcgtctcagcgtcctctccgcgctttcaggatgacgacctcaggcgcgctctttccaagcctggtgccaggctctcggggcgcctccaacaagtacttggtggagtttcgggcgggaaagatgtccctgaaggggaccaccgtgactccggataagcggaaagggctggtgtacattcagcagacggacgactcgcttattcacttctgctggaaggacaggacgtccgggaacgtggaagacgtgagtgtccctgagccgcagcagcaggacaggcgacttctcgggccctcggagtcctcgctttggagttcgcggtgggggcttggccgcatctggggaccgctcgtggggccgtcatcgactgccctgctgatgggtcgtcctggtttccgcggtgacaggggcatctcggccactgtgtatcttgaactgtccgtgtgaggtgcctgggttggaggtgtggccctggagagcccggagctctgtgcctggccttgaactgtccgtgtgaggtgcctggggttggaggtgtggccctggagagcctggagctctgtgcctggcggcttcactcagtcttctttgtttttcaaactcttagttgttctttgttacatttgagagcagttcagcgttgactttttaactactctgggaatgttgtttccagcacgtctcagaaaccccgttgccatctgaaaggcccctttccctgctctctcccccggccttgcctttcatgggctgtctctgaccctggcttctctgccttgtggagaccctgccagcgaggggtctggcggcttagctgccccttgcgcaccccacccggttagacccagggctcagtacgctctcctgagactgggcacagtgatgccatctgcgccactgactctctcttcccctggcttgccaggacttgatcatcttccctgacgactgtgagttcaagcgggtgccgcagtgccccagcgggagggtctacgtgctgaagttcaaggcagggtccaagcggcttttcttctggatgcaggtatggggcaggccttggggttgtgcctttttgttgccctgcgattcggttaggaacttgcttacagtgtggtgcaattggcttttataaaccagcaggcgccggccacacccggccacacggcctgagatgccacctcagggctgcggtgcatgctacctggggccgaggtcctctcccagagtacggaggctccaggctgggctgcgggcaaccgattgcggtgtgaaatttccaggcagacagacatgctggccctggttctaacgatgcccagtgccctctctctgccccttgccgtgggtcactgaggcccccacagcagaggcagaggcccctgtgtggcttccctgctggtgctcacagaaacgaagcatcctgctcacactttccacagtcctgccccttccctggcagtgtgtcctggaggccaggggtgtcagtgcccagggtttctcttacccacagctgcagagcgtcttttgggtctagaggccgctgctcattctgccatctgtcagtgaccattgagcttgttgccgttttttgtgctgttacaggcagtgttgcaaagaatttcccggtacacagatcattttccataagccagtatcatctgtaggtgaaaactggtggcgggcctgtggtcaggaagcgtgtgcatgcgtttgcagtgtggagagagaaggccatgctctctgccagaggtggagctgctgtccccaccccaccccccttggcactttcaagagcaggggtggccctggctgaggtctctgtggagcacatggtctgtgttgctggtcacctgtgcaagtagtgtgcagcggcctgagaaaatgaacaggcatagccaaactccagttaaactttatttgcaaacacagatggcggccacaatttgccacctgctggtgtagaacgtgtttttccacggttttgccaagaaatagtgtccaactgttaccaccatctcccttttttccccgattttcctgttggtggcttttaagtcccccgtccctgctttgccatgagagcagggactcccagtgtccctggcgccctgcagcttccatagccattcggggtgtgcgtgggtgctctgctcccagctctgtgagctcgcaggtcg

SEQ ID NO: 9082 - DNA, 6000 bp, Homo sapiens
tccttttttatgactagataatgttcctttgtgtgtatataccataaattgtttatcgattcatccattgatggacatttgggttgtttccgccctttggctattgtgaatattgatgtgcaagtacaatcagttctcattattcatgaagttatgtttcgtagagttgccacaagcagtattagcaaatactgaaccattgctggggaaagacagtcagcaatgccacagctcatgcctggatggatcttctttaacacacaccatagccgccttatgtgtagaaacgtcagggagcacttcacaccacttggacattttaaacagtgagatcaccaacggaaagcacacggtatgacagacatggcactacatagtccgcaaaaaggactcttgtttacaggatgaggccagaacaaggcagagcgtcagcttatttgacatcagtcaggaatgtatgtggcgtggctcagatttttcactgctctgtatacccatgaaggcaccaagggtattcattttgggtttacaaatacattttagtgtatgggcaatttcacaaacacgtaattcatgaataatcaatgtgggccatatttgagtacttgttttcatttctcctgggtatatacctaagagtggaataattgggtcatgtggtaattctatttttaaccttttgaggaactgccaaactttttcatggcggctgcaccattttactatcccattagccatgtacgagggtttctgtttctccacatcctcaccagtgcctatgattttctgttgaggattattctatcttccggatggaaagtgtgtggataaatgagattcttgctgttttttacatttaatatgtcatattcatgggaggacatctttataaatccagttgcccctgattaaaagcagctaagcactaattgataacccaggatactgaaaagtcttctatgactgcaggtgccagaaatatttttgtcatcttattattcactttgtaattttttctcagccttatgactaccatttttttttatttagaattttttttatccaccgactacacccctgtggcttcacagttcgttgtagggtgaacaccactcttagattcatcttctatgcaccactgttgggaattctccttatggagatacctttggattattgttgaaagtattcatcgtagtttaaaacattactggcaaaaattcatctacatgtgcacaactaagaaatgtacactttcctttcctgctttgattggcggagttctgcccacaccattgccccttcccaagtcaagggcaggctcaccgctgctgtggcactgatcgtttatggctgtgttctctttctagggataacaggaatcgatcaagtgttgaacgtccttctcacaactgctatgtttgtagggggctgtgtggcttttatcctggataacaccatcccaggtacgtggtatatatcaaacacactttttttttttttattttttaacatatgtgttactttttttgccaaatagaaatggaaaacgggaagagtaaatgagttcaaagccatcactggttataactgttttctaaaacagttgtgatggcactcccagcctccatgtatgaatcagttttttgctacataaactgattaattttgtttctcgtgctgaaggacttttgggagacagcagctgagttcgctgcgtttggtgagatggcagtgggatgggcacaggccaggctcctgtccccctgcacagcctgtgccaaaggccctgcagtgtgggtttcatctgatctgagagaggtgggcacagcccgtggcacttctgcttggggagactgtcccttaaatgagttgttcctaaggtgggcttccagccaactaagaccagaaggcagtagaagaccatgggcaaaggctgagatcaggggtccaggatcattgacaagagatgcctggaggcagctgcctctccaatacccatgatccctgtttatggatacattctgtgctgagcttgggatgacagactaggatgttatgtgggtcctgccttggcggtggctgctgtgggccactgtaaagtgctgccatggacatactggcagatttccctgccttcaaggaagggtgatacttattcttaggctcaaaggttttgttgagattttcccctttaaacaacccatctccaaaaaaaataaaaaacctcaatcaagagattgctggggaaaccaaggcagaaggaatcacacacacaaatagatggaaggcactggatttaagagtccataacgactactctctttctctcctaagccagagggaattgagagagggatgcaacagtcaggctgatggaaattaaagtcagctttatttctgaaatactgatgagagagcagagcttagatataaaaaaaagtcatgagcttccttgctgagccctgtgtgctcagagcttcctccctgacccatctgtcagggtgcagagtggccaggagtgtccaaccggtggatgttcatccccgcagaagcacaacaggtacatgacctgtgtgtcccccatagcaccagacacgctaaaatggagcaaagcagcatgaagtgtgggtctgtctagatgggggggtgaatgtgcagtgactggttgatgaaggcattgtgtgatacaataaagattcagccctgttttgcaaactcagatttgcattttaaagaggtttttttttgactcagatttacattttacagagtttgttttgtgtgttttgttgtttgttttgttttgttttgttttgtttttaagacagagtcttgctctgttgcccaggctagagtgcaatggcatgatctcagctcactgcagtctctgcctctcgggttcaagcaattctcctgtctcagcctcctgagtagttaagattacaggcatgcaccaccacgcccagctaatttttgtattttgagtggggacgggatttcaccatgttggctaggctggtctcgaactcctgacttcatgtgatcctctcacctcggcctcccaaagtgcttggattacaggtgtgagccaccacacctggcctagagaggtagtttttgagcagacctggggcaggaggtgatgagccagaagactaggtaaccagatgggagaccgatagaatgaaccaggaaagcaataacatggcctgagctgggccctaacagtgaaaattgagaatatgggtcacatagaaggatagggaggtcagaaggtcattaggtgattgcttgaatgaggacatggaggggttagtgcttcttagacttctggtttgggcactggatagctgagcaccttcacctcctcaagtattctttgctgttatctaggcaggtttgatctgtgggaccatgtgtgtgtgtgtgtgtgtgtgtgtgtgtgtgtgtgtgtgtgtgtgtgtgtgtatgtgtttgacgacagtttcattttcagtagagctgctaaacgaagcattcctttgttctatcttgggatgtgtgacaggcactccagaggaaagaggaatccggaaatggaagaagggtgtgggcaaagggaacaaatcactcgacggcatggagtcgtacaatttgccatttggcatgaacattataaaaaaatacagatgcttcagctacttacccatcagcccaacctttgtgggctacacatggaaaggcctcaggaagagcgacaacagccggagttcagatgaagactcccaggccacgggatagcctttgctgtgccctgtggcctggccgcagtgaggcatgtatctgtagttccttgctgagtaacaagaagtaaaatacatgtttgtatatctacatttacattctgcgccccagagctaagacagactgcgaatcacttttctgctgtgagggtgatggtgcctgatgcggtgtctcgcctatctccttatttaagcccttaactccttgccctttgagagtgtccattgctggccatggtcactaaatttgaagttccagtcctccctttggagtggacatttaaaatctgcagccattccttgcttcagttcccttccaccacccagggctggctttcctataagccacctccagggtccaggggctttctctctctctccgaagcccctggacctgtttccttgtcatttgaccctcgtctgtgcccgcggagacctcctctgaccaaggggcactagtatgccttgcgctatcatgactgactggcccagtatgattctgttgtcgctgatctcccggaggaggaggctgttgacctgaaaacagtggcgtggctcccctgtgcccagatctggccatgggtgaggcctgcacagatgttgaatgaacatctgtttggggcattggagggaaaaggaaaggaccctgaagccaatatctgattctcggctgcaccttctcttggccaccctggccctgaccgggccagcacgtgcacactggcctcttttcatttcactagtggccgagacaccctctctggcatttatcactgttggccggtgtgatgagtatagagtgccacccaaggcaccagtcacacaagctgatgggcgtcttggctctgccgtcatgtggatgttattgtcgcgcgcgtctataattacaaggttttattcctatttaatgttattgactatagcagattttggaaatcagtgttttccatgtgaccctctttccttgcatccctattccttgtcccccacccactcttccccccatcaagaaaagaaccagcatttgtaaagctgtggacaccatcagggaagcttgttgtaacggcttttgaaggccagtaaccattgttgtggttgtgttttgtattgcttgataccatgaaagtgtaaatactgtaatgcctaatctatttatcaaaactgactactggaccggagcccagaaaccatgggtcaagttacacgtgaatttgttttgtgaagaagggaagctggggcaggtaacacgcagagccgccacgtggaacggtctgtccgccggtctgtcccgcttgccgggcttctgttgcaagtcttggcttaaggagacttcctgtgggttgccatgtcgcacgtccgttagatcttgattttacaggtgagggtggttgccaaaggtgataagaaaagcagccaacaggctccctctcacttaagagagttctaattaataacactaaattcttcctgagaaatgactcctcttggtttggtttgaagtttttcagtgaaggaaaaggcctgagataggaagcagtgccctcgcttcatgaggtggcacatcttcggtggccgttggcctggtcgagctttggtcagctgcgtgggtgcctgtctcctgtctccagcggcagggcatggttcttggcagcctggtgtccacacggtgcattcctgtccccctcggccccaggctggctcagctctccagtgctgcggcgctgtctttgcagcattgccatgtcaccgtagcccccttcactcttggaagtttggggcttcaaggtttattctggcaagaacacctcggagccactgcattgttttgccaaaaacttactgcagattaagtaaagaacttagatgctaaattacatctaattttgtatgtttttttaaatgtgtctttgatgcatactttagaagcacactggctcgcggtttccatccctcttgccttgggacactcttgaggctggcagccctcctgcaatgagttgctctcagttccttctgtttggattttgctcaacatctccagtttctctgctctgaaaaatggggaaaactgctaaacatcccagagatttgcaatcttctagctctccaggtgagcagaaagaccaaatatccaaataaaagcctgaaagccattggtgatccaggggcaccttctcttcagcttgactgggcgtcttccgctgcataacactca

SEQ ID NO: 9083 - DNA, 6000 bp, Homo sapiens
agggtgggtgcagtgttcgttcatttccttcagacaacgggaagaaagctggtgtgtttggggagctgaaaggcgcccagtggggccaggtcctggagagcctgtggctgagactgggaagaccagcagggccagatgaggccatgggagccgaaagaagggtgctggtctttatcagaaaagcactggaagctgctgaagggttttaagcagtggcctgacatgatcagtttgtgttttaaaaggtcactttggtggcagttcatggagaatagcttgaggtgacaagacagcagacacgacgtgggtctctgggactgcctgtgccgttgtgggcagcccctccagagccctgagtcacgcagccttcagaggcacccatggctacgagaagcacagtctctgcctgaggctccagagcggccctttttccccagcagcagaccttgggacctgtgagcgctgcatccaattaaccatgggaagggtcagcaccagccaccagccccttaggtgaggactctgcctggggctctgctgatggttccgaatcatggagctgcagagagctcctccagcctggagacgttcttggtgaaagctgtggtctaactccaccggctcttcctgcacattgtattcaagaggggtgcctgcccccgctgactcaggagctccggtgctgcagccgccacgaatggggaggtgggccctcgatgtggcctttttgtggaaggcggtgttgaccctggggctggtgcttctctactactgcttctccatcggcatcaccttctacaacaagtggctgacaaaggtaccaggaggccttgctggggcggggtgctgggatgaaggtggccagagccatggctacggtgcccttcatgtttaacaggaaggcacaagcttcaaccagtctaactggaagccagtcacggctgggctggaacagggccctccaagcctgccgtgccagggttccccttcagtgtttggatccagggaaaccaaggagagcggggggtgtgaagggatgagctggggaaactggggctcaagcagcagctatttaccccactagagaagtatttcaatattttaataagtgatacaacgtagtgggccgcagtggctctcacttgggcataggccgtgaggaaggctgggcaggtagctcacaggtgtgttgaaatggtggagacagcaccaggctaggattgagtctcttggctgccacctgtcttcgtgacctaagagtctgtcattccaagcgatgataccgtaactaagggccctacacacatagcaaggtcctcatgaaccaccgaatgagccccactccagcagaggggcgaagaggaagagggagccggtggggggcaggctgtctaaaccaagccggggtgtctgctttgggctccatacagagcttccatttccccctcttcatgacgatgctgcacctggccgtgatcttcctcttctccgccctgtccagggcgctggttcagtgctccagccacagggcccgtgtggtgctgagctgggccgactacctcagaagagtggctcccacaggtaggtgggggacctcagtgagggcagagcaggaagaggggctggggaaccataggatgagaacaagagagacacccgcatgtctggaagccaagtccctcccctcttcctgcactgttcctcctctgccctcttgacctggcctcccaccacccacgctgctgcctcttgtgcactgcgtgccttcccactgccccaccacacacccacaaaaccccccctgcacctgcggccccgcagctccctctcctgccagcagacaccgagcctggagtgcagccctcaggcctggagataagtggtgagcaggcagggtccctgccctcgcagggctgtgacacggacatggagggcactacggagcccagggaggggaccaacccaaggccggggcccatggctggtagaggaagatttcctaggccaggtgccaagtaggcagagccctgaaggatgcgtgggactggttggccctgggaggaggggccctcgtggcccgagggagatttagtgccagctgtggggtctggaagggaactcaaagtgtttcaggatactgagaacccggtgctggccagaggaagtgggaaaaatgagaactgagagggtgggcaggggtcatgtcctggaggccggattccccgtggaggagtttgtgttccatcctgagggaaaagggtttccagtaagggatcaaccagatcaggttaatacctccgctcagggggctcgccggagtgtttgtggaaaccataccggcccagccagttggaatgggccccagccctaatgctagagcagcccccgacctttgggggccagatattaaccctttagttgctggtggaaaagaaggcccaagggccccacaggaggcaccgggatggttcagaagtgggggacactcaggtgcctcagggtaccagcccaccccagcagagtgtggacctcccaagctgtcctgtgggtgcctgtgtcttcacagctctggcgacggcgcttgacgtgggcttgtccaactggagcttcctgtatgtcaccgtctcgctgtgagtactggccatgccctgctgcctcccttcaggctgaagctgtctgtctgtccagcggggtgtctgcacacccggctgctaggccagccactccaccactctgggaccagcccttgctctctcagcctctccctggcacccagcagctctccgggaagtcgccagcctcttccgtaagcccagcgcagaggagatgctgtgcccacctgccaggcagcgtggggaagccagggagctctcccagaaccccatcatcagagcaggggaaggcaggctgcaaggccacagacaggtggccactggtgggtggtacacgcagccgcagcagagccctatgtggcctgggggctacacaagagtttcttcttccctctgatgttttgcttcagagagcactgttcctgccttcttgtcctcctacttctcatccttccttcccgctcctgggctctgccgagggttaggtaaagaacaggactcagggagctcaacgtcagacctgtaacctcttctctctggtgataaccagaggcctcttagtcagagattccttctgattaaaggtcgcttatcactcagatgacagcccagctctgtttggtcatttcgctcagtgatttgtgctcctgctcctttctcggtgatgggtctgagccctgagctccagcagtgcattgtgggtaattttgcttccaggtacacaatgaccaaatcctcagctgtcctcttcatcttgatcttctctctgatcttcaagctggaggagctggtgaggccccagcgtctcttgtgtccttcctgcccccacagatgctaagaataaagtgggagtctgagcagtggcttgtcctgctgtgtgacagaggagacaagcccagtccaggtggcagtagatccctttctgagaagggacctagacatgggcaatactcagaatatttagaaaccagtgtggcagggtaatgaccaaaggtgaaagcactgcaggatgagggtcccagcagagctgggtctaggaagcaccctgctgtgggaggcagtagccctgtgtgttaggcccagggaggaggtgggaccacttgggggcctaggacagccgtcagtgtggcagagcaagcagggctgttggcataccagctgaccgtcagccctacatgctgacattggtgggcaaggactgtccaggaccccctgggatggagctgaagggtggaaggatttcttgccccaggggcagccaagatggctgctgaccccaggctccaaatgtgatgaacccttgaccctcaagacccccgagttagctgccactgctccccatcctaccagcgcgcggcactggtcctggtggtcctcctcatcgccgggggtctcttcatgttcacctacaagtccacacagttcaacgtggagggcttcgccttggtgctgggggcctcgttcatcggtggcattcgctggaccctcacccagatgctcctgcagaaggctgaactcggtgagcacgtgccactcatcctccagagagaggaaccccggcacaggcagggcggaggcagggcagggccggaccagacctgatggtgcctgtcccccgccctgcaggcctccagaatcccatcgacaccatgttccacctgcagccactcatgttcctggggctcttccctctctttgctgtatttgaaggtacgttgggccttccctctcaagggcacctcagtgcagcagaccacagatcctcgccctgagcccaacacagtggtagctgcagagattattgagatcaaagatgcagtccctcccctggaagcgcatggtttggggtccagcatgataaacgctacagagaaagcacatataaaattcagggaacagtaacagtaagtgtgcacagagccctgaaagtgcaccagggctgttctgatctttttaaacataggaactcatttcatccttccaaaaacctggtgtggcagtactattattatcccccattttgcaggtagaacaaaatgaggcccagagaagtaaagataacttgcccaaggtcccatagctcgtaaatgagccagaatttgaagccagcagcctggctccaagtggtccagccctactcttaaccaccctatcttgcctctaaggaatggggaatcagggattgttccaagatgctggagtaatcaggcaagtcagaaaggcttcccaggccgtggtttggagggtgagtgggattttggcaggctgcagggagcaaggcatctcggaagtaggaataggaggttcagccatgtccaggaatataacctggggatgtgtgttcaaggagtgtgggccacgcaggatcagcagagggtgggcttccagagctgggggctgaagaccaggagccagcacacaggagcctggggacatggtcagttgttcctccactgtcgtcctccagggatgaggagagccctggagaactgtgtaggctgggaggtgtgacgccaccttcctttctttgatgttttgggattagcctttgtcccctttctgtttatccttcctcccagagtcccgtctgtaatgccctcagggtcattacagaaaattctgtcccacatccatttaagtttcaagcagtgaagcgtcttgaacctccccaagaaaattattctgaagccccgttgtccaggaaacttctgttcagggcctcgttttttttccttctttaaaatctctccccactccttcattatgcccccttgtaccaaacgccacactctccctcccctcccgtgtgtttacaccatgccccatctctgcaaaacctcatctgaaagcccctggtagtcgtcacttggcaaagctgcatggatttagctcctttaatcttttctggtaaattaatcccccaagcgccttcattacttatgctgctcttccccgaattcccttcaatttgccgacgcctttgcagttctgctgagcccagcaccaaacaagatgtcctacactgtgaggctgttttgcctggggggactgtcactcggcatttctttggtgcttccctccaaaaatctcaaaatactcgtccagcttccagctaccacagttgtctcttgtgcccagttctgggccccccttcaccctgtgctaatacaccacgaggactttcgtgtgggagggacgccgggagtcattcttccagatggacagtgttggagggaccatgactcctccgaaagtctaagctgaatttggggtagggggtgtgcatgcctgtgtttctggagcaaggggccatgtgtttgcattttctttttgggaaatgttcatcaagtgataccacgggttggagaaataccagtctggtcccagg

SEQ ID NO: 9084 - DNA, 6000 bp, Homo sapiens
ggaggaagcaataagttgagaataacagatctggatgtttcataagcaagaaataaatctctctcatatttaagccagtatttgtaggttactttgttatagcagtttattttgtttcctagctaattaatacagttacaacacacctccactcagtggtggtacaagtcagggttcttgttgcaagccacacaaggatggggcaaaggagaggcttctgtagtgggaggtggtttctgtgttccccgagacaccacacaatgggaagccccttcccccacaaggagcagtggttggatactgggggtccagttttaattgtcatcatactaaacactccataataataatagcttccatttcgaagtgcatatcatgtgcccagcacggttctatgtgttttaccttgttacacatttaatcatcacaaaaaccctacaagatgaatattatctacaatcttcttttacagatgaggaaactaaagcacagagaggttaaataactcactcttactcaaacatgtcaagcacacttcctctctggggcctctcctgtctggaaagatcttcccccaggaatccattcacagggttcaaatgtcaccttttcgttgacaccttctcaaccactttatttaaaattaggcccggcatggtagctcagatgtgtaatcccagaagtttgggagggaggccgaggcaacaggatcacttgaggccaggagttcgtaaccagcctgcactacatagggagaccccatctctacaaaaaatggtaacaattggctgggggtggtggcacatgcttgtggtcccagctactcagaaggctaaggtaggaggattgattgcttgagccccagcaggttgcatcactgcactgcagcctgggcaacaaagcaagaccctgtctcaataaaaataaaaataaaaaataaaataaaataaaattgcatcactccctcccacccccactctactacacatagggtaaccatatattgtatcatccaaactagaatgcttttgagagtaaaaaggggacactagcctgggcgcagtggctcacgcctgtaatcccagcactttgggaggccgaggcaggtggatcacttgaggtcaggagtttgagaccagcctatccaacacggtgaaaccccatctctactaaaaatacaaaaaaattagttgggcatggtggcatacacctatagtcccagctactcaggaggctgaggcctgagaatcacttgaacctgggaggttgaggttgcagtgagccaagatcatgccactgcactccagcctgggcaacagagtgagactccttctcaaaaaaaaggcgggggcactaataatagttatgccagggcaacaggcaaaaactggggctgtccctggcaagcccagatgcacgtcatccttcccatcccccttcctgctggatttatctcctgctagcccctgtcaatgacacattttccttatttgtttattgctggtttccacccactagaatgtaaactccatgagggcagtaataattattctctattttgtttacagctctgtccccagggcctagcacagtacctggcctatagtagtcactcaataaatatttattaaattaattggtgaataaatcactgaatgggcatctggtgctggtgggtgggaagtgaagaagaggccataggttctctttcaggctcagaaagggctaaaaagtagacccctccctcccctttactgcttggctgttctacccagagctcagctgcatattttgcagccagaggtcaaggccccaaagggccatgcttggtgtagtcaccccaggctcacagcacctctcctccagcaagagaaatcctttgggaccaggccactgtccttgttctttcagctcccagcctgtccccagtgccaacctgccagcagccatgtggagctgctggtccttgtccaacccaatcctaccctgtgtctgttctcactgcctggaacctgagcaccctccctctccaccccctgactgagcgttccagcacctgagaatctcaatgaagatgaagatatgggaaaatgagacatgaatttgactgaagcataaataggcacaaaactttgggagggtagtttggctgaggagtcgagtttcaaagtgcttgtcacctacaacccagcaatatcacctgtagaaagatgtcctcagaaacattcatgtgtgcaaagatggctggataagcctgctcactgcagcactgtttataagagacaacaaaacaaaaaaaaatgaaacaaaactggagaagtaacattgttaaaatgtcctacagattccatgtaattcttatcaatattccaatgacatttttgtagaaataaaaaattctaaaatttatatagaatcataatagactccatatagtcaaagcaatcttgagcaaaaagaacaaagctggaggcatcatattgcctgacttcaaaatatactacaaagttattgtaatcaaaacagcatgtcactggcataaaaacaggcacatagaccaatggaacagaatagagagcccagaaataaatccacgcactatagtcaattgagtttcatcaaacatgccaagaacgcgtaatggagaaaggacagtcttttctataaatggtgttgggacaactggatattcatgtgaaagaatttagactcttatcttacatcatatgcaaaaatcaactcaaaatggattagacttaaatgtaagagccaaaactataaaactcttataagaaaacagggacaaaatgtcatggcattggcctgagcaacgattttttgtgtaggactctcaaaacacaggcagcaaaagtgaaaatagacaaatggaattgcatcaaactaaaacgtttctgcacagtcaagaaaaaagaaaaaaaaagagtgaaaagacaaactacagaatgggagaaaatttttgcaaaccatacatctgatgaggggttaatatccaaatatataaggaatacaatccaatagtaagaaaggacaaaacctgaattaaaagtaggcaaaagatccaaagaaatctttctcaaaagaagacataaaaatggacaacgggtatattaaaaaaaaatgctcaacatcactaatcatcagcgaaatgcaaattaaacccacaatgagatatcacctctgacctgttagaatcgctattttaaaacataagaaagataataagtgttggcaaggatgtggagaaaagggaaccgttgcaccctgttgataggaatgtaaattagtacagacattatggacaacagtatggaggttcttcaaaaaaaataaaaatagaactaccttatgatccagcaaccctactactgggtacatatccaaaggaaacaaaatcagtatattgaagagatgtctgcagtcccatgttaattgcagcatcattcacaattctcaatctgagtgtccatcactaaatgaatggataaaaatatggtacatttatatacacaatgggatactattcagcctttaaaaagaatggaatgctgtcatttacagcaacatggatggaacaggaggatattgtgttaaatgaaataagctaggcacagaaagacaaatatcccatgatctcacttatatgaggaaggtaagaaaagttgaactcatgcaagcagagtagaatggtggttaccaggcggtggggtagggggagggagatagggaggattttgagaagttggtcaaaggatacaaaatttcagttagataggaggaaacattcatgaaatctattgcacgacatggtgactatagataataacaatgggttgtattcttgaaaaatgctaagataatagattttaagtgtcctcacccccgaaatgatcagtatgttaggtaacgttaactagctggatttagccattccacaatgtatacatatttcaaaacatgttacttacgataaacacgtacaatttttacttttccttatgtacgtcttcatctggctgttcatttttatcttttatactatcttttataataaactggcaatagtaagtaaagtgttttcctgagaaacaacaaactggaaacaactgtttagcaacaagaaactgcctgaccaggtagaaggacgtggtagctctgtatgtattgatatggaatatagtctgagataaattgtttaggaaaatgaaaagcaagttgccaaagaacccacagtatgatgtcatttatgttggaaaaaacgccacaacgatgtgtgagtgtgcacactgaatgaaagaaaattctggaaagaaactaacggccagcagtgtcacaagggggataggtagtttatttatttatgtgtgcgtgtgcaaagttccgtattgtaagaatttgctacagcctgtgttattataagctttgtaatgaaacaggtagaaactgaaaaagtttaattattcccaattcagtttaggttctgtctccggaagactttcccggattccccagcccccactccccaccccatcttaccaccccctctgccagctctgagtctcaattttcttttctgtaaggattttcatcatttaaccttatttcttctgaatgcactaaatggtagttatcctagcacttaagaggatgtcggaaacatggttcattgtctgacccttccgactctgacttgtatgagcacattttggggggaatgtaggagtcaggggaagaggagttccaaaaagagactactagagggtacagctgtcccggaagagacttctgaagagagcaaagcgcgtccgacgtttttctcgagaggcgccgaagttttccggaaagagacgaccaactgagaggtgggcccccaaagccggctgcgagagtcaccgaagatttccggagagccaaggagtcgggaagagccacttactgagcgttgccgaacgtgtacggagatagccgaagaggcggaaggcggggccacaagagcccttcctgcagggaacctcaggcttcagagagccgaaaagttgggaggcgtaaccacttacaggccggaagtgtccggggtggacgcattcgggtagccgaagaagtcccaggattgccgaagaagtcccaggatttccgaagcgagccgaagcatcgcgacagttttcagagacagctgatcggttggagctgttgcgccgagcagtcatggcggcggccagagctactacgccggccgatggcgaggagcccgccccggaggctgaggctctggccgcagcccgggagcggagcagccgcttcttgagcggcctggagctggtgaagcagggtgccgaggcgcgcgtgttccgtggccgcttccagggccgcgcggcggtgatcaagcaccgcttccccaagggctaccggcacccggcgctggaggcgcggcttggcagacggcggacggtgcaggaggcccgggcgctcctccgctgtcgccgcgctggtaaggtgggccgggatcccggcgtgggcggccccgaggctctggggcctgggcgggtgagggactcccctgcgctccgaagctggatttccctcagtttctccttctgtgccttctgcggtgtccggcctttcggaaatgttattctttcatcccttttttcattcgttaagtcttaagaaaccacgtggccatgcagcgtcaagcttttgtcctgaggccgttctgcctggttcaaatctgggatctgtcattattgctcaatgttgaacatgtttaacttccctgagccttggtttccccatttgactcgtttcaattttcgatcattatctttccatttattagttttaagaaacatgtaatgacaagtacttgccccactggagccaggctccctgggttgaaatactaactctgctgcttgtgtagcctttcaacaagttatttagcctctcagcctcggttttctcacctgtaaaatgggagacata

SEQ ID NO: 9085 - DNA, 6000 bp, Homo sapiens
gtttcccccgcacggggcaaactcaagccgctatggctttggaacctcagggccaggggtcatcctgaaagtctagctggtttagcagacagtcctctttacacctctttcctcctcagtaggagcatttaattttctgtctgtgttattcaaacaaaaaaccctcaagagtgatactgtttctcctttatcagctgggggagcagggcccggaggctgcttctctgctaagaagctcatgtgtgttcaggattgcaggatagactctctctgggggaaactttcagttaatgacaaccccctcacgccccatcctccgtgggaaacctgcagggcccaggctctctagcaatggcccatcccttgctcctttacctcaggccttctcagtgggggtggtgtggaccccaccgcctggggaacaaacagtggtctttggtggggtgtgaacaaaccctaaccttttacgtataaaggagatgtatatataatattataaacagatacacagtatacctgtgacattaacatgtcatggaggtggtcaattaggagaagaagaaaagtctaaaaatgttccttaaggggcaataacaacaaaaaggcagagaaactcgaccttaccctggaagcatctttgatcgcggctcttttgccagcttccaaagctccttaggaaggttttagtaaaggtaaaagaaacatcccctgaaaagtaaaggtttcacagttgcagccccagtttctagaaaggatttgtgagcatttactgtgcgctccaggaactaaaggagcatccctgtgaacagtggagttttaaagcagtttcacccttgtcactagtctctagaaagcgttttgtgagacctagtatgtgctcaaaggcttgggcctgaggtggtcacagagatgtggcccctgctcaggaagctcagcttgtttgtgatagggacacaccacaggaccgggtcagaggtgtaggaaaaccacagggtgagttgagccttgggcctggcacttagtaggtgctgcctcagtggcagctgcatttcagcatcctgtgctcagaaagtggagaaggggcttattctggcttctgctatattgaaagccacaaactgtcactcctctcttaagaaaacctcataaccgggtttataatcctgcagcaggaaaggcagtacgcccgccccccccaccttccatcagagtccctgagggtcagcttaagcctttctctgacaagggggtctgaacactttgcaccatgacccagactcatcctgtggctttctgcgaccatcactggaagcagagggtgcatttgaatgtcattttctgctcgccagtggccgggacttagaaagactctccaactgttagacaacaccaaatcaaaagcatctctgagttttcttcccctgtaattttctttccttctttttttctcttttttttgagacagtgtcttattctgttgcccagggtggagtgcggtggtgcaatgttggctcactgcagtctcaagctccccgggctcagatgatcctcccacctcagcctcctgaacagctgggactataggcatgtaccaccatgcctggctagtttttgtattttttgtagagacagggttttgctgtgttgcccaagctggtctcaaactcctgggttcaattcttctgcccgccttggcctcccagagtgctgggattaaggcatgagccactgcatctggtggcccccatagttttcttctcctgggtgttaaaagtagcatttcactgtcaggaagctacagaagagagagcgaggaaaatcaagctgcggcgctgtgtgctcttagccatggtaccttcccttacagtccatggagaaagagggccaatgccaggaggctgtgggtttgtgacgggagatgactttccctttgatagttgtgacgcctgtttctggaccccatgcaccttccggaatattcctgcctgctcactgccgtcttcccctttccttgcagatgtgtacttcatcgccaccttgtcattcttgtggaaagtctccgtcatcactctggtcagctgcctccccctctatgtcctcaagtacctgcgaagacggttctctccccccagctactcaaagctcacatcataggccgtgcgttcgctggagggggccctggtcttggcgcttccctgatggacagagctcaagttccatttatattaaccgccacctgtggattttgcagtaattgctaacacatgcagttttaatgggaagtggctctgcgcctaaacggagtcctaacgctgcatcaacgggagggagggtcctgaaagagacccatctgggcctgtctgaacccctcgttcttcatgtttaggtgaatatgaatatgttaaagctggtggctcagctgggagatttatatgggtcactgtgcgagcttccttatgacttgaattttgttgtcacatgataaaagtttctgtgtagctgaaggttgtagaaggcttgtgtgtgtgtgtgtgtgtgtgtgtgtgtgtgtgtgtgtttttaaagagtcctaatgtgtatgtactctttatgtctttcttgctcttacaaagaggtgtcagaaaaatagaaagctcttggtgtcggtttgggaggaaaagacagtgacatttggtaaaaagttatccacacaataatctccattcggaaatgctcagtatcgtctccagccagccctgcttatccaggttacactggattcctgggatcgtaaccagtaaatgagaggagagggagagagagtgtcctaagtccaatctgttatccttgatctgattcagcatccatagtgtgtgagttaacttcacctgccacctcgtaaaagaatttcagaggtgtgatcccgctttattgggacctggtaacaatcacaaagccagtggctgtttgagaaggacctcagacattttcagcagagttgttttagcaggaaacgtgccactgaatggcccctaaatgtgtcgacagtgtgataagagactcaactaattctttaggcaacatggcagatgtgactcagatcctccaagaccaaagcggaaaggtcagggggctgggactcttctcttccatagaagcctgtttcctgttaggaggcataatggaagatgaccccacaaaggcagaggcatctttcggaacaacactggtggcagctttcagaacaaggaacccctggtgggaggacgcccaagctacagcgttgggatctgggatctgttccactgccggcagatttcaaggggaacttgctgaaaggcagccagtggtgaagatttctcccctcccaggatggactacatgccggcatgtttcttataaagctgtggctgcttgtttcagaggaagggagtttgcagtcgcgggacgtggtagagcaaggcattcttgggttttcaagttgcttcttgcagaagccacatatgcatgccataagggttaagttggtggatctttaagagccaagtgtggttgagatcttggatttgcgtttacttcttgatgaatacatatccttcaaaccctctgcctggcgctacttctgtgtgcttcagagatgtacatcacagcctggtttctgatgcctactaactcctgctcttggagagctggagacacgaggatcagatagtcccttgcctttggagcactcttgataagcttttgtattttgtgttgtccttttaaaatgttctagaatgactttacgttgcaggtactggttaattggctgttgacaccacatctattttgtcttatgattctgcagttttgcagtacttttctctatctgattcagccatttctgccagagggaaaaggtcggcagaaaagatgtattgagtgaatagttaaggataggatctttgtccaaaaatttcagaaagattgagcaaatctgacgtattcattgagtgagtttctgtgttttcaaaggtggaggagaaatttgtgctggaagtttttaagcctccgttttcttggaaatcagtctgtaacactggcaagtcttaagatagtcccatttagactttgcagatgctgaacctggctctgtaacgctgggaagtcttaagatagtcctgtttagactttgcaaaccctgtacctggctttgctcggagattcgggatgctggctcctgcaggcagggcgtgtgggagcctcgtcagaaagttttagaggtttccagcagaagcagaatgaagatggtctccctggccttttccttaattctcaattttgattgaggtgcacaagttgacttttaaagccaacgcttaagatactgattgacatcttcaagggagaatgctcccaggaggggctgaagaagccatagttggaagtggaaggtactcgtcagtgttctccacaaacctttttactctgttgtctcagccgcactggggcggaggcggtcaagggtgagaagtaccgacactcaagtgcaaactgccacgtcgttggcccatcccatcagtgggcagctggctgacgccattcactggacggtccctgaacacctaggaatgcacacaccgtgcttctcagacactggagacgcaaaggcaggaggatgcagtccggtgagaggacacgatctttacctgcacaatcagactgtaagcccagcagagaaccccaggggcgcctgggtacttctcggaggtcatcttagttgtggtggggaagacaaagaaataagcaaacaagaaactagagttactatacaagaaactctcctgagtttgtaaaccttaagcataaggattcagttgacctttttcttggttcatcaatctggaaagaacttacataaagcgccattgacactgtcacctgggagctccatgggccgtaagtctttgacagccaatttaatttgaggtcagagggccttgaggtacacagtcagcactgtttgaacacttttcctgaaagcaaaactcacagctccctgcgccctctgacaacactagctatttctgccagagtaagaacttctattactattttattattgttcatatgtcttttgatgatggttgtgtgacagggggaagcaggatctatttggtttcttcccctccccccaccccttcctttttgtctctctttttttttctctaagaaaatcaccagactagtttttccatcttgagtaatttcttatgtgggacagttttgatcctcattttgaaagcatgcgtgtgcacatgtgtgttgcctgtggtgccaggtgagacaggtggcactaactccagctgcttggaaggcatcccaagggcgcatcttaaagttggagcagacctcccttttccagcccctggggccattagaccacgtgctggaactagcattgtaaaattcccatcccagttccactcccctgaagtgaaacccttttttttttgtgacagtaaatcttaaaaatcattgtctctttatgaacatttcctcagtttcttctctgctgaaaatgtaagccatgctactttttaatgtattttgaattttgtgctcattggaaattgatatgctaatgcctcccccaccccccgccagacttttctttttatactttgtcttgtttttactggggtaggctgggcatgcgtgcgtgcctttagggcagcattttaaacctttgccaaaattgcaaatgggacatgtacattcttctgctccatcctacttaaacacctatcagctatttttatctttaaccttttctgtatgtttgaagtgtgtggggggtgtgtgtgtgtgtgaaagagcgagagaatgatgtcatctaaagttttttgaagaattatttggttttcattgcattaaaattctatcactcccagctttgttttcatttaaaaaaatatacaaagagctttgtaaatacaacacattttatttctcccccttcttttaatgtacagcttt

SEQ ID NO: 9086 - DNA, 6000 bp, Homo sapiens
gtgtcattcatgacaagagagacgcagaacacttttggttgggtatttctggtccgtgaaatcagcttgagtgactcatagttctttctgaaagtgtttcagacatgagttaaacatctggaatcttccattcccctctcaagctcaacctgtggtagaaaagtctgtgtattaagctatttaaggtaaccaaagaccctgcagggcctgggctgctgtcaggcactgaatggatcctagctcagctctgcctttcactggcaccttgaatcttctccaagtcatggccctctctgggcctcagtttacccatctgtcagaagacaaaattggctctaatgttcccttctgtcctctccttctgcccacccttgtctccctgcctggcttccaaagccctctcttctcgggaagaattcagttccctgctggaattgaaaaattggacagaagagaatgggatggcaccccgggatggaggtgggggtgtcatctgtggccaatttagccgagcatctttggattgctgttggagaactcaaccatctgacatttgtccagcagcaaagctcctgtatatttgtacagcagcgaagctcctgtatcagcgcctaaacacacacaacacaaccaagaaaatgcgagaacacatgcagatgcacgcacaacacacacataccctcatagcacaaatactcacatgcgtaccccaaacatatgtacaatacaacgtgcaccctcaaaccctcaacacagacgacacacaccacacacacacaaataccccacagcgtgaatatgcacatgtacgtcctgcatatacatgcaacgcacacccacaagctcacagtggagaccacacatgcacaacacgtctttctggctgagacttctggttctggttgataccatgcaaacgctccttgctcttcttggtaggtgctagcccaggtgactggcttctggatactcagctgcaagaggatacttggaggtggagagggtgagtgagcgggaagacttgttagccagtcatgaaggcagccaaaaatgggatttggatgtgtttgtgggtaggtgtccctcctgcatttagtccacagaggtttgccaagcacccactgcaggccagaccccaagcaaggcatgccagactggcctgccccctggagcagtggaggggatggtgaactcacagacaccgagtccaggggccgctgggccctgtgctgaggcctccccacactgcctctccctcactgtgaaatcccgctcctccctgtttagtggcagaggggacgcaggttcagtgagctgaagcagcctgccaaggctgcccacgccagacccagagcaggtgctggagtggcctctcaccaacccagccgctccagcctcactccgctgcagagtcagctgcccctcatggtcggagatgaggttttatgaacagacaccaccagcggtgaggcaaatggtggatccccgggggcctccgtggagctgagggggacggcgccaaccgagtccagtgggacggccagggggacggcgccaaccaagtccagtgggacggccagggggacggtgccaaccgagtccagtgggacggccaggggcacagtgccaaccgagtccagtgggacggccagggaggacccagtcaaaggcagtgaggagggagacagggtgcagaaggcatcatttgctgaggccagcccatgggctttagggcccaagtacctgattcacatcccagctccacctcatccttgggtccctgagcctcagtgtccccatctgtcaaatgggaataatatcagcttggacctcagagggttgtcgtggggatccagtgagctcatttctggctctccgtaggatcccaatgcatatttgtggaatgactaagtggaagaatgtgaagtggttagaacagggcctggcatggcacatgggcagtgcccaataaacattggctcttactagtgtttaaaagtaaaacaagacaaaaaaaatgaaatccaaagttgctaacctgtgaaagttgacagccccaattaaccccaacctgaggaagaaaatgaccctgctggacggtgtttccaaaggtgctaagttgggaggggaggtcattaatctgcctaaggtttcccaagactaattctgcagaggcagctccgtccaggcaggccgggggtggcaggcagacaggggcacggctggccctgaggagggcctctgccttgtcccctcaaccggctccccaagcaggacttttgttggctcagtcaggcactttccacagtggccagccaccctcggccagcgggcacagtcagaacactgccagccaccctcagctgtggccaaaacccacactgacttccatggggtcccaactggctgccagtgtgggcctggcatctgagcaggactggttacagatttgcaggcccccgtgttcagaaactgttaactattaggaatttcacgatgtcaacagtagaaaaaattaaactaaaaaataaataaataaaataatacaataaacccccgacccttcagagcatggggccctggagagtgcaggggggtcacactcccacgaagctggctctgcacacaagtccagcagagcacagatgcgcggcgctgctgggagcaaagccccttaacctgctgaaacaggacgtttcctctggaaaatccccccggccgcggattcaacccatgggcagggcggatggtggcacacgctgtctggagtcccagaaaggcctgtctctgcagtcacccatttcacaatccatttgcttcacacacccatttcacaaccccatggccacagccaggctgagaaatgtgtcccaaactccaaacctgctgggaccatgagagtctcccagttcctgatgcccccactggcctggcatcccctctctactgtcccctacatgcccagcccacatctccccagagaggaggcccaaccctttgggctcaagtcgcctccaaaccctctccttttatattcttcccaggtctcgtccctctctgaaattatcacctggactcatctttttacacatgtgatgtcagcctcacctgtgagcctcagtatggctggggctgcacctgtgggtggttggtaactgcaggtggaatgagatgccacctcctcagggagggcttccttgatctcaccccaactctggcctttggcctgttatcaccatgtctgaaatgacctcctgacctcattgagctatgagtttgcatgtgtgtgtgtgtctttagtccctttgtcccccacaatgtcacacgaggtcagggagttggttttcttcccagccctgtgccccatacccagcacagagcttcacactgaataggagcagaatgtttgttcaatgagtgaacaaaacctttttttttttgcctctgacttgtggcattcttcccagggactcaggcctgcccaatcgcggtgccccctccccactcccactcccagcagtgagccctccctcctcagcccattaacaccttggctctgcccatttctcctgggtagaatcagggagttgtgaccttctctgcctgtgcctgacagtgggctctgcccttcatgcccaaaatgccagcatcacagtccctggcacatctagggttatcagatttcgcaaagaaaaatacaagctatccagttaaattgagatatacttacactaatcattattcatagtttatctgaaattcaaactgaactgggtgtcctgtatttaattctcgcagtcctgggcacacacgaagcctcctatgagtgctggcagtccagcctatgctccttccaaagcaattctcctttcctactgccccgtcaggggccctgtctgtgctggaatcatcattgtcctcaactgcaaaatggaaaataaaatgatagtggttcctccctcccggggttgccaagatgattaaataacataacaactaagatgtatccggccccttctcctctacttgcaaggcatcgatcccttcattcctcgcaatcacaccacgtgaaggtgccatgaagccaccccattttgcagaagaggaaactgaggttggagaggtgaaagcactcagccgaggtcacacagctatgtcccactcatctttgggtgaccctcaggttcggaccctgaggtctgaacactgcattaagctctccagacagaatcaacttcggaactagcgccagagaccactaagtcaatcccaggtgacaccatcagcactcaataaatggtagccactgccggtgtcgcagatggatcaatgggaggtcaagcgttgtgggtaggtttggtttctttaagccactgaattaactggttatttttgcctgctggcagtgcagcctccattgtgtaaatgccatctcacttccaagacaatcaacgtgtgacttctcccagccagactagccaggtctcccgagacttcccggagggcaggggctgtgtctggagtggctgaattccccggctcagggttgcagctcagccagtttgttgattgaatgaatgaagaaatggctgaaagcaggggtggtaatgatgacctccttcaccctaggaagtgaatgggacccaggtcatctccaggcccagccagtatttgcagtggcaccccaagggatgctgggggaccccttagcttttctcttaagttgcagcggccaaactgcagcaatatcttccctgataaaagacacgctggtggtattgccccttcctcaaggcaggggctgagggcgcccagttcacagcagggtgccatctggggtagacgctgggtattgccccactcctgggccggggcctgggtcctgacctagtgctggctgtggctccaagagtgagcttctcctcccaaacagaagacggtcagtgcctctgaacctccctctgggctgggcacgcttggactcctccaaagagcttggaccagcctgagccacatccctgggcttgacttctccagaacaagcctcctggtctttctgggagagctctggcagcatcactgtgcctgtgcagggagagcgggaacccacttcctgcaccggctttctctgagttcttcaggatgaattcgctctggtctaggtaagttctaccccgaggccaccttcacttcccaaattccagcttttccttctctatccaaactgttacaaacacagtaacaataatttttaaaagctttttttttctctgaacacactaagtccctgctaattactgaaactccaggcattacaggaatatgtggacacttaaagaatcaggactacgtgggagagggggaggcagctccccagggtcctgggttggcacacaggctccaccactgtgtgactttcaacaagcgacttccttgaccagctgcccgctctgtaaaatggggagagtaatattcggccacactgagtcggtgtcaggttgagttaatatttggagagtttctggcacaggtaggtgctccttaagtgcctgttaaataagtgaagctttgagaaagtgtctaaaaggcgacacactaaatttttaagaggctggaggtgggccagggaggggaggtctcttatgtaatattttaatatctttttaaacctgaagaatgtgttcttgtagcactcctgtaattaaaacttaatgaactaaaagtacacccctcctgctcataccccttttgaactccgcagccgcgccccccagccggaggccccttgggcagcagacaatgggtgtggattcgccccaggtcccgccggctggggcggcgacaatacaccagtccccgacagctatttacatgacaagggcttccgggcgtgtctacgcgagttcccgtctttcctggtcgtcctccttgggttcgggtgaaagcgcttgggggttcagtgggccatgatccccgagctgctggagaactgaaggcgga

SEQ ID NO: 9087 - DNA, 6000 bp, Homo sapiens
tgcctctgggctatcaccatcaccatgattgtagccccttgaaggcacagtttatctggctcatgggcccagaccagggtaggggcttgtttcagtcctcacagggcaacaggcagttggagttaaggtgctgagaaaggcactagatccaacgtcaccctcccagcaaacagctactgttggaaaagcactttctattgccaacagagttctcatcgtctgagaagcaagcagtgggcctttggtgttctgggctcctgctgtgggtcagcccctggctggggtcagggtgagattcagagatggttcaggttcctacccatggcaggtcctggctctgggaatctcagtggagaaagtggagaacagggagttggaccagtggagaacagggaggcagaccactgtacgggtttcacataacgagaaagtgttggggtgggaatggcaagatagggaaaggggttagctggaccctgaaggatgtgtgtttttttgtttgttcatgtgtttgtttgtttgtttgttttgagatggagttttgcttttgttccccaggctggagtgcaatggtgcaacctcggctcactgcaacctccacctcccaggttcaagcagttctcctgcctcagccttccgagtagctgggattacaggcatgcgccaccacgcccagctaattttgtatttttagtagagatgaggtttctccatgttggtcaggctggtctcgaactcctgacctcaggtgatctgcccacttcagcctcccaaaatgctgggactacaggcgtgagccactgcgcccggccagatgtgttcatttttgaccaggtggagagggggcatccaagcagagggaataggggagagggaaggtggtgtggaaggaaaagaccagggggagcactgagtctctcagtgaccttgaagatagcaaggttaaccattccttagctgttttggcatctgctctgttgtcaccacctccccacggcacgggtcagggtctgtcacagcctcgtggccccacgcacttcacctagtacatgcccctgctggataataaggtttgtgtgtgactgatgtgggggatatctttggccagtggtggcatcccctcaagactttgtctcgaatgagggtgggtagggcctgtgtgtgtctgtcttggtcattgcagtcttgaccctcgttctccctgctccagaaatccttgcggacggaatggctaagcccagagctagggccaagtcaggcagggcttctgcattggaaggggcttgagagggttgggggcttcaccatctcacctctcccctgcccttctctcatccatctgcaggttcatcatgcctagtggcgtataagaagaccccgccaccggtccctccacgcaccacttcaaagccgttcatctcagtcacagtccagagcagtactgagtctgcccaggacacctacctggacagccaggaccacaagagcgaggtgactagccagtcgggcctgagcaactcgtcggacagcctggacagcagtacccgaccgcccagcgtgacacggggtggagtcgccccagcccctgaggccccagagccacccccaaaacatgcagctctgaaaagtgaacaagggacgctgaccagctctgagtcccaccccgaggccgcccccaaaaggaaactgtcatcgataggaatacaagtaggggctccttttgcactctgtgtcctcagcccactccgtgcacctgcctgtgtgtaattacatctggtagaggcccactaggtctcctgggaaaaggtggtttgtctctctattttgggggatcagccccaagtggccaaaccgaattccacccatagccacgcctcgctggtatctgtccacacgtgctgctggtcagcagctgtgggcatgtgtttctgctcctccagtgggttgtcccagtgaatgtagttacactcagccagccatctcctgtccactgtttgcctgtccactgtctgtctgtccactccaccctttgccctgccagctgacccgtgggaggcgggactggcctaacagttctctaatccaaggtcagctcgggtgcggaggccatagccccgcttggcggcaggagcagcatggagcatagacgctgttgggccaggggcccaggacccagggcccttgagccatgggggttgctcgaggggaactttgcccagagccctctcgggccttggggacaggtaggtggcttgaggtaccaggcccatgtcattgagaagggtgatgccggtctcactgcctccctccatgggatagggtccaggcgatggttccccagggttaggtggccaaagtcagcaggccctccatagtcatggcacacagcagggcaggtgtgccagcttcccctccactgcttcattgcactcctgcatgcacccgatgtcaataatctgtcttgtttgctgagctggggaaacttgggccctgccttgtagtttttaagagtttctctaaatccagattgagtggactctccctgccctggctggacctgcagaccaaactagggcacgttcagagccatgagggaggggcagctacagtgggtgagggcgagaggggagacagggcccccccaagcccaggggttgagtcagggaggacgaggcattgtgtgttgtggcacaggctgcaagggactcctccagccacccctgagcaattggatgtggcccagctgataacaaagcactggaatgcaggagcgtgggacacaaagtggagcttgaatggaacagagaaggctcactgagcaatttcttgcagttgcctgtatttgtttcctccaagaggcagctctaggcttccacttccccatgtataaacagagagagagttggccaggagactctgctgctgttttctgggcttcttaagtgtccagtccctgcgctgcacaggtgggattctcagaaacacagagagtagcctgatcttcaacccttggtcctgaccacccatatctttgggcagccccaccctcttgctggccaaaccagacgctcttatcttcccggaaagcctaagagttaggactacccttgattcctttcacccagaaaatgacaccgggataaggactctcttaggcctgtcctgggcgtcccattccctggattcaccccagccccattcttggtctcattgcagctccttggagatccagtggtgctgcattccttgagccggcttttgccgaggggaaatgtggctgcatccctgtcccagaaagcttccctggcccctacttctctccacaaggccaagagactgaagagtccccagtttctgaggatgccctgaacccttggtgcctcatgccctagattgagtgtgggtttctccctcattcttgagtgatgataggaaagctggcctggctgccccatggcccgggacctttgtcccagagaagaaaggcaggcgcagggcatcactgttgtcctgttccacttcacaggagtggagggagtgacagctttccacttggccctgaccccagtccttcctactgctccccagggccacccagtgctaaaggtaacctcagccaagtgtgaataacgtccagggacttcggtggctcctgtgggtggcagtttctgaatctagaactgccgtccagggtttgcccttagtgcaggcgcctctggcctgccctccaggtttctgccacagggttcagggagtgatctttgcctcaagacagccgccagcttcaactacaccagataacggctgtggctttgtgtgtgtgtgtgtgttttctttctctttcgtcgtccttttttttttttctctctgatgcgtgtgaaggagaggactagaaggaacggttcccacctctcggaggacaacggacccaaagcgatcgatgtgatggcaccctcctcagagtagggaaagccagtcatctccaccccatcccacctcccgcccacctgcccgcccgcccgcctgcccgcctccacgcgaatgagcagtgcccggcttaacctggtccggcctcgggcccacgtgcagtgtccgcatgcctcgtgtctgtctgtccacacgtccgtttgcgtcgtcccactaatgtgaatttcagcagcaagtgtggtgtttgttttttatttttgtctttgtctccgtgccgttgctgtcgttgtccttcaataaggttgactgcattcagccagtgccaaaagaggagcccagtcccgctaccaaattccagtccatcggggttcaggtagaggacgactggcggtaagtcggacagaggtggcggctgcttctcccctctcctctccctccctccgctctcacctctcctgctctccctaacccacttctccttgctggatttctaataaccaagctgggtttgggttgcgggtggtggcccaggcatgggaggctgggcaggggcgggcgggtggacagatgagcatttgctctgtgagaccagtcacccacgggggccatggctgggccaggacatggcgtcagctgccctgatgctggtggtcttcctggccccactgcagtaaacaggcaaccttatgaccttgtcctcgtgtgtgtgtgcgtgtgggcttgggcgggatggggcaagggctgagccaagaatgagatgggggctgtgggacccgcttcaggcgcatggtgagcagatgatgcatccgtttctctgtctcccgtgtgtccgggtcaaggcggcctctggtctctggccctcttggtgactcactccttcctgtccccaccccatccaccccctacccacagaagcagcgtcccctctcacagtatgtcctcccgacgggacacagactcggatacccaggatgccaatgactcaagctgtaagtcatctgagaggagcctcccggactgtacccctcaccccaactccatcagcatcgatgccggtccccggcaggcccccaagattgcccagatcaagcgcaacctctcctatggagacaacagcgaccctgccctagaggcgtcctcgctgcccccacccgacccctggctcgagacctcctccagctccccagcagagccggcacagccaggggcctgccgccgagacggctactggttcctaaagctactgcaggcagaaacagagcggctggaaggctggtgctgccagatggacaaggagaccaaagagaacaacctctctgaagaaggtgggtgccacatggatggtccttgggcaagggtagaaggtgttggcagctggtttcagctggtggccagcagcttccgaacttctgagtgggggtctcttaggttctcttcttgggctagtttttgagctcccttcttactttcttcgcattcttccatccatccacctatttaaccaaacctctttccagaaagggttgctggtgatagctgtttgttgtgcaggctgtgaggccacccacacctgggtttgaatcccagctcctcccttactagtgaagtaaccttggtcaggttactccgagcccccatttcctcatctgtaaaatggagctaatcctctgctcactatatgagcatgttgtaaggattgaatgtggtcgtgcatgtgaagggcctgatgacctgtcagacacagagaaaagtgggagcctaattatgccttcaacaacttttttttttttttttttgagacggagtcttgctccatcacccaggctggagtgcagtggctcgatatcagctcactgtaaacctctgcctcccaagttcaagcaattctcctgcctcagcctcctgagtagctgggactacaggcacgtgccaccacacctggctgatttttgtatttttagtagagacggggtttcaccatgttggccaggctggtctcgaactcctgacctcaggtgatccacctgcctctgcctcccagagtgctgggattacaggcgtgagccaccacac

SEQ ID NO: 9088 - DNA, 6000 bp, Homo sapiens
cttttttggctcttatgagtaatgctgctgtgaacatttgtatataactttttgtttgaacacttgtttttggttctttcaggtatatgcttaggaatagaattcctgcgtcatatggtaactcggtgtttcacttttcaagaaactaacaagttttcaaagcagctgcaccattttacatttctaccagcaatgtgtgagggttccaattttactacatcctcaccaacacttgttattatctgactttttgattttcgccatcgtagtgggtataaagtggtgtctcattatggttttgatttccatttctctgataggtaataatgttgagtatctctttatgtgcttattggtctcttgcatatcttctttagaagaatgtctattcaaatccattgtccattgaaaaaaatgtttttggtctttttttcttccttctacaatctatacacctcttatttccttttatttatctttttatattattgagttgtaagggtttctctggttagaggttccttattaaatacatgatttgcaaatattttctcacagtctgaaggttgtattttcactttcatgatgttgtcttttgaggcacaaaaaatcttaattttgatgaagtccagttttaaaatgttttgttgttgttgtttgtgctttaggtgtcatgtctaagatgccattatgtaatccaaggttaagaagatttactactatgttttcttaaaagaattttatacttttggctcctacccttaggtttctgattcattgtgagttaatttttgtgtatggtgtgatgtagggggtccagtcttcttttgcagttgtcctagacccatttgttgaaaaggctgttctttccctaacgaattgccttggcacatacatccttgtaggaatcacttgacaataaatgtaagggttgatttctggactcataattctatttcattaatctgtattgtccttatgccagtgccacgctgtcttgattactgtaacagcttggcattttgtaacatcaaatctggtgtttgtccaagtgtttctgtgattgttggaaaaattatctaagtacaaaatagcagaaatggctaatagctcttgttcatgcaatgataataagcccccattgaggccatttactctccttttcctccctagtgatggagtaagcattacaaaatcttctctcttcctccttattacattagaggtgtgtgtgtttgtgtgtgtgtgtgtgtgtgtgagtgtgagagagagagagagtcggctttgacctttgccgtatatgcaacttttctttgtaatttcagtaataatcacacttagagcctcagagcaggtcattgggtcctgtttgtcctcccaagaaatgctcgacattggtcagagtgcattaacggtggtttggtgtggaagtcctgtaatagccctcattgacattggactggctgtcaggggaagcatcggttttggacgctctcattagcattaattgcccctaatgcaccatcatttttgacagtaataagctaaacaggggtgttattactcccagcagaaagactgcatttcctggcgttaaaacattttttgagatgtatatggcatgtggtgcaggcaaagaaaggaatagcatgatccagtgtaaagcaggcttagctgcatttaaagtggagaaataagtccctttcctattataaaaacgaatcctgcattgttagttggaaggaagaagcagctaatcaacagggatcctacactgaactctttaaaagagggctttggaaaaagttacgatttttatttctaaatttgctttaaaagagtagcataaaaatgctttgcttttgagtgtttccagagacccatttatagtgagattttaggagcagaaggatttgttttaaactgttccctatttaggaacagccctacgggtgtttatgtgcaacaatgaaagctgtaacttaggaaaccttttaaaattggggctgagagcaaaccaagaatgatgcaagttcactgcagtttgccctttgctcactccatgtatctgcattgtctggggatgctcaggatgtctttagaacacacacgaagctggatcctgattagctggccttggtggccagttagtgctgagagtttacagccaggattctaagtgaaaacctaaaagctgatagcttccttatcactatcattaggagacactgaagactttacacaattcttttttttttttttttttgaggcggagccttgccctattgcccaggctggagtgcagtggcatgatcttggctcactgcaacctctgcctcctgggttcaagccattttcctgtctcagcctcctgagtagctgggactacaggcgtgcatcaccatgtctggctaatttttttgtatttttagtagagacagggttttgccatgttggtcatgctggtctcaaactcctgacctcaaatggtcctcctgcctcggcctcccaaagtgttgggattacaggcgtgagccaccacgcccggcctagtctgttctttttaattgctccatagtaattaataatatgcatgtatctttctttatttagctagtcttctgtttatggacatttcagtaggatgatgatttcaagatcacatttacagattaaatgaatgagttcttaagagaatgagttagagaaatagggaattacctagttaatcttgatgaagattgcagagtagttaactctgaagacagattatttttatagcatggagtattattgctaatcctcctacctctcccaaaattggagggctgctaagcccatcaagcctcctcctcagtcttcttgctatggaatgtttcctactccccatttggggccacccatgggcagacttgggtcacagttccttctgtgctttcataacactttgtacatccattaaagcagcaacctggtttattataattatggtttgtgtacgggacaggaaggatttcttgccatctctgtatattccctgaatggggaaagtgctctcagcaggtgtcaaatcaaagctctgtggctacttctttgcctgagccttccattccagtttgttttccagtggaaatgatgtcagtacttgtcgggttgtgttttttgcaagaaagcttgctctggttctgagccttgcgtgagttgtaacgctgttaactcagcagagagcccaaagagccaaagtgaggctcctagctcccttcttgggggtgtctattcaacctgatgggccatcgtccctcctcctccactgccataatttcacccagttgcctagactcaatgacaggcaatgatcctaaatatagttctgctatgaattcataggtggctgtgaattcaaaagtagatggtaatatccttacagcttctggtaataaacctttacagtttttttttttaaagcaaaacaacacccctattcaacatgataattgaggctgttgtcataaaatagttattacagaggcaggaaagaaggccgttagaaggaattacttgataggtatctttatttttaatttttcttctttgcccttgatttgaggttgtcacacctcgatatggtatttcagaaaactgccagagctatccttcaattatttgcccagcccgttatctctattccttgatcctgacttagactataaaccagtggatttggcaaggatttccttaagtgttacattcaaacctatcaaatatttggaaggcttacagatctgtttgcacataaaagcgccttgggtttgcataatttgcacattcaaacttgggttttaattcagaaatttaacatgttttctgtctcttttggatatttacattgattttaatctaattttaaaatttctcatttattggcattagcccctctttgtgaagatgtttaagggacatacagaattcaaacactttaagagtcaacatggattggtttgtgcttataacaaactcccaatctcagtggcttaaaacaatgagggtttattttttccccacgctagattctttaggtggtcaactggaggctctgcttcatgatatctttgctccaggaccctggctgaaggagcaagcatctggacattgtgtccatgtcagaggaaaagagagaatcacacattgattcttaaagctttcacttctgcccacatttcattggccagagcaaatcatgtggccacacttgactccatgggggcagggaagtagaattctaccacatgctcagaaggagaatgagaagtacttgggcaacagtacagataactaccatgactgtctaacaaggagctgaagtgcatggattctgagtcagagtgcctgagcttgacactggcctgatcacttcctcacagtctgattttgagcaaagcagcttcatctctctcatcttttatttccttatctgaaaagcagtaccttacagaattgtgaggattaaatgagatagtctttacaaagccagtgcctttcacatggtaagcactcaataaatcctagctatcattagaacccaattcttgctgatttgaatgaaaggtactgcttaaggatttttccccttatttattttaaaggacacatgaaaagatttactttttttcttttcctttttcttcttctttttttttttttgatgtttaccatccatccaaagccagaaaaagacattttaggcctcggaatgggagaggttggaaatattactgggctgggtcagtgttattatcatccttgaagactcttgttctaggattttttcatgcctttactcaccttaaagaatagaaaactttatatctgcatgtgaattcctgaacacccaccaattgacctggcaactgtcttctctattttcctctagctcagagtcaagatctccactgaagttggcatcacaaatgttgatctttccaccgtggataaggatcagagcattgcacccaaaactacccggtaggtgagatgccacctgatcactcagggagctgaggctcaagagctgagaggagtatgcctaggcactgagccctgcaggcatcagttctgtgtcagcagccatccagcttacatcctaaattaaagagtctgtagttccactggtcctgcaccggggattctgcgaattatctaagtggatttggagattgtatataccagtgtttagtccatgcacaaactatttattaaccagtcctcaacgaggtaaagcgcttacctcaggatgttagtctgagtcagtcagctatgtcactaagcatattatttagttcagatgataatttttaaaataataagaccttctcaatgaaggaagcaaggtattaatttacattctggtgcgatctccttatcatcacagtcctgaatttgcttttagtgacctaatggcaagtctctctggcctatgatgggtctgaaattagttggaagcctcacacgtgcttaaaattgagatggcagatacccagcactagggctgccatttccccctcccaagtccatggaggcagtactaagaagtcatagaacatttgctcccactgaactcagacacagcctcagaatctttttttgaaacataatcttctaagtagacactaacaattgaacagagttgggccagaatgctgtaagaagcctgctcatcagccctcccccagatccttattggctcagcggggatctagatttctggggtatagtccagaccccaactttactcaactagggtagctatagaggccagaagacagtagggtgaaccatcaaggctctttgaagatgggatgttagccagaggctggaagccaagcagctactccttttaaatcacatagagttggcctttgtgtctctgggttggctatttttgtagtgatattggagataagagcactgtttaagaatccactgaagaaatgtctgtgcgag

SEQ ID NO: 9089 - DNA, 6000 bp, Homo sapiens; identical to SEQ ID NO: 3352

SEQ ID NO: 9090 - DNA, 6000 bp, Homo sapiens
ttgtgatggcactcccagcctccatgtatgaatcagttttttgctacataaactgattaattttgtttctcgtgctgaaggacttttgggagacagcagctgagttcgctgcgtttggtgagatggcagtgggatgggcacaggccaggctcctgtccccctgcacagcctgtgccaaaggccctgcagtgtgggtttcatctgatctgagagaggtgggcacagcccgtggcacttctgcttggggagactgtcccttaaatgagttgttcctaaggtgggcttccagccaactaagaccagaaggcagtagaagaccatgggcaaaggctgagatcaggggtccaggatcattgacaagagatgcctggaggcagctgcctctccaatacccatgatccctgtttatggatacattctgtgctgagcttgggatgacagactaggatgttatgtgggtcctgccttggcggtggctgctgtgggccactgtaaagtgctgccatggacatactggcagatttccctgccttcaaggaagggtgatacttattcttaggctcaaaggttttgttgagattttcccctttaaacaacccatctccaaaaaaaataaaaaacctcaatcaagagattgctggggaaaccaaggcagaaggaatcacacacacaaatagatggaaggcactggatttaagagtccataacgactactctctttctctcctaagccagagggaattgagagagggatgcaacagtcaggctgatggaaattaaagtcagctttatttctgaaatactgatgagagagcagagcttagatataaaaaaaagtcatgagcttccttgctgagccctgtgtgctcagagcttcctccctgacccatctgtcagggtgcagagtggccaggagtgtccaaccggtggatgttcatccccgcagaagcacaacaggtacatgacctgtgtgtcccccatagcaccagacacgctaaaatggagcaaagcagcatgaagtgtgggtctgtctagatgggggggtgaatgtgcagtgactggttgatgaaggcattgtgtgatacaataaagattcagccctgttttgcaaactcagatttgcattttaaagaggtttttttttgactcagatttacattttacagagtttgttttgtgtgttttgttgtttgttttgttttgttttgttttgtttttaagacagagtcttgctctgttgcccaggctagagtgcaatggcatgatctcagctcactgcagtctctgcctctcgggttcaagcaattctcctgtctcagcctcctgagtagttaagattacaggcatgcaccaccacgcccagctaatttttgtattttgagtggggacgggatttcaccatgttggctaggctggtctcgaactcctgacttcatgtgatcctctcacctcggcctcccaaagtgcttggattacaggtgtgagccaccacacctggcctagagaggtagtttttgagcagacctggggcaggaggtgatgagccagaagactaggtaaccagatgggagaccgatagaatgaaccaggaaagcaataacatggcctgagctgggccctaacagtgaaaattgagaatatgggtcacatagaaggatagggaggtcagaaggtcattaggtgattgcttgaatgaggacatggaggggttagtgcttcttagacttctggtttgggcactggatagctgagcaccttcacctcctcaagtattctttgctgttatctaggcaggtttgatctgtgggaccatgtgtgtgtgtgtgtgtgtgtgtgtgtgtgtgtgtgtgtgtgtgtgtgtgtgtatgtgtttgacgacagtttcattttcagtagagctgctaaacgaagcattcctttgttctatcttgggatgtgtgacaggcactccagaggaaagaggaatccggaaatggaagaagggtgtgggcaaagggaacaaatcactcgacggcatggagtcgtacaatttgccatttggcatgaacattataaaaaaatacagatgcttcagctacttacccatcagcccaacctttgtgggctacacatggaaaggcctcaggaagagcgacaacagccggagttcagatgaagactcccaggccacgggatagcctttgctgtgccctgtggcctggccgcagtgaggcatgtatctgtagttccttgctgagtaacaagaagtaaaatacatgtttgtatatctacatttacattctgcgccccagagctaagacagactgcgaatcacttttctgctgtgagggtgatggtgcctgatgcggtgtctcgcctatctccttatttaagcccttaactccttgccctttgagagtgtccattgctggccatggtcactaaatttgaagttccagtcctccctttggagtggacatttaaaatctgcagccattccttgcttcagttcccttccaccacccagggctggctttcctataagccacctccagggtccaggggctttctctctctctccgaagcccctggacctgtttccttgtcatttgaccctcgtctgtgcccgcggagacctcctctgaccaaggggcactagtatgccttgcgctatcatgactgactggcccagtatgattctgttgtcgctgatctcccggaggaggaggctgttgacctgaaaacagtggcgtggctcccctgtgcccagatctggccatgggtgaggcctgcacagatgttgaatgaacatctgtttggggcattggagggaaaaggaaaggaccctgaagccaatatctgattctcggctgcaccttctcttggccaccctggccctgaccgggccagcacgtgcacactggcctcttttcatttcactagtggccgagacaccctctctggcatttatcactgttggccggtgtgatgagtatagagtgccacccaaggcaccagtcacacaagctgatgggcgtcttggctctgccgtcatgtggatgttattgtcgcgcgcgtctataattacaaggttttattcctatttaatgttattgactatagcagattttggaaatcagtgttttccatgtgaccctctttccttgcatccctattccttgtcccccacccactcttccccccatcaagaaaagaaccagcatttgtaaagctgtggacaccatcagggaagcttgttgtaacggcttttgaaggccagtaaccattgttgtggttgtgttttgtattgcttgataccatgaaagtgtaaatactgtaatgcctaatctatttatcaaaactgactactggaccggagcccagaaaccatgggtcaagttacacgtgaatttgttttgtgaagaagggaagctggggcaggtaacacgcagagccgccacgtggaacggtctgtccgccggtctgtcccgcttgccgggcttctgttgcaagtcttggcttaaggagacttcctgtgggttgccatgtcgcacgtccgttagatcttgattttacaggtgagggtggttgccaaaggtgataagaaaagcagccaacaggctccctctcacttaagagagttctaattaataacactaaattcttcctgagaaatgactcctcttggtttggtttgaagtttttcagtgaaggaaaaggcctgagataggaagcagtgccctcgcttcatgaggtggcacatcttcggtggccgttggcctggtcgagctttggtcagctgcgtgggtgcctgtctcctgtctccagcggcagggcatggttcttggcagcctggtgtccacacggtgcattcctgtccccctcggccccaggctggctcagctctccagtgctgcggcgctgtctttgcagcattgccatgtcaccgtagcccccttcactcttggaagtttggggcttcaaggtttattctggcaagaacacctcggagccactgcattgttttgccaaaaacttactgcagattaagtaaagaacttagatgctaaattacatctaattttgtatgtttttttaaatgtgtctttgatgcatactttagaagcacactggctcgcggtttccatccctcttgccttgggacactcttgaggctggcagccctcctgcaatgagttgctctcagttccttctgtttggattttgctcaacatctccagtttctctgctctgaaaaatggggaaaactgctaaacatcccagagatttgcaatcttctagctctccaggtgagcagaaagaccaaatatccaaataaaagcctgaaagccattggtgatccaggggcaccttctcttcagcttgactgggcgtcttccgctgcataacactcaaggtgtctgctctagtcatccagaaacccactcccttctgaagcccctccttgggccgggttgtatcaggaggattcaaccccgctaacatgtggggtgccctctgtaggccttcacacagggaaggaagccctaccctttcaactcctgttggagtgagagtttcctgttctgattccactgtggccaacccaataattctgtccgaggaggggtaagggaataggaggtggggagcaaagagggcagcctgactagatgcccctgctgaatctggtactttctgcacagccttgagtgattggagtcccctaatgactaataaacttgaacatgtaacacacacacacacacacacacacaccattttaggaagtggttctcctactggaaaatatgctacagaatgaaagtttgtaattgaaagaaaaagaatgtattcatctgcttcttgggtttaagcacacacctgaaggggagatattgggggacacggtggccactcgcggtctgtgtcatgacacttcccattcacatcattggcctgcgttgctggggctttgaaccaccaccccgtactttgttttgcctgtagagtgttgtaaaatattttggatgtgaatgtccttgcaggccggttagtctccagtttccacagagaccacctacccaccaccttcccaggtcacctgcctggtccctgaaagaaagcatttgtgtgggcaatcccaacatgaaatgtagacagcgtgaatacggacaggaggtgatgccatattcacagtgggggatggagggcccccacccctgcttcacagaataatgggaagtgactctagtctttgtaagcaattttcattctcattaggaagttaaatgtagattcacagatacatttactttcagaatcctcaagaggatttcaaatgctaacttttagtttcttgggattgatcaaggcaagagaagtggctttaaccatgccagccagaatgaagcatcatgggtcctgatggtttcccgttttcatggtaacaaattcgcacagaggttttgctttatgctgtagaataccgactttcatgatgacaacttggtttatgcatgaatattgcagtatttccatatagcaaaataacatttctacccaggataatagtcacagttttccagggagggaatgatataattttcatgacaatgtcatgtgatgatagaatttctccattgatgaatctctagtatgtgtgtatactttatttacccatacgtatattttatgaccatgagctaagttgttatttctttcattcatatccctgctgaaatattggtactagcaacttaaagttggcaagtctcatcttcagtaatacggatgccatgggagtggccaggccagattgaaggtgaatatggagcagtagcagaagcctcattccagaacccatctggccagagaagcagcagcatcctgggggatggccgtgcatggggtgtacactcgctataggcataggcccggcatggctgtcgctggacgccagctgtgcacacccagccacacctgctgcacgccgcgttagtgtgcggctccgggcctgag

SEQ ID NO: 9091 - DNA, 6000 bp, Homo sapiens
gtggtagtgggaatggagaggaagagaagtagaggggtcaagaagtgtattgaaagtggaactgacagggcaggatttgagaaatgacagaaataagtggtcaaagatgacttcatcatagatttttggttttggcttaagtaaccaagtgtattatgctggcatttactaaatgactttgggatagattgggagcgtgagaaataattacgaaatcttcttagggcatcttaagttttagatatttggagtgcagctaccaaataggcagttagatatatgagtctgatacagaaaaggtcagggctgatgtaaagaatttagaaatcattggcaagtggattgggtaggatgagattatgtagggtaagatttaagagagaagagaagccaggttccaagctttaggcacccaatttttatagattgagttgacaagaaggtgccagcaaaaaagaccaataaggagtccagaaaagcagaagaaaaaccaggagaatgtggtatcgtggcacccaagagaaggttttttctaggaggaggaagtgatccattgtgtaaggtaagaatagagactaagccggcccggcacggtggctcacgcctgtaatcccagaactttgggaggccaaggcgggcagatcacctgaggccgggagttcgagaccagcctgaccaacatggagaaaccctgtctccactaaaaatacaaaattagccgggcatggtggcacatgcctgtattcccagctcctcgggagcctgaggcgggagaatcacttgaacccgtgaggcggagtttgcggtgagccgagatcacgccattgcactccagccttgaaactccatctcaaaacaacaacaacaacaaaaagaatagagactaagccttcgaaggggcagcagggaggagggtgtggtgactcattggagcagtggagatgggctgaagtgagagcagggggtgaaggagttggactggcagtgcggggtcctctggggaagtttcactgttaaggggaccaggaggggagtaagcctctaccatgagccagcatttaatgctgtacctgatgccactttacagttggagaaactgagtccagaggtcaagtaacttagggtcacacagtagtgagtagggacaccaggatttgattctcagtgtctaactccaaagcccacactcttaagcactaaaccatgctgcccaagttacagttaggaagatggagggaagcaggtgtgccagtgatgcaccagccagccttaccttgatgtgactgctgcccccagctaagctgctctctgtggaaagtggggcagaatatggactttccttcctgagcaaatgagatttcaaaaagagttgtttactcctttaaatcttgtttcccttataaaataagggtggggaccttttcagtttcacgtctgtgtctccagtggtgggcctacaggagtgcttgataaatgctcattaagtgcctagatgatctccagggacccttctagctgagatttggctttgtgtttgggcataggtgaccttctgaatcccaataagaaaataagttaaatttgagacagtgcttcttgtaggcggggtagccatagggacttattggaggcaggggaactgggccaggtctgtgaaggaaggtcagcatttgaacagtggagggagggtgttgcggtgttgcagtgctgcagcaggaaatgcagcaaaagcaggagctgcaagaagttggttaacagaagagtgaacagacttccctggcttggaagccacaggaggagccatgagggaagagtgctcagaagaaagctctgttagtgccagcatgtcctgtgagtgcctgtcacaggacagggtcagcagtggttctcaacagggagcaggtttgatcctcaggtgacatatggcagtgtctagagacatttcttgggtatcacaacttgggatggggggaaggatgtgacaggtgtctggtgggtatgggccagggatgttgctaaacatcctgccatgtagaggatgggtcttctcacaaagaattatctgtccccaaacagcagtaacgcccaggttgagaaaccctggcgtagaggaaacagtgtgggttttgagatctgtagacgtatgtttgaggcccatgcgccctctttgttggaggagcctgatggtggtggttgcaggagaagtagagagaaccgtgtaggagactcctgcagtcatttggggagaggatggtggctgagatggtagtggtggagttcaggacatgtgctcatatttgggatatttctgaagatagagctgacggtatttattgattgaatgtgggctaaggggaagagaggaatcagatgagcctaaggcttttggcctgagcaactaggagagtagtggagccatttgctgggatgggaagtaggaagaggagcaggcttggatgaaatgggggtgtggaaaacacgagtcagtttcagacactctagatgtgagtgagatgcctgatattagatatctaagggaagaagaggttaggtaggcattggatattcttctggagttcacatgaatcagagccggggcatatattgggaagacatcagcttacagaaggcatttgaaggaatgagaatgcattaggtcaggtaggagtctcaactcattggatctgacacctcttttttattacaaatattttgtaacagtcccttttattaccctaaaatgaaacatatgattaataaaaactgcctacacataattttttaaaaatcaacaaatgcagccgggcgcggtggctcacgcctgtaatcccagcactttgggaggcaaggcgggcggatcacctgaggttgggagttcaagaccagcctgaccaacatggagaaaccccatctctactaaaaatataaaaaattagccgggtgtggtggtgcatgcctgtaatcagtcccagctactagggagcctgaggcaggagaatcgcttgaacctgggaggcggagcttgtggtgagccgagattataccattgcactccagcctgggcaacaggagcgaaacttcgtctcaaaaaaaaaataaaataaaatataaataaccatgccctataacataaaaggaaagtaattgatagtaaaacaaaatatgtttcaatatgtaagtttctgggcacaatagtgctggaagttgcagtgaagctgtcccttctgtgtggaccctctaggagtgtgatggccacagacacagactgacacagccgtgttgtgtcgcacctcgaaaaccactagtgccattgctgtagatgatgtggtttttccagaatggacacttttggtgccattttgagaccaattttgaccattttcagtctcccttcattgtacataggcgtcttattcttggaagtgttagttcacagcagaaccatggaaacactgcactgtgtttacatgtaaacagagttacattctaggttcagataattataagctaatctttcacctatatggatgtcaaagtcgtgcgggatgcagagcagtaattggctatgtggactgccccttctttatccctgcttactgaacgccaggagcatatccccaaaataccgccacaggtttccaaagctcctctgaagacaactgtagccccagagattcatttggacacagccagctccctgtttgccccggggaggggaaatagtaacaagagttccagagtgcagaatggaatgtaactgctcccttcagaaatgttggggtgggagatggagaatgtgtctgatcgtgaagcctaggaaggcttcgagaagaaggtggcgtttcaataggatgggaatgtctcaaaggaggatctgtggttgaggggggcacccagatgaagcagcaggtatcatcacataacactggacctgaggctcctccaggcacagacaggtctacccggcatgctccgggcactcatcagggttggctggattgacagggaggctgggagtggtttcatttggcaataccgtaaggcaggctctgcttccagggagtagtggttacagcctggtcttacagtgttccagccgttagagtgttggtttccttctccatttttaacccctaaagaccagaccagtcccctgaaaatcgcatgcctgctctctgtcagtcatcaaaccagacggagaacttaaagtacaccagctgtgcgtaaggccagtgtggtcttactggtccctatctttgtgccgctcgtagcctctcaggggacagacattactcaaatcacaccctgcacaagtgctatgaaagagaagtaggagagccgtgaaagcaacatgtatctcaggggactgattcaggggatggggtggggttccctgaagaagtgacctctgagctgaagataggtaggattgatgaaggactgaagggtgggtgcagtgttcgttcatttccttcagacaacgggaagaaagctggtgtgtttggggagctgaaaggcgcccagtggggccaggtcctggagagcctgtggctgagactgggaagaccagcagggccagatgaggccatgggagccgaaagaagggtgctggtctttatcagaaaagcactggaagctgctgaagggttttaagcagtggcctgacatgatcagtttgtgttttaaaaggtcactttggtggcagttcatggagaatagcttgaggtgacaagacagcagacacgacgtgggtctctgggactgcctgtgccgttgtgggcagcccctccagagccctgagtcacgcagccttcagaggcacccatggctacgagaagcacagtctctgcctgaggctccagagcggccctttttccccagcagcagaccttgggacctgtgagcgctgcatccaattaaccatgggaagggtcagcaccagccaccagccccttaggtgaggactctgcctggggctctgctgatggttccgaatcatggagctgcagagagctcctccagcctggagacgttcttggtgaaagctgtggtctaactccaccggctcttcctgcacattgtattcaagaggggtgcctgcccccgctgactcaggagctccggtgctgcagccgccacgaatggggaggtgggccctcgatgtggcctttttgtggaaggcggtgttgaccctggggctggtgcttctctactactgcttctccatcggcatcaccttctacaacaagtggctgacaaaggtaccaggaggccttgctggggcggggtgctgggatgaaggtggccagagccatggctacggtgcccttcatgtttaacaggaaggcacaagcttcaaccagtctaactggaagccagtcacggctgggctggaacagggccctccaagcctgccgtgccagggttccccttcagtgtttggatccagggaaaccaaggagagcggggggtgtgaagggatgagctggggaaactggggctcaagcagcagctatttaccccactagagaagtatttcaatattttaataagtgatacaacgtagtgggccgcagtggctctcacttgggcataggccgtgaggaaggctgggcaggtagctcacaggtgtgttgaaatggtggagacagcaccaggctaggattgagtctcttggctgccacctgtcttcgtgacctaagagtctgtcattccaagcgatgataccgtaactaagggccctacacacatagcaaggtcctcatgaaccaccgaatgagccccactccagcagaggggcgaagaggaagagggagccggtggggggcaggctgtctaaaccaagccggggtgtctgctttgggctccatacagagcttccatttccccctcttcatgacgatgctgcacctggccgtgatcttcctcttctccgccctgtccagggcgctggttcagtgctccagccacagggcccgtgtggtgctgagctgggccgac

SEQ ID NO: 9092 - DNA, 6000 bp, Homo sapiens
cctaggtcacccagcaaggcaggtcatgaacaagagttgggtctgcgtctggcagacctaccacaggtgcggcctggagagatgaggcccacaaggcagcgacaggacctggattcagtgaggagaggggactcgcggggtagaagccaggaactgggaaggcgaggaggcgtgaaggcaccacctactgccaacccggctcgagctggtcactttgccctccatgagatcgtaggtgtgcttgttgttttattttacgggggaggaatggaaggctcagggaagttgaatgcggatgttgttcaagatcacacaggcctccagaggcggagccgggattggaacccaatctctaggactctgggttagcaaagcaaagggaggatgcagtggcgaggacagctagatacacctagggcgcagagcagccaggaccagagggccaatctgactatgcaggggtgagagggccacctcgggcagcttcctcggagcctcggttccccccttacagcgaggtgtcgctggggtgaactggtgggaactcccgcctcggtccacctcccgcacagagcatgcgtcgcgttccagctggaaccggtttggcgaggcggttcgaggggcggcgaccccacccccacccccccatgctcgggcatgcgcgtgccgacgtgggcgcgcgctcctttcctgggccggccggctgggcgtgggccggacgcggcggcccgcgcgcctgccgaccagcccggctgcgcgcgccgggccacatgccaagcgggctgcgcgcgcccctgcccggcccgggagtccctgacgacgcgcgcgcggctgacgcggggggcggggaggggcggggcaggtgcgggactttaacccggagccccgcccctcgggcgtacaaaaccggagcctcgggccgggctgcgtgagggaggagggtgagtgcccgccgctggccgccgccgccgccgccagtccgtccgtctgtccggtccacgtcgtcgctgccgcctcctcagcccggacgcccggggcccgcccagcgccgcccggagcagccgcggccccgcgaggagacgggggccgccccgcccggcccggcccggccctgccccgcccccgccctcgccctcctcctcctcctcctcctccccgtctgtccgtccgtccgtccgtccgcccgcccgcccgcccgcccgcgcttccgtcctgtccagccgccagtcctccagcccgtgtccccgctccgcccgctttgtctctccccggctcgctgtctctttgtctctgccctcgcgctcctccgcagcccctccctcgctccccatctcgggtccccttctcagagcgctcttcagccctcagagccgccctttctgggcgaccccactcttcgggactccccctcagagcgcccccagatcttttggggttccccttgagaacaccttccactctccccaagggctccccgtgagtttcttgcacatcctttgggggttctgcaccccaagtcgctggggtctcgcctcctctgaacccccattgcccctgggctttccctcttctgggtgttccccatatccactgggagctcctaggtcccaagttggggtctttctccttgggaccccccaatatgtcctcagctccctgacttcaggagctcctctctgctttcccctggtttgtcccctgtcgctgtctctccttgttctctctcaggtctccgagcacccccacttctcgggatcggggtcccctgctttgctctccctgcccctctgtgcccccacatctgtctcggtggtctcgccactctgtgcctcttgcgctgaaggcccccctttgagcctgcttctttgcctggggcccttggcccccccttgctttttcagccctagccccctgtctccccttctctctgctccttgtctccctctccctttttctgtctttgccgggtctctgggtctctgacccccatccggccctcatggctttgtgtctggagctcttgaagcaatgtgagtggtggggtgtccgggtcgggccggagttggcccgcaggctggccgcggccgaggctccatggggttggcgctggggcaagggctggcgctagggcaagggggctctgaggcctcccacaaagggggaaaggagggaggggccaggctgtctggcggaggagggagtggggggccttcctgctctgaggcttctgctttagttgcttgagtgtgtggagggcaccacgggctgggcatccctgcccacttggccccgcatggcctggcactttgtgatcgcttgtgggcaggccgggctattttggagccggcaggatgtgatatcatttggacgtttatttagccccggctgggtgtgggggctgcgttcttgccagcttgagtaatgaaattttgcaggggggtgggggtggggtcagcctcctaggcagctaggctgtggggttcatggccagaactttgcagaacaccagagtgggcaagtgaacaaaggtctgtgctgcctggatcttgctgagattcgattcaggatgagcagggagaggacttcttaatctgaccaccctgaggattgactttggtagtctaacctctggggccttggttctgccagcttcaaggtgttgtaaccttgagcgagacccttgtcctctctgtcagtttccctatctgtaaaaagtggataattgtgctggcctcacactgttgtcatgatgatcaaatgaaacatctgtagacacgctttgtgaactgtcagcctgtctttaaacagccccatcgagggagaggagcttgcccaagggtaaacagctggctggctcctgccagagctgggacagggatccaggactaggacattacagtccagggctctttaacctcctccccactacctggttattcgagaatgcacctgcccttccaatagagcagggagacggctgtttcttaattcaggccccaatcctgcttgttctttgttagtccgtttgtaaagatagatgggcgtgcccatcgggatgtctgtgcagggggacagttggattttccatgttccatcccattgttgtttaagggtgggccctgcttggacagtggcacttggaataaagtcactttgtagttgtgagccttggctgcttttcctgcttcccctgtagagtaggggaacaaagacctcagccgagagaggttctgcagagagctggggtttgctgtcaaggagcttaggatgtcctagaactttggtgcagggaatgagatcagctgttcaagcgccttgtcttacagatgaagagatgaggcccagaagggccagggacccacagaggtttgagccaggacttctgggtcctgttccatggcactgcctttgaagaagtcactgtcatgctgttatcacctgcccctggtgtataatgacaatctctaacatcctttgacctttttactgtgtacgctgtgcttggtgctttacttcagctacttgcagtggaaaagaagaagggcttggtgcctggcctggaagtgaggggtgcaggatcccagttcccacatctcacccacttttagggatgtcactttcctttgggcttcagcttcctaatccataaaatgggaataacattccttatcctaagactgattctgaaatcatggaatccctcaagaattgtgtgagcagcggctcactcctgtaatcctagcactttgggaggccaaggcaggcaggtcgcttgagctcaggagttcaagaccagcttgggcaacaagacaaaaccctgttgctccaaaaaatacaaaaattagctgggtgtggtggcatgcgcttgtattcccagctacttggaggaggctgaggcaggaggacagcttgaatccagaaggtcaggaggtcgagactgcagtgagctgagatcatgccactgcactccagcctgggtaacaaaatgagaccctgtcgaccgggcgcgctggctcacgcctgtaatcccaacactttgggaggccgaggcgggcagatcactggaggtcaggggttcgacatcagcctggccaacatggtgaaaccccgtctctactgaaaatacaaaaattagctgggtgtggtggcacacgcctgtaatcccagctacttgggaggctgacgcaggagaatcatttgaacctgggaagcggaggttgcagtgagctgagattgcaccattgcactccagcatgggtgacaaaagcaaaactctgtctcaaaaaaaaaaaaagaagaaactgttccagagagtagaaactctgggtttcagaaccacaaacgcctggttttaatcagtctccatcattcactgcgtttgtaatcttgggcaaattatttctttgagcttcagttttcttatctggactcaagatctgtactacaggattatgatgaggattaaatgagattatgtatttttttttaaatctggtgcacagtaggcacttaataaatgtgaactttcccttcccaaaaacatctgggtgacttttctctttgtaggaactagacagcccagttccccccccatcccccccacccccgcatgccctgtggttggggtttagataactaggaaagcacctgtggctattctaatagtaataggagtgatcttctcatctctcccaggctgtgtgaggcattgtgtaatcagccaggctctttcccgaccattgttctccaccaacaggcctggaagtcggaagccagtggagttctccctgtttcacaggtgaatgaaaaatagggggcccagagagagacaaggacctgctcaggggcccacagccacagcagtgacaggcaaacttgtagcccaggcctcttctccacagcccgcagcgtttctccaggtttatggcttctgcctgatagcctacccctcaggccgccttccctgggtctgttcccatctgttctgggaggagggttttcttgacatttccccagtctctgagctcatcttgaatttaaaaggaggctatctggaggctgggtggggactgagtcaccacctcccgtggctttctcatcctgagcagcaaccagacacacccagagggccactgctggagacctgcagattgtaaatgccacacaggctttcttcccagaagctcagatgggctcttgcgggaaggctgtcatcgtggttctgtatgtatttcttccttcccctagccactttgagaagttgttgcctgtcctttcccgcttcagcctttattaatgctgtcctcttcccctatagtgccctctcttcccctagaggcccacactgtcaaatgccacctcccccaggaagtttgtccttgctggctctggagtcccagcaggactcctgaggatgcttacggcatgaccttggcaggtcacgccacctttctgtgcctcagttttctcatatataaaatttgggtttcttgtctttataaagctccatccctagacactctcatttggcaggtcttggggcaggaatcacatgcccctaggtttttaaaccagctctctagaggatgctggtgctgagagcctgtcggctgcaacctgggaaaagctgaactgagaggaccctggtttgcatgacagcctagcttgttgctgtgtgaccttggattagtcagctttctgtacctccgttttcctccctatcagattgggatggaaatgagaactcgtgtagtaacagcccctcaataaatggcagtcatcaccatcatcagctttgttttgtgtggggattggtggttttcagaagcaagtcacctttcccctacttggtcctggcagcaggcactgtcaagtcagactgggccagggtgcaggctgtggaattgaacacctgagcaggaatgaagtctagtccttacaggaatgtaatgaggttgatgaggtgtgtggtgtaaatctctctcgggttcccagatttcc

SEQ ID NO: 9093 - DNA, 6000 bp, Homo sapiens
tggctaatttttgtgttttttggtagtgacaggattttgccatgttggccaggctggtcctgaactcttgacctcaggtgatccacccgccttggcctcccaaagtgctgggattataggtgtgagccacccctctcagcaattgatatctttcaatccatttcaattgttatcctttttggtgctcaaaatgttccatttttgccaatgggccaaactgtgtgtgtgtatgtgtgtgtgtgtgtgtgtgtgtgtgtgtgtgtgtgtgaacatccattcatttacacattgggtacaactggttttcagtttaactgtagagttaaatagttactagactggccagaaagcctaaagtatttaccaactggtcctttacagaaaaagtttgctaatcgcagctatatgagatccagcttactcaaattttttcctgacaaccagctctccgtttctgcccaatgttttcttcctgtgtgtgactctattaaagatacagacgtttcctcatgattacactcttataaaccctaaaggtgaatgtacctcctgataaaattagttctgctcaaaagtaagagtatacccatcagagtcagttaactcaagcttttaattctggctccacctctctgcaaagggagttatgaagcctacctcactgaatcattgtaagaagaaagtgaaattacagtatgcccctcaaaggaaatggtagctattatcgttcttacattgaaaaggtttgcttctatttatactttgtttaggtgagttcagacaatgcctggcacagacactgtattcgcagtgccttttgtagtgatgcttcgtacttctgctctggtttttggtgatgtctttagaggccctggggagagagaaagagcaaattgactagaggttttgtattgtgaggtataggagataacattgaaatagtaatgttaacctctggcaggatttgaatgcaggatgaaaagtttctcctgaaggttttcaaacttttgtggaaccacaggattcggtgtagggggtcacggaggaatgaggtgctcccacttcatccagagcatgtcttttgatctgtgtcgtgatttggagttctataggagatttaggttgaacacatacccccaaagctattctctgccatcatcacaagtttgcgggatgttggttagggctgaagatgtagattgagaggcatccggccagctgccatgcagtgtgacttgggataattacatgattgggctggctgtggctttatgtttacaatacagacgctgaagtcagagtggttgccttcaaggtgttaacttcaaaacttcacacctgagtcacctgtgcagcttatttaacctttcaaaattgttgttctgtcatcggtaagatggagataataatactcagctcacagataatgtgtgcagggtagttagcacgttgatggcatgtggtaatacgtagtattacccttatgagtagtatgactatatataaatagtagtagcagttggtacacattgattgacatttttttttcagactgtcatcctcactgcttagcatacatctgacacacgggtgtctaacaaatatttgaactgtagactttagctcaatcaaaatgggagctctctaaatgtgcctgctaatcagaaaataaataggttaatcacatactccattctaattgcttatgaaatgtgctgtgttgattaggtggtgtgtgcattataagtaatggaagaaagggagttgtatgcatgtttcagagctgttgaatttcctcattagatgtgcaaactacataaatccattgagagatttatgtcattactgtcacttccgtgtagcggtgcatgtcctgctcagctgttgctgccttcagctcagtagagagaactccctgggctcccctagatacactgttgcctattctcacagatcgatatatttggagagattttggttattatctcgtaagaggttttagcagcaaaactgggagaaatggggtttaatgagaatagaaactatggagacagcagtgtggaatgagagttgattttaggtgttataaagtgtgagcatcggctgggtgcggtgtctcaggcctgtaatctcagcactttgggaggctgaggttggtggatcccttgaggtcaggagttcgagaccagcctggccaacacggcaaaaccctgtctttactaaaaatacagaagttagctgggcgtggtgggcatgcctgtaatcccagctactcgggaggccgaggcaggagaattgcttgaacccagaggcagaggttttgcagtgagctgagactgtgctgctacactctagcctgggtgacagagcgagaccctgtctcaaaaaaaaggccaggcgcggtggctcacacgtgtaatcccagtactttggggatgccgaggcaggcggatcacgaggtcaggcaatcaagaccatcctggctaatacagtgaaaccccgtctctactaaaaatacaaaaaaattagctgggcgtggtggcgggtgcctgtagtcccagctactttttttttttttgagactctgtctcaaaagaaagaaagagtgagcatttttcatttgagttatatttatataaaacataagcatgtcagaaaggtgattttacagatatcattatttagctttttacaagattaagaacatgctgggcacagtggcttatgcctgtaattccagcactttgggaggctggggtgggaggatcacttgaggtcaggagttggagactagcctgggcaacatagtgagacacccgccccccacccccgatttctgcaaaaagtaaaattagatgggcatggtggcatgcacctctagtcctagctatttaggtggctgaggcagaaaggcagggatattgcttgagcccaggagtttaaggctgcagttagctgtgatggcaccactgcagtccagcctgggcaacaaagcaagaccctgtctcaaagaaaccaaattactttaaaaaaatgcctcccttataaagcgttgtgagcattaaatgagataataagtgtaaagtgcttagtgtagtgcctggcacatgatgagtgcatatagtagtaagtatatttgtttgtgggtcaggcactagttcattcctggggatagcagagaatgaggcaatccttcacgcagtaatcatttatggagcatctgctgtgtgccagacattgtgctaagtgcagagaagacaagagagctcattatccattgagagtaccataatacagtgctaagtgccaagaggcagacaggctgtttgtggaaagtaccatgggagtccagcagagggagccggcactcaccctgtctgccaagaaagccacaatcttgcactggagtgctgccatctgtgctggctgctgcaggcttcatttggtcactcagcaaatatatagtgagtttctgctgtgcactaggtatagtgctaggcactggggatttactcttgagccataaagagggagagggcccctgcactcttaagaatatgttgtctaatagctgagacaggcattaatcatgtaatcaaatacatgcacgaatatttgcaacaatggtaagttttatgaaggggagatatgtgctgttataaataggggattttataggggtagaataggggactttgatttgccaggaaaggctttcctgaggaaatctccgaatttaaatctcattgtgggctgagtgtgttggctcacacctataatcctagcactttggaaggctgaggcaggaggattgcctgaagccaggagtctgaaaccagcctgggcaacaaaatgagaccctgtctctacaaaaagtaaaaaaaaattatctggtgtagtggtgtgtgcctgtagtcccaactactcaggaggctgaggatggaggatcgctggagcccaggagttggaggctgcagtgagctacgatcatgccactgcactccagcctgtgtgagagggcaagaccctgtctcaaaacaaaaacaaaacaaaccccaaacccaaaactcaaacctctctgcatcaccctaatctcactctactccttaagggcagggactttgtctattttatttgttgtgtatccccagttcctagaacagcacctggcatgtggtaggcactgaagtgaaggaagatgtgattgatctgaattctaaagggagaggaggagttaactgtgagacgaaggagagaagggacttcaggcagaggaaacagcctgtgcggaggatagagagcaggttacatttgagattgaaaggaggaggtgtgtggaacagagtgggagggagggagaggagtgaggcaggctggggccaagccatagtgccttggcccacataggaagagttctgatctgtttccaatgagcaatatattttaaatagctagtatcgtgattcaccttgcattttggaaagacttctctcttgctttttggaagacagactatagcagggggctacagggcaagattgaatgcaggaggggtacaaaagataatgcctggactttctgcttctgctgcatggatgggtagttgggccattccatgagatagcaacacaggaagacaatgaggtttgtctgggaaagatcacgaatttggtctttaccatggtgagcttgaaatacctttgagtcatgtaagtggctgttgagagaagtctgggctggaggtacgggtctgagaattatctgcatagaattttgggatgaagccatgggcatggatgggatggcctagggaggcagggggtggtgggatgagagccaggcctaggagctgagaaacagcaggagagctcaaaactgagggaggagctgccagagaagtaggagacccagcagggtgcggtggcatcccagaaggctacgggcgcgcatgtttcccagtgaggacgtgatcggtctgtccattgttgaggagtgagcactggaaaatgtcctctgcttcgacaatttggaggttgccactggcctgctgggggcagaagccaaattggaatgagtggaggtgaggacatgaagactggagcagtgtggctgtgtgggaagagagaaggtggcactggaggggagagaagggttgagggaaattgttgttgttgttgttgttgttgtttgaaagtttcgctcttgtcacccaggctggagtgctgtggctcgatctcggctcactgcaacctccgcctcccaggttcaagcgattcttctacctcagcctcccaagtagctgggactacaggtgcacacccccacgcctggctaatttttgtatttttagtagagatggagtttcaccatgttggtcaggctggtctcgaactcctgacctcaggtgatccacccgcctcagcctcccaaagtgctgggatcacaggcgtgagccatcacgcccagccaggaagttgtattttaaaataagtcttgagttttgttaatacattataggagaagttgaattgacgaggtaatgggcttccagatggagagacagggtgtacaaagcctggaggcttccaagtgcttgttgtgctttggggcagtgaggtgcttgtgcaactggagcagagatgggtggggaagtgcagtaggaagcacctggggaaaagcgggcctggttagaaagggtctggcgtggggccccagccagtgtgtgcctgggcagcacatcacagtaacaaagtctgaagagatgacaaagcacagtctgagaggcagccagagtagcggggagctgtttatggaggaaataggggaggggagggcagatgagagagatttgcggtcttttctataggcctccgtatttgattaggttcagggagttgtaggggaaaacctatgatggaagaaagcactggtgttctttgctcaagagggtgtttgattaattggggtattagcacagaaagttggaagcaagcagatcgg

SEQ ID NO: 9094 - DNA, 6000 bp, Homo sapiens; identical to SEQ ID NO: 3353

SEQ ID NO: 9095 - DNA, 6000 bp, Homo sapiens
gttttttacatttaatatgtcatattcatgggaggacatctttataaatccagttgcccctgattaaaagcagctaagcactaattgataacccaggatactgaaaagtcttctatgactgcaggtgccagaaatatttttgtcatcttattattcactttgtaattttttctcagccttatgactaccatttttttttatttagaattttttttatccaccgactacacccctgtggcttcacagttcgttgtagggtgaacaccactcttagattcatcttctatgcaccactgttgggaattctccttatggagatacctttggattattgttgaaagtattcatcgtagtttaaaacattactggcaaaaattcatctacatgtgcacaactaagaaatgtacactttcctttcctgctttgattggcggagttctgcccacaccattgccccttcccaagtcaagggcaggctcaccgctgctgtggcactgatcgtttatggctgtgttctctttctagggataacaggaatcgatcaagtgttgaacgtccttctcacaactgctatgtttgtagggggctgtgtggcttttatcctggataacaccatcccaggtacgtggtatatatcaaacacactttttttttttttattttttaacatatgtgttactttttttgccaaatagaaatggaaaacgggaagagtaaatgagttcaaagccatcactggttataactgttttctaaaacagttgtgatggcactcccagcctccatgtatgaatcagttttttgctacataaactgattaattttgtttctcgtgctgaaggacttttgggagacagcagctgagttcgctgcgtttggtgagatggcagtgggatgggcacaggccaggctcctgtccccctgcacagcctgtgccaaaggccctgcagtgtgggtttcatctgatctgagagaggtgggcacagcccgtggcacttctgcttggggagactgtcccttaaatgagttgttcctaaggtgggcttccagccaactaagaccagaaggcagtagaagaccatgggcaaaggctgagatcaggggtccaggatcattgacaagagatgcctggaggcagctgcctctccaatacccatgatccctgtttatggatacattctgtgctgagcttgggatgacagactaggatgttatgtgggtcctgccttggcggtggctgctgtgggccactgtaaagtgctgccatggacatactggcagatttccctgccttcaaggaagggtgatacttattcttaggctcaaaggttttgttgagattttcccctttaaacaacccatctccaaaaaaaataaaaaacctcaatcaagagattgctggggaaaccaaggcagaaggaatcacacacacaaatagatggaaggcactggatttaagagtccataacgactactctctttctctcctaagccagagggaattgagagagggatgcaacagtcaggctgatggaaattaaagtcagctttatttctgaaatactgatgagagagcagagcttagatataaaaaaaagtcatgagcttccttgctgagccctgtgtgctcagagcttcctccctgacccatctgtcagggtgcagagtggccaggagtgtccaaccggtggatgttcatccccgcagaagcacaacaggtacatgacctgtgtgtcccccatagcaccagacacgctaaaatggagcaaagcagcatgaagtgtgggtctgtctagatgggggggtgaatgtgcagtgactggttgatgaaggcattgtgtgatacaataaagattcagccctgttttgcaaactcagatttgcattttaaagaggtttttttttgactcagatttacattttacagagtttgttttgtgtgttttgttgtttgttttgttttgttttgttttgtttttaagacagagtcttgctctgttgcccaggctagagtgcaatggcatgatctcagctcactgcagtctctgcctctcgggttcaagcaattctcctgtctcagcctcctgagtagttaagattacaggcatgcaccaccacgcccagctaatttttgtattttgagtggggacgggatttcaccatgttggctaggctggtctcgaactcctgacttcatgtgatcctctcacctcggcctcccaaagtgcttggattacaggtgtgagccaccacacctggcctagagaggtagtttttgagcagacctggggcaggaggtgatgagccagaagactaggtaaccagatgggagaccgatagaatgaaccaggaaagcaataacatggcctgagctgggccctaacagtgaaaattgagaatatgggtcacatagaaggatagggaggtcagaaggtcattaggtgattgcttgaatgaggacatggaggggttagtgcttcttagacttctggtttgggcactggatagctgagcaccttcacctcctcaagtattctttgctgttatctaggcaggtttgatctgtgggaccatgtgtgtgtgtgtgtgtgtgtgtgtgtgtgtgtgtgtgtgtgtgtgtgtgtgtatgtgtttgacgacagtttcattttcagtagagctgctaaacgaagcattcctttgttctatcttgggatgtgtgacaggcactccagaggaaagaggaatccggaaatggaagaagggtgtgggcaaagggaacaaatcactcgacggcatggagtcgtacaatttgccatttggcatgaacattataaaaaaatacagatgcttcagctacttacccatcagcccaacctttgtgggctacacatggaaaggcctcaggaagagcgacaacagccggagttcagatgaagactcccaggccacgggatagcctttgctgtgccctgtggcctggccgcagtgaggcatgtatctgtagttccttgctgagtaacaagaagtaaaatacatgtttgtatatctacatttacattctgcgccccagagctaagacagactgcgaatcacttttctgctgtgagggtgatggtgcctgatgcggtgtctcgcctatctccttatttaagcccttaactccttgccctttgagagtgtccattgctggccatggtcactaaatttgaagttccagtcctccctttggagtggacatttaaaatctgcagccattccttgcttcagttcccttccaccacccagggctggctttcctataagccacctccagggtccaggggctttctctctctctccgaagcccctggacctgtttccttgtcatttgaccctcgtctgtgcccgcggagacctcctctgaccaaggggcactagtatgccttgcgctatcatgactgactggcccagtatgattctgttgtcgctgatctcccggaggaggaggctgttgacctgaaaacagtggcgtggctcccctgtgcccagatctggccatgggtgaggcctgcacagatgttgaatgaacatctgtttggggcattggagggaaaaggaaaggaccctgaagccaatatctgattctcggctgcaccttctcttggccaccctggccctgaccgggccagcacgtgcacactggcctcttttcatttcactagtggccgagacaccctctctggcatttatcactgttggccggtgtgatgagtatagagtgccacccaaggcaccagtcacacaagctgatgggcgtcttggctctgccgtcatgtggatgttattgtcgcgcgcgtctataattacaaggttttattcctatttaatgttattgactatagcagattttggaaatcagtgttttccatgtgaccctctttccttgcatccctattccttgtcccccacccactcttccccccatcaagaaaagaaccagcatttgtaaagctgtggacaccatcagggaagcttgttgtaacggcttttgaaggccagtaaccattgttgtggttgtgttttgtattgcttgataccatgaaagtgtaaatactgtaatgcctaatctatttatcaaaactgactactggaccggagcccagaaaccatgggtcaagttacacgtgaatttgttttgtgaagaagggaagctggggcaggtaacacgcagagccgccacgtggaacggtctgtccgccggtctgtcccgcttgccgggcttctgttgcaagtcttggcttaaggagacttcctgtgggttgccatgtcgcacgtccgttagatcttgattttacaggtgagggtggttgccaaaggtgataagaaaagcagccaacaggctccctctcacttaagagagttctaattaataacactaaattcttcctgagaaatgactcctcttggtttggtttgaagtttttcagtgaaggaaaaggcctgagataggaagcagtgccctcgcttcatgaggtggcacatcttcggtggccgttggcctggtcgagctttggtcagctgcgtgggtgcctgtctcctgtctccagcggcagggcatggttcttggcagcctggtgtccacacggtgcattcctgtccccctcggccccaggctggctcagctctccagtgctgcggcgctgtctttgcagcattgccatgtcaccgtagcccccttcactcttggaagtttggggcttcaaggtttattctggcaagaacacctcggagccactgcattgttttgccaaaaacttactgcagattaagtaaagaacttagatgctaaattacatctaattttgtatgtttttttaaatgtgtctttgatgcatactttagaagcacactggctcgcggtttccatccctcttgccttgggacactcttgaggctggcagccctcctgcaatgagttgctctcagttccttctgtttggattttgctcaacatctccagtttctctgctctgaaaaatggggaaaactgctaaacatcccagagatttgcaatcttctagctctccaggtgagcagaaagaccaaatatccaaataaaagcctgaaagccattggtgatccaggggcaccttctcttcagcttgactgggcgtcttccgctgcataacactcaaggtgtctgctctagtcatccagaaacccactcccttctgaagcccctccttgggccgggttgtatcaggaggattcaaccccgctaacatgtggggtgccctctgtaggccttcacacagggaaggaagccctaccctttcaactcctgttggagtgagagtttcctgttctgattccactgtggccaacccaataattctgtccgaggaggggtaagggaataggaggtggggagcaaagagggcagcctgactagatgcccctgctgaatctggtactttctgcacagccttgagtgattggagtcccctaatgactaataaacttgaacatgtaacacacacacacacacacacacacaccattttaggaagtggttctcctactggaaaatatgctacagaatgaaagtttgtaattgaaagaaaaagaatgtattcatctgcttcttgggtttaagcacacacctgaaggggagatattgggggacacggtggccactcgcggtctgtgtcatgacacttcccattcacatcattggcctgcgttgctggggctttgaaccaccaccccgtactttgttttgcctgtagagtgttgtaaaatattttggatgtgaatgtccttgcaggccggttagtctccagtttccacagagaccacctacccaccaccttcccaggtcacctgcctggtccctgaaagaaagcatttgtgtgggcaatcccaacatgaaatgtagacagcgtgaatacggacaggaggtgatgccatattcacagtgggggatggagggcccccacccctgcttcacagaataatgggaagtgactctagtctttg

SEQ ID NO: 9096 - DNA, 6000 bp, Homo sapiens
ggcaaaaaaccccatttgtttgggactttaggtcaaacaaatccattcctttcctgaaatcctcagtgagttagtcctgtctctgctggtggccatagatttcaagagttgctctaaacaaacgtccaggtcttggtggaaactgtccctgggccagtcagagaaccagcccagactccctgccagtggctggggagtggtagaaatttggctcgcccccccatccccaccctacccacaggcccagttgtgtctgtaccagaaatgaggagtgatgccaagcctaggcctggcccagccttagcttctgcaatgcaacctatgtaatcacacccattttacaaggaggaaactggggccatacaacaggtcagtgacaagagctgggacctgaactcaggctagtctggttccacactgccccctggcttctggacccttaccaccaaaatgactctgaaactagagaatttcaggatttcagacatcagtggagagggcattcgcagaggggatcttccctgcagtcacagtgatgggaggctccacacccatccttgagggagaagatgaatggggcagtgctttgagtttgtcaggggctgtgtgaatgcagtatgctgtgacccagtgagaatccctcccgcccttccggaacagaggagagttctgagaagcccagagggcaagcaggagcctggaagccaggcctctgcctccgtcgaggccctttctactcccacagtcagattttggtttgttgtgcccctgcagactggtcccagggcccagcaggatgctgtagggatgtggtgatgagtgaaggccccaaacaccggcagcccagcccagcccagcccagcgaggaggggcccaaggcctggagagcagagtgaggtggctgtgccgtggagcagatgcggctgctgcttactcctgcaactttgagcaagttgtataaccttcctgagcttcacgtgccccacctgcaaagtgggcatagtcacgatctccacctcacaggctctgaggcttacgttagaaagccgcaaagctgctgagcacagcttagtaaatgacccagcttttggcccgcagcctgtgccttgtggccagctgaacgcagttgctcctcttcgctgagcaggcgtgtccctcctctctcaggatgatgtgttggagagccattcttcttttgacctgagccctgcctcctgcctccctgctgcctttcttctggcccagagaggtagctgtccttctgcctgtacactgctcttaggttggtaaccagagatgcaggtgtctgtctgggggatctctgagttttctcaaggcctgagcaggactgggacatttcaaacagacgagtaggaagtgagtgctcctggcttggaactcagagcactttgtggcctctggactaggctgggcacaaggcacagcatccagttccctgggcttaacatcgtggcatgtgttactttcaaagaactcactgcagagctgtttctctgctgatgagggctcctggcttttctggaatccactagaaggccttggtttcatagatgtctattggatgaacagatggattattttaaattaaattttatttttagataattgtagattcacatgcagttgtaaaaaataatacaaagggattcttcataccccttactcgatttccctcaatagtaagaccttgcaaaactaatacattctcacatccagaatatcgacagatacaatccacccatcttattcagatttccccagttccacttgtgtgtgtgttagtgctatgcagttttatcacatgcatacattcatgtaaccatccccacactcaatacaggactattccatcacttcatacaagggtccctcttgttacctttttatagccacacctacttccctccttgccctccccttcaccctctccctagtgaccacctctgccctagcaactactaatctgttctctaggtcatttcaagaatgttataggccaggcacagtggctcacacctataatcccagcattttgggagactgaggcaggaggatcccttgagtccaggagttcgagactaacctggcaacatagtgagacctcatctctaccaaaagtaaaaaagtggttttttttttttgttcggtttttttttttttttttttttttttgagacggaatttcgctcttattgcctaggctggagtgcagtggcgtaatcttggctcactgcaacctccgcctcccaagtttaagcaattctcctgcctcagcctcctgatagctaggattacaggcgtgtaccaccatgcccagctgcatgttttatttttataagaaaatgccaatgtattttccatgacagtagtatcactttttctccacattctcaatagcatttgatgttgtcactttttagccattctgataggttatgtgatggtatctcatagtggcagatggatggtttctacagtcctttgtccacagctcctgtgatactgggccttgttttgtgagttgcctctgggctatcaccatcaccatgattgtagccccttgaaggcacagtttatctggctcatgggcccagaccagggtaggggcttgtttcagtcctcacagggcaacaggcagttggagttaaggtgctgagaaaggcactagatccaacgtcaccctcccagcaaacagctactgttggaaaagcactttctattgccaacagagttctcatcgtctgagaagcaagcagtgggcctttggtgttctgggctcctgctgtgggtcagcccctggctggggtcagggtgagattcagagatggttcaggttcctacccatggcaggtcctggctctgggaatctcagtggagaaagtggagaacagggagttggaccagtggagaacagggaggcagaccactgtacgggtttcacataacgagaaagtgttggggtgggaatggcaagatagggaaaggggttagctggaccctgaaggatgtgtgtttttttgtttgttcatgtgtttgtttgtttgtttgttttgagatggagttttgcttttgttccccaggctggagtgcaatggtgcaacctcggctcactgcaacctccacctcccaggttcaagcagttctcctgcctcagccttccgagtagctgggattacaggcatgcgccaccacgcccagctaattttgtatttttagtagagatgaggtttctccatgttggtcaggctggtctcgaactcctgacctcaggtgatctgcccacttcagcctcccaaaatgctgggactacaggcgtgagccactgcgcccggccagatgtgttcatttttgaccaggtggagagggggcatccaagcagagggaataggggagagggaaggtggtgtggaaggaaaagaccagggggagcactgagtctctcagtgaccttgaagatagcaaggttaaccattccttagctgttttggcatctgctctgttgtcaccacctccccacggcacgggtcagggtctgtcacagcctcgtggccccacgcacttcacctagtacatgcccctgctggataataaggtttgtgtgtgactgatgtgggggatatctttggccagtggtggcatcccctcaagactttgtctcgaatgagggtgggtagggcctgtgtgtgtctgtcttggtcattgcagtcttgaccctcgttctccctgctccagaaatccttgcggacggaatggctaagcccagagctagggccaagtcaggcagggcttctgcattggaaggggcttgagagggttgggggcttcaccatctcacctctcccctgcccttctctcatccatctgcaggttcatcatgcctagtggcgtataagaagaccccgccaccggtccctccacgcaccacttcaaagccgttcatctcagtcacagtccagagcagtactgagtctgcccaggacacctacctggacagccaggaccacaagagcgaggtgactagccagtcgggcctgagcaactcgtcggacagcctggacagcagtacccgaccgcccagcgtgacacggggtggagtcgccccagcccctgaggccccagagccacccccaaaacatgcagctctgaaaagtgaacaagggacgctgaccagctctgagtcccaccccgaggccgcccccaaaaggaaactgtcatcgataggaatacaagtaggggctccttttgcactctgtgtcctcagcccactccgtgcacctgcctgtgtgtaattacatctggtagaggcccactaggtctcctgggaaaaggtggtttgtctctctattttgggggatcagccccaagtggccaaaccgaattccacccatagccacgcctcgctggtatctgtccacacgtgctgctggtcagcagctgtgggcatgtgtttctgctcctccagtgggttgtcccagtgaatgtagttacactcagccagccatctcctgtccactgtttgcctgtccactgtctgtctgtccactccaccctttgccctgccagctgacccgtgggaggcgggactggcctaacagttctctaatccaaggtcagctcgggtgcggaggccatagccccgcttggcggcaggagcagcatggagcatagacgctgttgggccaggggcccaggacccagggcccttgagccatgggggttgctcgaggggaactttgcccagagccctctcgggccttggggacaggtaggtggcttgaggtaccaggcccatgtcattgagaagggtgatgccggtctcactgcctccctccatgggatagggtccaggcgatggttccccagggttaggtggccaaagtcagcaggccctccatagtcatggcacacagcagggcaggtgtgccagcttcccctccactgcttcattgcactcctgcatgcacccgatgtcaataatctgtcttgtttgctgagctggggaaacttgggccctgccttgtagtttttaagagtttctctaaatccagattgagtggactctccctgccctggctggacctgcagaccaaactagggcacgttcagagccatgagggaggggcagctacagtgggtgagggcgagaggggagacagggcccccccaagcccaggggttgagtcagggaggacgaggcattgtgtgttgtggcacaggctgcaagggactcctccagccacccctgagcaattggatgtggcccagctgataacaaagcactggaatgcaggagcgtgggacacaaagtggagcttgaatggaacagagaaggctcactgagcaatttcttgcagttgcctgtatttgtttcctccaagaggcagctctaggcttccacttccccatgtataaacagagagagagttggccaggagactctgctgctgttttctgggcttcttaagtgtccagtccctgcgctgcacaggtgggattctcagaaacacagagagtagcctgatcttcaacccttggtcctgaccacccatatctttgggcagccccaccctcttgctggccaaaccagacgctcttatcttcccggaaagcctaagagttaggactacccttgattcctttcacccagaaaatgacaccgggataaggactctcttaggcctgtcctgggcgtcccattccctggattcaccccagccccattcttggtctcattgcagctccttggagatccagtggtgctgcattccttgagccggcttttgccgaggggaaatgtggctgcatccctgtcccagaaagcttccctggcccctacttctctccacaaggccaagagactgaagagtccccagtttctgaggatgccctgaacccttggtgcctcatgccctagattgagtgtgggtttctccctcattcttgagtgatgataggaaagctggcctggctgccccatgg

SEQ ID NO: 9097 - DNA, 6000 bp, Homo sapiens
gcgggacctgctcggaggaatggcgccgccgggtgaggagttgcgcgtggctttggggagagggctgtcgcccgcgggaggttactagtcgccgctcgagagccggccaggcgggatccccttcccctgcgggacaggggcatgggcacaagctctggctggggcgctctcggatcgagggtccgaaggagggctgcgagctggtgggagtgcccgcgacctggcggggttggtgcctgggggaggggtgcagcgcggagctacgggtcgccccgaggctcagccgtggggaccgcggacgcgcttagcctaggtctggcctcattcatttcactcgcgcgggcttctgggccaggcggcctaaggttctggtcccggcgctgccccttactccgtgtgaggttttgggcagattgtccttctttgtgctgtagtttcccattcagtgaaaggggcaaagaaaaccctcacttctctctgggagcctggagcataagttctcaagtgacactctaggtgcaaacttgcagtcggccacgtattcattgtgtaacccaaagcaggttacttaacccctctacacctcagtttctcatctgtaaaataagttagtcaaattagtcacgttatctgcctcgttgagttgctttattaagtgaaataatcttcgtgcttagtttagaacagtgcatggccctaggtaagaactaagttaactgcattggaagttactgagtagacgctgtgcagggtggaatttcatgtagcctcatcgtaactttggaagcatgtactcttgttactaccatttgacagatgagaagttggaatcccacggaagggaacttacttgcccagggtgacacatgaatgagtcagtggctcaccgtttcattatttgagaagttcaggatagtaaagtggttaaaagcagactttggattcaaattgcctgaagtttgattttcagtgatgtgtcctagggcaggtaactacttctgagccttactttcctggtctgtgaaatgcagaaaatagccaccttgcttagatgttgtgaggatttaatgatttggtgtgtgcaaagcacagcatagcgtgggcatacctaacatattaagtgctcaacttttagtcagaaaagttactgctctcgttaacatggagtgagaagattaggattctgacacaggtgctgttttaggggaatttacggtctaggtgggaaaatgctagtcgcagccattcactagatcttcatatattgggtacccgcctgtgcacaaggcattggggattcagcattagtatcttgactccgctctctcttaggtctttctgtccattagcagtttctgataggctttgactttgaattctagccagactaactctcatcacttctcatcatgttcactgctgttgccctggtttgggccaccatcatcttctggcttggattatggcggtagtctcccaactggtgtcccctgctctgtccttgcacctgcatggtctgttctccacacagtattgtttattctcaacacagtaataccattagagtgtaagtcaaatcactcctctgcttagaactttccagtggtctccagccgggtgcggtagctcacgcctgtaatcccagcactttgggaggctgaggcgggcggatcacgaggtcaagagatcaagaccatcctggccaacatggtgaaaccccgtctctactaaaaagacaaaaattagctgggcatggtggcacgtgcctgtagtcctagctacttgggaggctgaggcaggagaatcgcttgaacccgggaggcggaggctgcagtgagccgagatcgcgccactgcactccagcctggcaacagagcgagactctgtctaaaaaaaaaaaaaagaactttccagtggcttccactacggtggtatacaaggccctctggatttgtcctctgctacctctgttacctcatctacttcttaccctttgcttattccactcaagctgtactgtccttgctgatctcaaaaaacactgtatgtgtacatactcctgattcagaatgtttgcatttggtttttcttttcttttttttttttttttttgagacagagccccaggctggagtgcagtggcacgatctcagctcactgcccactctgcttcccagatcaagtgattctcgtgcttcagcctccctagtagctgggattacaggccaagtcaccatgtgcggctcatgttttgtatttttagtagacatggggtttcaccatgttggccaggtttgtcttgaactcccgacctcaggtgatccccctgccttggcctcccaaagtgctggggttagaggtgtgagccactgcgcctggccatattgggtttttcttcttagcatagtttcccaccagatatctttatgacttgcttcttcttcagatctgtactcaatatgtttatttcttagtccttcatagactaccgtatttaaaatgcagcccttcccaaatatctcttctgtactttatttttttccatagcacttactttgtaatgtgataaataatgttatttcatgtgatgtcttttgtcactagaatagaagctctttgagggtgggagttttgtttcttttgtttcctgctgtatttttaacacctaaagtagtgtgtggcacatagtagctcagtatacatttgatgaatacaccacgtgatagattttttctttttttaatttaattttatttatttatttttatttttttgagatggagtctcactctgtcacccaggctggagtgcagtggtgcgatctcggctcactgcaacttccgcctcctgggtttaagtgattctcctgcctcagcctcccaagtagtttggattacaggcacccaccatcacacctggctaatttttgtctttttagtagagacagggtttcaccatgttggccaggctggtcttgaactcctgacttcaagtgatccgcccacctcggcctcccaaagtgctgggattacaggcgtgagctactgtgcccagctgtcttttatttttttgagacagggtctctctttctcacccagggtggagtgccatggtgtgatctcagctcactgcagtctcaacctcctgggctcaagtgatcctcctacctccgcctcccgagtagctgggactacaggcacacgccaccatgcctggctaatttttgtattttcttttttgtagagaaagggtttcgccatgtcgcctggtctagtcttgaactcctgggctcaagcatccgcctgcctcagcctccccaagtgttgggattacagaagtgagccagtgccgctggccaatagtgccttttttcaaggattctagttcaagcttaatttaacactaaaggcaaaggatttagggccactcatgttagcctagtgattatttgttactgctgttacttgggtgccagacaatgcactttatcaagaagcagcccattcaaaagtgttttttgttttgtttttttaaataaatgaagtagaaatgtaccactcctgcagcttcctgtcccctggggcatcatagatggggattaatttttcttttcatttattcagcaaatatttattcagtaactatgtgccaggcagtgtgcaagacttggaaatactgggatgaacaaaagaagcagtctttatcctcatggaacttacagtttagcagagaaatcagacattacgctgttaaagttgtagaaaatcccacagagaagtacagattgctatgagtggatataagcacaacaataataatagtagtagaagtagtagctaacattgatatagcatttgttatgtgccagtcattattctaagatttttttttttttgagacggagttttgctcttgtcactcaggttggcaacaatggcgcattctcagctctctgcaacctcttgtctcccaggttcaagcgattctcctgcctcagcctcccaagtagctgggattacaggcacctgccaccacacccagctaatttttttgtatttttagtagaggcggggtttcaccatgttggccaggctggcctcaaattcctgacctcaggtgatccacctgcctcggcctcccaaagtgctggcccggccagatctttctgtattaactcgtgtaattgtacctgaggtagatactattatcactttacactttaggaaactgaggcaccagctggttgaataactgccaagggcacattgctaataaatggcagaggtgtgatttaagcctggccccagagtctgggttcttccttacattattgtactggggaactaatcctagggagagctgcttaaggaagaggtgcttgagctgaattctgaaagtaaaaattaagccaagttgaggtaaaaacatggaaaaatgctgagcaggaaagaacctggcttcttagaggacagagaagaagccagagagcaacagatagcgggaagcgcgagggaggagatctggttgagaggctggcaaggtgtgaggattcaggattgggtttgtccttagaggcagaggacttacagacatctttcagatgggaatagtaggataaggcctgtgctttagatgcttggaggctgctgggaggactgtccttccaccagttgaagagcaggctccctgccttcccaaggcttctcctcaggttaaacccctggattccctcgcccttccccatgtgatttggttcccagatcttggtgtgcatcatcattgggactgtgtatagcaccttggaagagtgtagagtgtactgaatggttgtttccccccaaggttcaagcactgtcttcctgttggccctgacaatcatagccagcacctgggctctgacgcccactcactacctcaccaagcatgacgtggagagactaaaagcctcgctggatcgccctttcacaaatttggaatctgccttctactccatcgtgggactcagcagccttggtgctcaggtgccagatgcaaaggtaaggctgcttttgtcctggtggtcagggtggttcaggagaaccttcatcccctcactatattcctttggggtagttcaaaactaactcttgctcatttgaggataaccaaggttaatccaatataagaaatatttggccaggcgtggtgactcacgcctgtaatgccagcactttgggaggtctaggcaggtggatcacgaggtcaggagttcgagaccagcctggccagtgcagtgaaaccctgactctgctaaaaatagaaaaaattagctgggtgtggtggtgcatgcctgtaatcccagctactcaggaggctgaggcaggagaatcgtgtgaacccaggaggcagaggttgcagtgagctgagatcccgccattgcactccagcccaggcaacagtgtgagactcagtctcaaaaaaagaagtttatttcagtttgacagatctgtttttgtttttgtttttttgcctaatgtatgttaaggatcataccagatcagttatttttagtgggatgtcaagaagagcaagcatagatcatctagaaacttttacttcagctctgggagtgagactgtccaataacacatgtacttactaagtgcccccctatgtgtgtggctaataataagggaattcaaggtggaaggcactcacatgtattaaataatggtagtcactacatcaggcaattttgatacatgtttttggacttctggtgaggaaaatgcattatgattaaaacctttcctggattcgggacagtctttttttttttttttttgagacagagtctggctcacccaggctagagtgcagtggcatgatcatggctcactgcagtctctgtctcctgggctcaagccatccacctcagcttccctagtagctgggactacaggtgtgcaccaccatgcctggcaatttttgtattttttcgttagagatggggttttgcca

SEQ ID NO: 9098 - DNA, 6000 bp, Homo sapiens
ctctacattccctgacatattgacttgataagtggtggttttacacaagggcccagtcatctcttaggaattaggaaaccattcggggtggaagcagcaatctgtttaaccaccagggggcctctcctctcccagtttcacccagaaaagcaccatttatattttccaaattatctgtattaagataatagaatctaataagtcttacatgtatacatctatcatgttccatcttaaaaagcttatcttccagaattatagataaaaatatatgaataagccataaaaaagaatgaagtgcagatacgtgctacaacatggatgagccttgaaaacattctgttgagtgaaagaagccagacataaaaggacacagattgtatgattccatttctatgaaatagcagaataggcaaatccgtagagatagaacatagattgctggttgctgagggctaaggggagacacaatggggagaaactgctcggtgggttttatctattttttttggagacagggtctcactctgtcacttaggctgagtgcggtggtgcaatcacagctcactgaagcctcaacctccctagctcaagtgatcctcctacctcagcctcctgagtacctgggactataggcatgtgccaccatgcccagctaatatttaaattttttgtaaagatgaggtctcactgtattgcccaggctggtttcgaacccccaggcttaagtgatcctcctgcctcggcctcccaaagtattgggattacaggtgtgagccaccgtgctcaaccaatgggttttattttagactgatggaaatatttgggaactagacaggtggtagttgcacaacattgtgaatgtagtaagcacccctgaattgtttgctttttaaaatggttaattttatgtgaattttgcttcaatctttttttttttttttttttttttctgagacagggtctcactctattgctcaggctggagtgcagtggctcactgcaacctctgcctcctgggcctcagcctcccaagtagttgggactacaagcacacgctaccatacctggctcatttttagtatttttagtagaggtggggtttcaccatcttacccaggctggtcttgaactcctgggctcaaggaatttgcctgcttcagactcccaaaatgctgggattacgggcgtgagccactgcgcccagcccaatgcccacggttcttcttgccagttctgttgcctgggttgccttctcagctgtgatgatcttttccaggttttgtcacatctgtcctaactggattataagtaaactccttaaaggctgagaccaacttgtacttctaaagaacaagagtaggatatttgtgaaagtgtccaagtacgggaaggggtgagtggatgaaacaagacttgccattcattggggttctactctttaccttccagaacagtccaggctctgcagacagcatcccacctgtcccagcaggctgacctgaggagcatcgtggaggagattgaggtgtgaatcttttgccaaatgcatctcccagctcctgtctttgacactctgcagaagaatcttgcagatagccatgcatgatctgttactacaggttacattgcttcttatatccatggcacacttgtgttctttgtattaaggtattgtgtcctgaggaatatttgtgcctattacataataggtcctcaggacgtggtgactgtggtttttattattgctctatccttgcctttgcccagaatatcatgctcctctgggacctctgtcatggactgcctggcaggagtgacaagcagtcctgatggtgttctcactggatgcttcacaggcacgttggttgcctagtcatgttgcctaggagagcagtatgtctctctttgtcttttggagcattaagaaattctgggaaacgctgtgctttgtaggttgtattcaaatggatggccatggactccatctgtgtcatgatgcttcctgggtgcacagcagcctggcccactggctttccacccaaagcagctggcgtgttctgtgccatgactcctgggcttgggcctgcatacaaggggccaaggaaggagccctcccaaaactgcagaagatagtgctctcctcaaatgtctgtttgatatactttactctgcctaagcaccatttttgagaaagtatgaagtgactgagatggtcttcagatttagagtgagagatgtcacgaagctgtctgcagtggggttgacagtggttcgtgcatctcatttctgctgttacttgacatccagcatatttctgttttgttatggcaggaccttgttgctcgcctggatgaactcgggggcgtgtatctccagtttgaagaaggactggaaacaacagcgttatttgtggctgccacctacaagctcatggatcatgtggggactgagccatccattaaggaggtacctatctaacaattttcaggcatgaaacccaaaggggtcatcagctgtatctgctaaggatggcttttatcagagaggaatgttcagacagtaccttgggatgctgtcactcagtgtcctgggttagggattaagaatgagaaatagaaagatgtaatgcctgtcttcaggaaatgggttgctagtgaggtagacgtgtaaacaaaccatgcttgctttaaatggggtatgtacatgtcacgaggtagtatcaaggaagccacgtgtattactcctgtttcatctccctttcttcccagtacccttttctgcttgtcgcctgaatgctttccactctggtggctcattcagatccttctctgggctcacaattgcttctcctcccttcccccttatgctcagcaacggctaaatcttagctaatctttgctgatggacatagttcactgagaggcatgtgtgtctatcacacatccgccaagagttcattctttttctcaagaggaggttgttaacctgaaagaatctttagttggaatgcatgtgggaagcctttttgagtaggaccgtctttgtaccccttgtttgtgagaagttaccagcccttaatctaaagtacttaaaatacaagctgcttttatttaaattttaggaggagagatttgggttttaagtgagaattttcatttctttatgcattatgagttttgtgccaagtttctttaagtaaatagttatctgtcttggataattggaattaatttcatattttctccatgtggtcaaataagttattcatgtgtttgcattctttttgtgtctcttcctttgtcctaagtgtaggaggtctagaaatatactcccttttaatttctgttatgggtgaaattgcaagagtgtggggtcttagggtacagattgtttgctgattgtcctatacacagtaaagtagatgaattaatgatattgtacttatacaacttaaacattttcttcctttatttccaagctgctgctaaccaggtacttggctggagtaatttcgctgtcactgcttttgacaaaacaattctggtgaacagtcacccattttaacgtgtcaacagagtagtgatggaaaattgtaattggtccaattaaagaaaattctttcatgttgactgtgaataacactgtcaggaacaagagagcccttttgttggatggtagattttaaaaaacaaaactgattgaaggggaaaatgtttcctcctaagcaaataacctccagaattttaataatgccttttaggttccacttttttaaaaaattgcttttagttttctcctctaagcagcccattagttcttaatggagagttattttagtttctttttaatgtacattttagctataaagtttggtcttataaataaaaactttgcctcaatgtactacttacaagtaggttgggaggaaaggtagcttagctgggaggataatgagaatcaggaaagaacagattttcttgtagaaggactttggagacaaacagtcctacatttgaatgttggtcttgctaatgttgtggtaacttgcagaagttatttagcctcctttagcctcagtttcattttttgggaaacattgataatagcaatcttttatagtttttgtcaaaatttgagttaatgcatgtaaagcacctatcatgatgcctggcatatatagacattaacaaataattactattatatatatttcataatatagtttcatatctcagtagttatctggaagtaccctgcatttgtgtagtaagcattattatgatttttttttcagacagagtctttctctgtcgcccaggttggagtgcagtggcgcgatcttggctcactgcaacctccacctcctgggttcaagcaattctcgtgcctcagcctcttgagtagatgggattacaggcgcatgccaccatgcctgactaatttttgtatttttagtagagttggggtttttctctatgttagtcaggctggtctcgaactcctgacctcaagggatctacctgccttggtctccaaaagtgctgggattacaggcgtgagccactgcacctggcctgtataataagcacttattaaataactgacaaatcatgaatttcagtttataaaggaagatggaaaaaaaaacaaccacatccaagttctaagtttaaatgcagaatatttgcgttttctccatctacgaatttggatcattgaccaaaagacctcccatgtgaacacccgaaacagataagggtgactttcctctacagcagtggccctcccaccttcccagcagaggaagagaaacagctgcatttcgcatttctttcaggatcaggtcatccagctgatgaacgcgatcttcagcaagaagaactttgagtccctctccgaagccttcagcgtggcctctgcagctgctgtgctctcgcataatcgctaccacgtgccagttgtggttgtgcctgagggctctgcttccgacactcatgaacaggctatcttgcgggtaagacatccatgcccaaagtgtgcccctctgattatcattcctagtggaaggctttcagaaatctggactatggtcacagccaattacagcccctacaaggacatacccattaaatggagggcaaggctcatttccctgagccttgaaatggagacatgaccactcggtgaactagccacagaacccttcaaatctattaaaaaaatttttttcccctcgtggatttttaatttttgtttctttttttgagacagagtcttgctctgtcacccaggctggaaagcagtggcatgattttggttcactgctgcatccacctcctgggttcaagtgattcttgtgcctcagtctcccaagtagctgggatcacaggcgcacaccaccatgcctagctaatttttgcatttttagtagagatggggttttgccatgttggccaggctggtgttgaactcctagcctcccaaagtgctgagattacaggtatgagccactgtgcctggcctctccctagaggattttaaatagtacaggcttggctgggtactgtggctcacgcctgtaatcccagcactttgggagactgaagcaggcggatcatgaggtgaagagattgagaccatcctggccaacatggtgaaaccccatctctactaagaatacaaaaattagcagggcctggtggtgcgcacctgtagtcccagctactcaggaggctgaggcaggagaatcgcttgaacctgggaggcagaggttgcagtgagccgagactgcaccactgcactccaacctggtgacagagtgagaccctgtctaaaaaaaaaaaaaaaaaaatacaggctttcagtaagtgcaggaatattgcatttctaggtctataactccagatgtatagagaagtcttgcatctaaaatgcacttcccaataccaaactttctttttcatatttttttggttttgttttggttttttttgagac

SEQ ID NO: 9099 - DNA, 6000 bp, Homo sapiens
ttgggtttccacttaggacagttctgtctgtcccattagttctactttggtggcccctgcagatatcctcctgagcgagtaccctgttcttcaaaattgcccattttctccctacatacaactcatataccctcaacaaagacttgggtagaaagtaacctgagtaacatggtttcctgtgagtcaagaggggctaagagaacaaagtggaaaaagaattgactctgaagttaaatagatggtttgagtcctggctcaactgcttaactggccatgtgacctttagcagtcccttaacctcttgtggcttgtttcttcacctgtgcaataaggattattctatctgtgtcgtacaattgataggagaatgtatgtaaagggcctagcctggtatatgcatatagttgactttcaacaaatgatagttattaatattatccatatttctttaattttcccattgctgataccattctaaagtatttttctggctgatttatttattaattttttagtagagacggggtctcactgtattgcccaggctggtcccaaactcctggccttaagtgatcctcccatctcggcctcccaaagtactgcaattacaggcatgagccactgcacccagtctagctgagacatttttttttttctttttcagagacagggtttccctctgttttccaggctggagtatagtggcgcaatcatagctcatgctaactcttgggctcaagcagtcctcctgcctcaacttcctgagtatctgggactacaagcacatgccaccatgcccagctaattttttaatttaaaaaactttttttttttttggtagaaacgaggtcttgccatgttgcccacgctgttcttgaactctttggcatcaagtgatcctcctgactcagcctcccaaagcactgcaattataggcatgagccatcatgcccagtctgataaattcttttaaagattctgtagtagagtggatagaatagggaatcagaaagaaggcaatatattggccaggtgtggtgactcatgcctgtaataattcactttaggattaggcagcaggcccaaggtcagccaagatttcccgaagcaggggatttgctctcctgcagagcttgcaacctatagataaagcaccccagaaacaaaattctctgctcctgtagcctttgttgtaacaaataattttttatttatttccagttgcaagtcaccaatgttctgtctcagcctctgactcaggccactgttaaactagaacatgctaaatctgttgcttccagagccactgtcctccagaagacatccttcacccctgtagggtaagtcctgatcatattttggtggggcgctgacctctttgttttggaaagttagcctgcagccagtgtaacagattaatacattccagttaggtaaatttgatctactggtatcgaaagcctacagtcgaatgtaagaaaatgatttttaaaatgaagattatttggttttactgtttcattctctgtttctagttggctctgtcttgtcattgtgacataagtagctattttgaaatttaatatttattgatttttttctgataaataataatgtttattataggaaaaatacagcaaagcacaaaaaaagaaaatataacttacccataatgctaccattcagagataacttttgctaactttttttttttttttttttgaggcggagttttgctcttgttgcccaggctggagtgcaatggtgcaatctcagctcaccgcaacgtctgcctcctggattctagcgattctcctgcctcaatctcccaagtagctgggattacaggtgcccgccaccacgtccggctaattttttgtatttttagtagagacagggtttccccatgttggccaggctggtttcgaactcctgacctcaggtggtccacctgcctcggcctccctaagtgctgaggttacaggcatgagccactgtgcctggccttgctaacattttataatttttttttgacagtcttttttctatgtatgtaaataaattttaaaaattcagttaagggccaggcatggggctcatacctgtaaccccagcactttaggagactgaggcagatggattgcttgagcctaggagtttgagaccagcctgggcaacatagcaggaccccatctgtaatttttatttatttatctatttattttttgagatggagtcttcctctgtcacccaggctggagtgcagtggtgtgatctcggctcactgcaacctccacctcccggcttcaagcaattctcctgccttagcttcccgagtagctgggattacaggtgtgtgacactacgcctggctaatttttgtatttttggtagaggcagggtttcaccatgttgaccaggctggtcttgaactcctgacctcaagtgatccacccacctcggcctcccaaagtgctgggattacaggcgtgagccattgtgcccggcctttttttaaattagagatgggggccaggtgtggcagctcacgcctgtaatcccagcactttgggggggccaaggtgggcggatcacttgaggtcaggagctcgagaacagcctggccaacatggcgaaaccccatctctactaaaaatacaaaaaaattagccagacgtggtggtgcacgcctgtattcccagctactccggaggctgaggcaagagaatcacttgaacccaggcagcggaggttggcagtgagctgagaacgcgccattgcactccagcctgggcgacagagcgaggctccatctctattaaaaaaaaaaaaaaaaatcagggtatgctttatatgtaacaatgtgccacaaacttttttttataggattaaatattcttttacaatttttttttttcttttttgagatggagttttactcttgttgcccaggctggagtgcagtgtagtggcgtgatgtctgctcattgcaatctccacctcccagcttcaaatgattcttctgccccagcctcctaagtagctgggattacaggcacctgccaccatgcccggctaattttcgtattttcggtagagatggggttttaccatgttggccaggctggtcttgaactgcctcagcctccgagtggctgggattataggcgtgtgacctcaggtgatcctcccacctcagcctccaaagtgctgggattacagttgtaagtcaccatgcctggcctttacaatgatttttaatggctgcatattattgctatgtaattttttaaaaactaaggcccagtttactgggtgtgtggcttgcctatagttccagctacttgggaggctgaggtgggaggatcgcttgaggctgggaggtctaggctgtagtgagccatgatcataccatatcactccagcctgggtgacagagggagactctgtctcaaaaacaaaaacaaaaaactaagggtcaagctgggcacagtagcaggtacctgtagtccagctacttggaggttgaggcaggaagatcatttgaaccgaggagcttaagaccagtctgggcaacatagtaagacctgtttctaaaagaaaaaaattaagggtcaatttttatatgaattagtgtttttcccagctaattgtatagaatttttttttttttttgagacagtttcgctctgttgcctgggctggaatgcagtggcgtgatcttggttcactgcaacttctgcttcccaggtacaaggaattctgcctcagcttcctaagtagctgggattacaggcacccgccaccatgcccagctaattttttttgtatttttagtaggaatggggtttcaccatgttggccaggctggtttcgaactcctgacctaaagtgacccgcctgccttggcctccgaaagggccaggattacaggtgtgagccactggccttatatggaactttttgaagtgttaaattaggtaataagttattgagatcaggagttttcaattttagagagaaaatgcgtttcttaatcataaggatacataggcaatatgtgaaattaaaaagcaaaatcatttttaggcgtgtcaatggagtggtaaaagacattgagattttactatatagttagagtaaggaattctctacctttttttccctttaaaataaaaataaatatttttaataaaagtaagatatgtcctttttgagaaattcacaaaacacggaaaggtagaaatcataccaaaaaattagccacaattatactatcgtacaccaacctctttgtacattttggagtattttcctctacatttttgttgtcattgtgaaacatatgtgggatcacattgtaaacttctcaattttacattacactgtggaaagctaccaggagtttgaattttaggagtggtgggagtaacaaaggaaaagaaaacgttggaaacctaggggtgttcatcttagatacttttctccacatgccaatctgtgattaagcacgagggtcaggcatggtgactcatgccccagcctgcactttgggaggctgaggcaggtggatcacttgatctcaggaccctgtctctacaaaaaactgcaaaattatctggacgtgatggtgcatgcctgctgtcccaactaccagggaggctgaggtgggaggatcagttgagcctacgagttttgagactgtggtgagctgtgatcgtgccactatactccagcctgggtgacagtgagaacctgtctcaaaataaaaaaaaaataagaagcacgagattgcccaagtggggtgggaagtcaaaaaggtaaggagttggctagccttggacagtctccaggagacattttgtagctcctgtttgttatatccatgactttcctacctgagttcttgctaagcccattgtcattcttaacagggatgtttttgaactaaatttcatgaacgtcaaattttccagtggttattatgacttccttgtcgaagttgaaggtgacaaccggtatattgcaaataccgtagaggtaggtgtttttctttccttcccattgccatgttagtatatccaaggatatggccaaattgacacagtattaattgtctggtgcattgacttttctctacaaccaagctaatgtgtttatgtggagggagggctgcattcagtctttgctgtttgacagacttagtagctaaggcagtaaatcaagaacttggtcatagtgaattttcttttatttgtaagtttttcattttccattataatttagcattactgtcttacatgaaatttagttagtagaaaaaataaaaatcacccataattccactgagccttaaactcttaaagtgttttgtgtgataggctttggtgggtttagaaaagtgcttgatgccaaataggtgacaaaaagcaccaagtgacacatacgtaacactataatgaagctatttgggtaaaggataaaagaaaatcagtaatctttcataatgaactttgttgatgtttagctaactctagctgggttgaagatcgaagtagctttaaggatagaaagccttatttacctgatgctttgtgggaaagaggtagttcaccttagtatttttcccagctaattgaaatttaccccatctggcatggtggctttcattgtaatctttttagatagaagtttatttaagatgagtgacacattttcctactttcttacttccaatttaagatggtttctttgtctttcatgaccttgacacttgaagaggatgggctctcaatctgtagaatgtctctccgtttgtgtttgtctgatgtttcttcatgatcaggttcaggtcatgcattttccgcagttctatcccaaaagtaatgctctgccctactcagaacaagaagtatatgatgtcgatatgtcttattacaggtcatgttaaccttgatcacttgagtaaggtgattgtgtgctaggtttctctgctgtaaa

SEQ ID NO: 9100 - DNA, 6000 bp, Homo sapiens
tgggctgggtcagtgttattatcatccttgaagactcttgttctaggattttttcatgcctttactcaccttaaagaatagaaaactttatatctgcatgtgaattcctgaacacccaccaattgacctggcaactgtcttctctattttcctctagctcagagtcaagatctccactgaagttggcatcacaaatgttgatctttccaccgtggataaggatcagagcattgcacccaaaactacccggtaggtgagatgccacctgatcactcagggagctgaggctcaagagctgagaggagtatgcctaggcactgagccctgcaggcatcagttctgtgtcagcagccatccagcttacatcctaaattaaagagtctgtagttccactggtcctgcaccggggattctgcgaattatctaagtggatttggagattgtatataccagtgtttagtccatgcacaaactatttattaaccagtcctcaacgaggtaaagcgcttacctcaggatgttagtctgagtcagtcagctatgtcactaagcatattatttagttcagatgataatttttaaaataataagaccttctcaatgaaggaagcaaggtattaatttacattctggtgcgatctccttatcatcacagtcctgaatttgcttttagtgacctaatggcaagtctctctggcctatgatgggtctgaaattagttggaagcctcacacgtgcttaaaattgagatggcagatacccagcactagggctgccatttccccctcccaagtccatggaggcagtactaagaagtcatagaacatttgctcccactgaactcagacacagcctcagaatctttttttgaaacataatcttctaagtagacactaacaattgaacagagttgggccagaatgctgtaagaagcctgctcatcagccctcccccagatccttattggctcagcggggatctagatttctggggtatagtccagaccccaactttactcaactagggtagctatagaggccagaagacagtagggtgaaccatcaaggctctttgaagatgggatgttagccagaggctggaagccaagcagctactccttttaaatcacatagagttggcctttgtgtctctgggttggctatttttgtagtgatattggagataagagcactgtttaagaatccactgaagaaatgtctgtgcgagcgctttgctgtttaattctctgcctagatgaagagttggtcttacttacgagtaaatgtaaaatgtgagtataaaataaagccaggtctgagctctgtaaccatttggctggtttatcccctggccatcttaccctaaaatcccaggagatagctgtgaaaagaagttttcctcatcaagtctgccttttgggaaaatgactttttaaaacccagtttcagggcagaaaactaaattgaaacagtgtccaggaaaaaaatatagcattaaaaaaagacaaagctgaaagtacccttctttcttttgtgtctcctacctgccttgtctcgattttgctcacgtgtgctgctggcatcaatcctgtaattatttctccttgcggttctgccagcccggctctcctgtgtgcctgcagaggccacacgtgagctcctctggtgcctgactttgttggagttgagagccttaggtccttgaagtgaaagcccagaggtacaagcatctgtacacagcatttccccagatcctgctggaagtttattctgcacttttctcagtccaggctttatcagtccaatttgcccccaggttgcagacagttctccacatctgtctgtccacaacagaagtgttactatgggagagggtggttgaggcaatgaagtgaagtatatattttctgcctgttctcagagatatactgatcctctctgaagactaactctatatgcctctttcagggtgacatacccagccaaagccaagggcacattcatcgcagacagccaccagaacttcgccttgttcttccagctggtagatgtgaacactggtgctgaactcactcctcaccaggtcaggaagacacctagacagttctcttaacctgaaatgtgaatggatactagagtttacaatgtggtctataacatggactagagagaattccacgttcctgctttcaggttttgaccgaaccctgacagtccatcaggttctcccacatgacactctcacccttctactggttgtagtcctttacctgggatacacccttctttctaaaaagttagctggtattgaggagaggtacttaaggcagatttgcacttaattaaggtcattccttcctccctccctccctcagatggactcttgctctgtcacccaggatggagtgcagtggtgtgatctcagctcactgcaacctctgcctcctaggttcaagcgattctcctacctcagcctcccaagtagctgggatacaggcatgcattaccatgcccagctaatttttgtatttttagcagagacagggtttcaccatgttggccaggctgttctcatctcctgacctcaggtgatccgcctgcctcagcctcccaaagtggtgggattataagcatggcactagactcgaggctttttctttctgatttaaaaaagggaatgtgctggccaggcatggtggctcacgcctgtaatcccaacactttggaggcagaggtaggaggatcacttgagcccaggagttggagaccagcttgggcaatatggtgagacctcatttgtgtgtatgtatgtatgtataaataaataagggaatatactgaaataatttcaaaagaagacccaaagcatttttttattctagccaaagcagattttgtatttgtgggactctgaagaatagcccttttaacttgtgcttactttgtattatgaaagcaataggctttatttttttcatagagtaatgaaaattattatttaaaagattttcaaaccatatactctttcccctgagaacctaatatggccccatgtccactcagatacccccactcccacactgcctgtcatcccccttgatggagaataacctgcctttagtgttacgtgaaggaagattcagataaatactttgaatgctgaaagacaggaatgcgggacctagtttggtatggggtaccctgtaccgatgctttagcaaggaccagcagacttgttgccttgaggcagcttcagggcagacctcagaggcaactggatttacttgagaaccttcttgctttctgtttcttgcagctgcagctgttggacttgtgccccaggagcacgttcctctatggccacagtcctgggagtcctctgctcctctctcctccctactcccaaactccagacagcttggttagggcccttagccaagcctaactgacctttgagtacttcagcctcttagcatttcccagcttcttcccagaatgacatttgccaaccaaatagcacaagggaaggaagagtacaaagagaagaaagtaaaagactaaactagtaggattaggattagagcaaggagagttagtgaggaagtgtaactttcactgaatacttgtctcatccagaattctgctgtagaatcatggcctagagaccttccaggtggaggtggcattttggtgatgaacttggcagctgcctgcacttgattgtgataggaaggagatctggcatccggtctccccattccattcctggccaagactaattgctgtagttgggatgcttcatatctctgggcctctttccctaaatgctttggtggtggttctttgttgttcaggtatagattaacacatgagatgtagattttctgtagatacagtgctggctctgtcaccctgccaactcatttaatgcttgtgccttgtgatctgtaaattggatctgtaaacctacctgccttgttgaattctttattttgaaacacctgaaagaaaagctctgggtagttatcaagttttggtccagttctaatgtgcagacaccttggtttcttgtgccattagtggggataaagtgattagactcagtaccatcgtattgctattaactactatttgttgactagctagcatataccgttccctgcactaatgcttagcatatggtattgcaaatcttcacacagatatgccacatctggaagttaatttttctgccttaaagttgaagaaatcaaagcacaaggaagttaagtaacttgctcagctaataagtagtggaagcaaatctgtcttccaagccgaggctctctccatgacactgggctgctctgcttgattagaactctgccttaccatcaatacccaagcctcctctactaaatctttagctggaggcacaaggaaattgaaaatgggcctcttacagttccacctcatttcctttcttttcaccctctggtgaagcagttaattgggcagcaaagtgaccaaaaggctggcgggaaaaagaaattgcagcaatagcaaagggcttaaatcatctgcaaactgggcagtcagcctccaactagtcgagaattggctggacccgtaagttaaatttccttccttgtaccagcaaaaagttatctctgagctgggaactagggtggcatggccactccttctactctctggggcaggtctggcagatcccagagctctcactgtgacaaagcgctaataaccgtctgctgcccggtggattcaatgttaggcccagggagaatcttgaaattatcagatgaaagattgtattattcttccatctagacatttgtccgactccataaccagaagactggccaggaagtggtgtttgttgccgagccagacaacaagaacgtgtacaagtttgaactggatacctctgaaagaaagattgaatttgactctgcctctggcacctacactctctacttaatcattggagatgccactttgaagaacccaatcctctggaatgtggtatgtgcctgaatgtaccccgacccaggtgagagtggctgtgccccaggcactggtggctctttttcaggggcatggggctcttcaccttcgccttgcctgtgcctcctataaataagcttgggaggtgaggcactgtgtgcagtctccataaatagtcctggggtcatgcacggggcttggcaacatggtacgtgcttaataaatattaagtgagtgaaggaagtataaactttgtgagtgctagtatctgtgaatttctataaacattatacaggaaggccgttttcatattatagcaggcactattggggttacgtagatgtgaaagttaaggccctggcctttgagatatggcatagctcatgggagggatgagatctgaattctgataacaattcaggatgatgtagaaaagtgaattgtacaatgtgcaaaatgctaattaactaataaccaacatttgtgtagcatgttgttgtttacatagtgccttcctgcatgcctcactttggattggcgtgatgagagtaaacgtcttgcaagacagggcatttgagcaaggggttgaagaatggcaagggtttatcagatctggggctgtggggtgatcattggggaagggcttgcagaagagctcaaggtgctttcagtgcaatgggagcggttgtgttttgccagagcacctgaatcctgtcaaaagcaggaggtgatgagcttggaaaggtagcagaggccaaattgcaggctttgaatggtggttgactcactttgcaagacaaaggggcagctgcgttttctcgtgtggtattcaagacttcttttcttctcctggacttcaggctgtttttgtacaagagcgcatactcatttctttctctctttttcaaatgtgactaaatcacacttcccagggacaccaagctgtttctgattgcaactgtaacagcctgtgtaccagctgggatttttgtat

SEQ ID NO: 9101 - DNA, 6000 bp, Homo sapiens
gcaggagaatcacttgaacccaggaagtggaggttgtggtgagccaagatcgcgccactgcactatggcctgggtgacgagagtaaaactctcatctcaaataataataataataataacgaggtctgagactctaaccagggagtcgatcgaaatgtttggacatactgcatgcaaagttcaagcatttctacaaagcaacagatggatgggaaatttcccagggataaacttattttttggcaagtcaaaagtatgtattgtgcaagccctgctttgggagttgggagaaccaaatgacctccagatgctacaaaaaggattcttccctgctaaaagaggtcgagtgtacttggccaaaggggatctaaaatgccttggcttccaacttcagggaactgagcttttccctctaactttctagcaaaagggaaggaaatgttgaccctaaaaccacatgaagctaaagctagaggacactgtagcagttcgccagatctccattgttgaattctgtgttggccttttatttatatatttgtcattattttcattaatgcgttagagtataggctgtttgggtccatatcttgactcttctacttattcggtatgagacattgattaagttgctaaatctttcttcaattcttagaatctgtgcttcaggtttttggtttataaaatggtgataatgacactttctcagagggttgtggtaaggattaatggtgttgatggatgtaaagtacaaagaacattacttgctatgtaaatgttcgctattatcaatacacgtgactattttctccttcttcttcttgtccccctccccatccccctcctcttccttgtttagttggcaaatagtcaaattccatttggaatgctgtcccactgttttattctgcttcatggatgtttctgggggaaatttgtgcagtcgatgtgtgttgaattctgttttctgattttttgcaataactgtatggatctgttaatattttccttgtgctgagagatagtctcactctttcatcttccagatatggaaactgagtccccaaaagggaaaatgacttgcccgagatcacacagagatagtggataaacaagtaacaagaccaagggtttccgacaaccagtccaagtcttgttccactgaacacagagtccgaggacattggcctcagatactgatgtgatctgagctccctccaaactctattcacccacagggaagacttgaacaccctatgattccaagtattctccaattgacatcttccccttctaacaaaattgcaagcacttcaagggaaaggactatgacttgattattttggaatcttagttatatgctcagcactgtgcctcaaacttttgagggtaggaactattgcctataacaccttggatgactcggggcagatgctcagtaaatggaaacaactgccctgccttaaaaaaaaaagaagagttggggaggcagggaagagaattaatatgtatcaagaatttaatatataccagtcactgtgctgagaatgttcactttcattatcccatttaattcccagaattcctttatggcctcatcaatttctgtattttacaataggaaattgagtctcagagaggtaggcaacttaccctgagtctcttcacaagtaaatgctcaagtgtgacacttcactggtgggtcataaccttctagaatccaatatcataaacacagagtgagagaaagaagagtcctgatactttccagagggtaaaacaatttttttattctcattagagaacatatagtcacatgaattgtgaaaacgtaagtcatggttttatttgttcagtgacagtgtggagaatgacatcaagctagaaaaagaatataaaggaaaatcatgagtgtttcaatcttgctcataaagagagacctatcgttaccaaatccaggcaacctgaacccacccttcctgcaaaagttttatccacactagaattttgaatgggagacaaaaagataagctataggatttataatatggagaaggtgaatttcgtcacagggaaaggcccaggtctgaaaaatatttagtccctgcgctaggctggaaacagccacctaaagtccaggtcctaatctctggaaactgtaaatgtttctctatttggaaaaatggtgtttttttttttttttccccctagatgtgattaagttaaaaatcttggaatgggagtttatcctgtattatctgggttggggggggcgcggggggggtcctaaatgcaattataaatgtccttataagagaaaagcagaaggagatgtgacacatccacagagaaggcgatatgaaggcacgggcagatactggagtgatacaaccataagccaaggaatgccagcagtcaggagaatctagagaggcaaggaacggattatcccttagagcctttggagtgggtgtggccctgtcaataacttaattttagcccagtgaaattgatttcaggctcctgacctcccaaactgcgagagaataaatttctgttgctttaagccacttggtttgtggtaatttgttgcaggaatcacaggaaacgaatacagtgctcctgtgttgttatccaggtctcagcttactgtcatctcctttcccttccatttggaagccccaagaagagtttcttttttttttttttttttgagacagagtatcgctctgtctcccaggctggagtgcagtggcctgatcttgatcttggctcactacaacctccacctcccgggttcaagcgattctcctgcctcagcctcctgagtagctgggactacaggcgtctgccaccactcccggccaatttttgtatttttagtagagacagggtttcaccatattggccaggttggtcttgaactcctgacctcgtgatccgcccgccttggcctcccaaagtgctgggattacaggcgtgagccactgcacccggccaagaagagtttctaaaaacatcccaggctgggtacagtggcttatgcctgtaatcccagcactttgggaggcctggctgcactctggctcaacaaactgagctatcacttccatctgactttttcagcaaataagagatagccaatcctagaatcatagaaagctcgaccgaaaaggatcttaaagatccatttgttcaaactcctcattatttatagacaaggatgctagccccagagaaggagagggtcacatacacaggttatagatgagtgacagagttgtaattaactggatcctagatctgacttcaaatccagtgttggttctaccgcatgtcacactgaccaaagtcatgggtgttgctgtggtctaaggtgctgaccaaattttagaaacttgggaataaggggaatggagaaatggatcacaaacctcctgaaagctatagtgccccagggtagtcatttgtctttttttttttttttttttttttttttttgatatggagttttgctgttttgcccaggctggagtggagtggcgcgatcctcgctcactgcaacctccgccttccggtttcaagcgattctccggcctcagccttccgagtagccgggatttacaggcacccgccaccacccctggctaatttttgtatttttagtaaagacggggtttcaccatgttggccaggttggtctctatctcttaacctcaggtgatccacgcacctcaacctcccaaagtgttgggattacaggcgtgagccaccgcgcccaaccagggtattcattcttacccaagacattctacagggctgacaggggtaaagcttccggtttgagatggagactgaagggaccatgattgtgtaaccacatcccaaattgggaggagagaagtgtcatgaattcctagaactgacgggatttcaggaaacctcaagagtgacagcatcggaaaatgcaagaggttttaaaaaaaaaagagtggaagttttggacaaataaatgtgagttgtgtcttatacaatcaacaagtaactggtttgggaaactcaatatccctaaataagggagcagaccacccctcatattgtcttatgcccaatttctgcctcaaagaaaatgtaggagttaaaagaaagacagaagtgaaatcagtagtcagacagcccggcgatgcattccaggcctggtaattaaagatcgacccctcctgacctaaccggttatattatctatagattccagacattgtatggaaaagcattgtgaaaatccctgtcctgttctgttccgttctgattaccggtgcaccggtaatcagtcacgtaccccctgcttgctcaatcaatcacgaccctctcacgcggacccccttagagttgtaagctcttaaaagggacaggaattgctcactcggggagctccgtttttgagaagtgagtcagctgacgctcccggccgaataaagctccttccttctttaacccggtgtctgaggagttttgtctgcggcttgtcctgctaggtaataatggtaaaggctgaacatttctcatgcttaccctgccttcatacttaataaggttgttgaaaaaaatgaatgagagaatgcattttaaatgctccgtacagtactagtacacaataagtgctcaatacatgctagctgttattattaaaacattaattaataacagtagtaacaacagccactgactttaagacacgttgatcagtgttgccgaaaccgtacatccgaagttgctcttcggccgcgtttcgctgcccattgcattcaggggcttgtagtccggaagtgagaggctgatttctcagcgcgcaggcgcagtggcgcggattcccggaagaacccgcagcagctcccaggatgaactggttgcagtggctgctgctgctgcgggggcgctgagaggacacgagctctatgcctttccggctgctcatcccgctcggcctcctgtgcgcgctgctgcctcagcaccatggtgcgccaggtcccgacggctccgcgccagatcccgcccactacaggtgaactgtgacccgccctttcgcagttggggaatgggaagcgtgaacccggtcctttccctttccgtccatcccagaccccgacttgctccgacacagccgctaggtcccagggagaaatcagctagtgattcccactttccgccctgtatcttgttcttcccccgcttgtttttgtgttcttgccccatgcctgatttctcgtcccccacccagggagcgagtcaaggccatgttctaccacgcctacgacagctacctggagaatgcctttcccttcgatgagctgcgacctctcacctgtgacgggcacgacacctggggcaggtagtgcgagcggaggggcaaggggcggccagggtctgactctctgggcctcggcgggcgggtcagctggggctggtggcttcatggtctcctcaccggcaccagaaagctcccagctgagctagagccgcgctccccgcaattcttactatcacctccaggatccacttagcctctcgcagtgaaaaaaaaagtcctggattagccgggtgggctggatcgctgagctcagccccagcagtaacaggcatcagctgtggggacataggcaatttctggagtaacgagataccgtggaagggctccaagaattagaaaacccacccctttcattatgtaggtgggcattcagatccaggaaggagtgtgacactcctaaaacttaagtctttgtagttggtgtgccccgtgcctgaaatacactccccattttcctcccatcactggctgctgcttgtcattcagatctcagctcagtatcttaatacccctacgagttaggtgccattatccctgttttacacacgaatgtgctaaggtcgggagaaattaaactcaaaacttgtgatggtttttatttttttaagttgaaacaaagtaaatacaaatgg

SEQ ID NO: 9102 - DNA, 6000 bp, Homo sapiens
agatgcccagcaaatataccatttattgtctgaggtggaaatcaccctccatgagagagaaggccaaagctcccctgtaatcgatgatgactaagccctgcaaagccgagaatggcaggctggggattagaactcatgtctttggctcatgtccactctctgtgcagcgccctgccctcacccccctcccccgagaacgaacaccacccctgggcaacccaggtgtccccactctgacacagtaaaagctggaccgtcatctggtccaggtagcctcgtcctgggggaggcctttctccatttggacattttcctgtgtatttagggagagtgacaaactgcagaccaacttatcaggttaattatgcttttaaaaacatcgcagacgaggagcaaagtgatggggaggctaaatgaggaactcggtggtggctgagtctggcattctttgcccttctttgggtctgcaggtgggagtttctgccctttcctgggcctctcctttctggacaacccgagagacagatcaccttaaaacacagccttcatcctgtacctgccctaagccttcagtggctccccatcttctaccttctcacctacaaacatcctgtcccacatacactgggtgattcccgcacgagaggaagaactgcttcagtggtcccggctgagccagaaggaccactgctcttcctcatctcccacccttcctcacctccctcccatcctccccatactccaccccaatccctgccctgagtcaattgctcacagccaagttccaaacactaactgcactctgaccgggaagggcagagaactgcaggggaaatgatccatggattagcacagcatttgcttctccaagctgtggccaccctctgggctcattttctgcttctaaacaactctataccacagaatctcaactaccaccatgacgggtcttcaacatgctgcccttgatttaaaagacaaccgcaacaactgtaaaactgtctcccttatccctgtaaaatttgctcttgctgcttttgtgtattccaaccaactgcgatgtggaccgtcaccgatcaacaagggataaagggaatctagatgcatctagattccaggcactgtgctaggtgccaggcaaacacatgtgaatgaaacacagtccttcaacttctatgagctcagcagaatgtgtgaatgggaggctccggtgactacagtaataggctctgtgccaagtggcaaaggaaccacatggagactcgcggctgggtttgggagcagaagagtgggcaaaccgtaaaggagggtgaatttaagattttaaaaaagccatagtccaaattctaaaatagtaaaagctgaaaaataggcatattctatgacccagcaaatctactcctgagtatatattcaacagaaatatgggcaccaagaagaacatgcaggaatattcatgacaacactattcataagatcccaaatgagaaaccgcccaaatgtccatcaacagggaaatggataagtaggttgtggaatattcttacaatggaatgaatgatctataactacacacaatgtgggtgaacctcaaatacgtaattcgagcaaaacacagacacagaagattatattctatataattctatgtatatgaaatacaaaaccaggcaaaactaatctatggcatgggactcagaaaagtggtcagcataggggagggaattgtggcgtgaagaggccatgaggagcttggagtgtgctgtcatgctcagtttcctaatctaggtgcaggttacaatggtgtatttggtttgtaaaaatacataatgctgggccgggtgtggtggctcatgcctgtaatcccagcactttgggaggccgaggcgggtggatcacgagatcaggagatccagaccatcctggctaacacggtgaaaccccatctctactaaaaatacaaaaaattggccgagtgtggtagcccatgcctgtggtctcagctactcgggaggctgaggcaggagaatcgcttgaacctggaagccgggggttgcagtgagccgagatggcgccaccgcactccagcctgggtgacagagtgagactccatctaaaaaaaaaaaaaaaccataatgctggacattgcaaatatgtgcacctttgtgtggatctcagacttgaataaaaagaaaaaattaagtatgtctattgtcttagtccattcaggttgctataataaaatatcataaactgggtggcttataaacaccacacatttatttctcactgttctggaggctggcaagtccaagatcaaggtgccagcagattgggtgtctggtgagaacccactttgtggttcatagatggccatctttcactgtgtgcccacatggcagaagggacaagggagtactctcaggcctctattataagggcactaatcccaatcataagggcttcacccatatgacctaatcacctcccaaagatccacctccattaccattacctcgggggtgagaatttcaacatatgagttgttgagggacacaagcattcagactgtaacagctgtttaggtagctacacagctaaataagtattattttccaaatcacatttcagcgatttctctaccattaggccatgggccagcaatggaacctggcttatccttcttgtgttcttcttttcctggcacaaatatggttggtaatcttgccaaacagtaatctccctggtatagttaatttggcctgctaggttatatccaaacgatcactgtattcacctataaatgctctcaaactggtccaaggtctaatcaaagctggaaattgatcaaataatgacccattcatgcattctagaattcagccattccctgttgcgtttttagaaactggcataattttctattatttacgcgatctagagaactatgtcatagacccctgcatcatagaacacccagatctgtggtctccatctcattcttcctgctttctcaaagatgatctacacacagttctatttcccagactatataatataatccactttatgtaacatagtgtaattcacttggccctggtctctcagttcttttgaagaaatgaatgttctcacactaattccttggtctgtttgtcgatctttacaggcagggagggaggatgcgaggcagcattgggtcggctccacattctccacatctgcttattgttttcttgccttgtttgcagcttccagagctcctccctgcttctgtagcaatttcagtcttccccattcctctgtgcctttgtaaacagccttttgttcactaacaagaggaatctgctgccacgtcagctctaaaccaacctcccaccattctctgggtaaagtcctgcttagaaagggaataggaagaagaggggtggagggggttggagatgattgtgtctagtgggaacaggcagggggatagtgcacagagttcacaatgggacaacgagcctgccgaggctgcactgccggcctggctgggtgaccttgagcctatctgggcctgtgagctcaccatgcaaaggagctggaccacagaattctgagtcctttctagctctaaacactgtggccctaagtatctatatgtgaaacaaaattgtcctgacatttgtctctgggtactgaactattaggagattttgattttttcatctccattttgcaaacagtctgtactaagattacactactgtgtttctgttttgtgtgtattcagaagcacaaaaagtctgtggttctagaaaggaaatagaaaagttcttaaaaaaaaaaaagtggggaagtgaaacaaatgttaaagtcagaggagaaagaaaggcccaaccggaggccccaaatccacccagagcccagaagcccgggtttcccaccgaccggctgcggtctttgtcagctctctggcgctatctgctgtccttctcgataacaaccgtttaatttggtttgcaaaattgctctgacgcaaatccaccgtgaacactgacggggtcacattcagcataaaaatcgcattctgtttacaggaaaatctggccccatacttgctcccatattcacttttgactttgccttgcagtactaactgtaacagggacacctgagcaagtcccttctgtataaggcccaaaatggtcacccaataccaatgagtctcttgctttggaaagcccaggaatgcacctccagccccttctgcgcagcgctcggacaccatgtagaggagaaggcactctgcagaactcgccctcagcccgcaccacctgtccaggggactggctgcgtgtcaatgtgtctctgctcccggggttcccgcagatctttaacttattggcctttgggctaattcagtccttcaagcattcctcgcccaacatgccaggaagtcttctcacgtgtcttccaccccatacctaccagttctgttttcccactacccgatgaaagtgtaaccgccccccggcgccccccccccccaccaccacacacacaccctgttggtcccatcctcagggcgtggtggtccaggtgaacgcttgccctctttttgagctgaacctccccacagaggctgtcagcaaagactgctttgctgtccaaggccggcctttaggtacaggacactatgcatgtccagcgaggcttgttgaagccacatctgtcatagatattgatgggaaaagcattttccttctaacacatctcattccaattctaaaaggcacctctgaagccttgctgaacttcatcaagattttcacgtggtttccttagtaaagtgtgatgagaaggtccatccttctcaggatgaaggagtggtccaggaagccctgattggtctgccggggagggaagggctgccttatttggagacctgcaggaatgccacctcccccggcagctcctatatagctgggcggacctggctgccaagagggtgtgctgggggactgtgcagctcgaggctccagaggcacactccagagagagccaaggtacgtggggggccacttctgtggtcaggactgctggtttcttatcaaggctcgatcccagattgaaaatcatgcaatgatttctttactcccacacctggggatgggtcccaagttcagggtagacttgcgaggatacccagtcatcactgggcttgcctttctctaagttggtgctataataaaatgctactttagggtttgtgggttgggattttgttttgcctttaagcttctgcctatgaaaactaatctctttctcaagaatgctgtgcttttattttttttatttgactcacctgaaatgatctattatgccattaatcttatttaagatttctccttaaaaaaggaatgatgtggagtatggccctatttaggagactaatgaatatttgcttcatgcttggatctctttggagaaagtcagtctgagttcactgtgctcaggaggcagagagagtggggtgagggggtccagatgctcatagccaccctgggacaaagacgaggcgatgtctacaagcaaggaaaggtcagtgaggcctctttgcaggcttctagagatgactggatgtgcttctagagatcacttcagctgtgttttgccttttttttttaatataaggagcaatgtggcatcagagttgaacattttatcagaggaacattagccacttttagggaagctgcagcagggtggtggagggtgtgtgaggggcgaaacaagctccctgtcagcctcctccagctctggggccccatggcctcacagtaagtctttgcctaggagacagcttaggcaagctccggtatgggaactccttccatttccctaatccacacaggcaaagacccaggtgctagaatgccctgacagtcggccttgggaagtggatttccttgatggctattgtagattcaggagccgaatgtgacaggcaacctt

SEQ ID NO: 9103 - DNA, 6000 bp, Homo sapiens
cctgttacgcaattttttatctcaaaatgccgaacgagaaaactgtccattttctgagacccccagaaaggaaactgaccctcagcagctgcctgattgttacgcgaatctagctttaacggaagcaaattcattattttttaaatgcagtggacttttcaaaaagtttaaattaggcaaagcagctttagcctcatagaatattatttctttggactcaagctgaaatacaagccttacattgccttatgctttatttctttctaatttttatatgtatatagatgagggttccttaatggttgtgagcattgtgtggaattttacacctggcctgcgtggcagcctcttccagttgaggtgttttatgtcacgcacactccatcccagtgtacaaaacctgcttctcttctcaaccgtggcagctcccgctggctcctatgccctgccctaaagggctcttgagcctctgggaatgggaggggccaagagaaggaaaaccctgtctttagcaccctttaaaagaactgtgccccccttctcagtgctgcctttgcatgggcctggcccggctcacattcgtcagtgactccaaccctcctgcttgctgtacttgggatgaaacgaccccacaggtcaggtggagggtggggcgtgggcatcagccaggattgccgttacagtctttttctcaggagctacaaagatctcttcctgttactaaatagtcgcaccccagcagcctctctcgcacaccggggccctgcatgtcagatggcgtggtctgcagggggagctctgtgccttagtggctcttggcaggacactgagggcctgcctgtggtgtgcccggctctgccactcccgggaggggaagggctgctcagctcaaggtgtcctgttcggtagagcaagtgtcctctgacagccgtgtccccggacagttcagacacccttggggatggcactccacacacgacagagatgcaggggccagggaagcccagcgctcggtgcccttcgtccagggttaaaatcggcctgtggggtgtggtgagaaggcaggttgtgcgggtgttgaccgatgtatcttttccttaaagttattataataatgggtaatttgtcaataaagcattcctttgggggaaagtccgcctcggcttgtgtgatgtatcgttcgggaccatgataagagtggtaaatgaactggcacacggtacctgccctaatgagtccgcacccttgggagaggcaggcaggggacagtgctaaagacaaagggcaggtcctcaatgctgggacaaggggagccagctgtgaggggagaatggtatatggccaacctgtgaggtcagacccagcgtcttgggaagaggagttgaaactgagccccaggaggcggaggaggagctcaccaggctccaggttgggccgggagctccagaggcttcgccagctgcccctgcaagcactgagctgctgctgagcacacctgtagtccccgccattctggagggtgaggcagatcacctgagcccaggagttcaggaccagcctgggcagcataccgggattccatctcaactaaaaacagtaggctgggtgtggtggctcatgtctgtaagctcaggactttggaaggccaagatgggaggatcacttgagcctgggagtttgacaccagcttgagcatcgtagccaggccctgactctacaaaaaagtgaaataattagccgagtgtggtggttcacacctgtaatcccagctgctcaggaggctgaggtaggagaatcatttgaacccgggaggtggaggttgcagttagccgagatcacgccattgcactccggcctgggcgataaagcgagactctgtctcaaaaaaaaaaaaaaaaaagaaaaagaaaaaggaaaagacccttgagggggaacctccactctgcccctggtctggcgctttgcatgtatccattcctagtctttggagttcccactggaaaactagtgggagcaccagtcttcctttggaggtcagaggtagctgggctcaccccagatgtaagagcagggaaagttaggtgacctcgaattgtatggtacataagccccaatacagcagggagctggtaccaataaagggtgaaatgcactattgccgcctgcagtcaagatttacactaatttattttggaatgagttcatgtgttcttcatttattgaacagatactgtaactgccctgcgggtaagagtctgctaggttttgtggggtacaagggtgaatctgatgtggacccagtgctcaaggactttgcaacccgtttgttggggaagacagattcccctaagtcactggcttgtgtttgacgaggtgaagcgcttggagagcttcgaggatggagcaagtggagtaagtggacctgaggagcgggcagcaatgcctgaaggctcagtcccctcttctcagagtgagggtaatggtatctgcctcatcatattgaaaggcttaaccttataaagcacttagcacagggcctgatgtatcagaggtaaacatcagactcttcccaactgtagccactgtcaactttcctgtcttcttttttttttttgagacagggtctcactctgtcgctcaggctggagtgcagtggtgcaatctcagctcactgcaacctccacctcctgggctcaagcgatgctcctgcctcagcctcgcgagcagatgggatttacaggggcatgccaccacgcccagctaatttttgtatttttagtagagacagggttttgccatgttggccaggctggtcttgaacgcctgacctcaggtgatccgcccaccccggcctcccaaagtgctgggattacaggtgtgagccactgtgcccgggcgtaccttcctgtcttattttctccaagcaggctggaatgttcatggatagatatatgtgtgataatatactttttacatatcatgcatcgtgctcattttagtttcaggagttctttgctcctgtgtagcctttctacacattatctttctttttttcttctttttaaataagagatggggtcttgctctgtcacccaggcaggaatgcagtggcacaatcatggctcactacagccttgacttcccacccgatccagcctcctgagtagctgggactacaggggcatgcatgccactgtggccgggccaattaaaaaaatttttttttatagagatggtggtctcactatgttgtccaggcaggtctcaaactcctgggctccagtgatcttcctgccttggtctaccaaagtgctgagattccaggcgtgagccatgggtcccgttgtatacatttcagtaactatattattccatttgagtgctcacttgtgcagttgggcaggtttccattctcgctattaaaaatagtgccttcatgaatatttcagtgcatatacctttttctgtatttaggaatattttctttggaagaatgtccctaaagtggaactgctaggtctcagagggactcacttaaggctggttcattcattcttgcagctcccagcacaagtggaatatagcttcaatctgagatcggtaccaggcccatttcattctctcatccctccaattctggcctgaaatatttcattctcttggaatctatagttgtagatatgaacctggcctttctgcttcttgggttccataggccttttcttgctgcctgcttgatgttgcgcagcttaatgactgctaggaggcttcccaagctctgacacttccaggctgtgagactggaacaagcttggcaattcaagaccggcattatggcagtgagttatgagggcagaggaaggaggccagagcgtgttgagagagaatttgggtttcacgcagtgtgtcacgggaagccttggatgctactgggtttgttttaaaaagatgaccgcactgaactcaggtaaacgggcaagggtggaagcgaggaggcaggagcaccggccgcagaggtctgggagcttctaggatgggaagtggcccaggcagcctacgcggggcaggccgtcagtgagtggcggagcgcctgcagttacagggacagggaagggtggccgacgggatgggcaagggcagagggaggtggagtggacgttcgtggtcctgcctctccacgctgctgtttggagatgattccgggagggtgggagggcgctggcgacggcatttcagtggttggacaggaaggaaggaaggacgtcccatctcggcgctccagggttgagcaaatgtcagtcccaggacggtggctccgggtgggggcgggggcgacggtccgcagccgtctcccaccagctccctgttcagttctttgatgagaacgattacgttttctcagtcttacttaaagcgctgagtaaactcacctgcaagaccagcaagccctgcgcttctctttctgcgcggttccccgcagcacatggcgtgtccacccgggacccacctgcggccacctgaagactgggaggactggctccgcccccgcgcttcgtccccgcccactcatgggcggagcctccacagggcgcctcggccccgggctgtcactcgggactccgccccttcatggacggagcctccgctcggctctctgagcgcatgcgcagccggtcccacccgcggctccgacacgccggagcccacgtccttccgggagcgcgcgcgccggtgcgggtgcgtgcgtgagcgtgctcgtctccgctgccgctgccgctgccgctgccggtgccgcacccgcgccctctgccgccgccgccgccgccgcccggggtctccaggctgaggagtgcgtcggccgctgcccagcagcgccgcgaatcggggagcggagccgcggagccggcgggagggcgggcgggcgggcggacgggcaggtgagctcgctgcgggtcgggcgggcggatcggcccacgtcaggcccgggcaggcgggcgggcgggcgcgggtggggggcgggggcggcactccagagccggaaatggcggcgacccccgggccggggctgcgcgggcgctcggggccggagctgctgcgacgccgcggcctgggccggggcgggggcgcgggaaggtcggcgccggggcctgcgggagccgggccgggccgggccgggggtctgagcaccgtggtgggggctggggcggcgctctccgcgggtctcttcgggcccggacgccccctccgctcccccaggtccccgcggccgcccccaaccccccggggtctcctctcctgcggggggactggagaagctgggccatcgctggtcttagggaggcagataatttagtccctgggtcgttgtgtttatagctcggggaattgaaaattgttctgtaacgcatcgtaaattaatctttccgacgttgtaaattccaaaaagcatttggtttgttagaaaaaacctgttttctccgctttataaaaacatttgaagccatgctttatattgaactcttaaggagagtattaggaactcgtccgttcaggttctaacttgttggtgttaagtgtctggattaaagactctctttttcgtgtgccgaagccatgatttctcaaattcattcagttgtgtcatacaggaaaaggaagcaaaaatttcagctttatttttgttttccggcttaggcttggttgggaagatttgatggtggttagacacgtctgcccttatttgcctgtttagaaaaacctattctaatgacaaaaacagttacattgctcccactattgtcatggttacctgaaggcaaaagtttactcaaagcttctgagattttatgttcgtttatttgcttctctttttaaaaaaatgtcagctgagtttcaggaatgagtagtctgtcaaacaagagatgaaattagaagcctggatctaagggctttggggaagtttcggttgagttcccctttcacttgtgtcggtgctgtagg

SEQ ID NO: 9104 - DNA, 6000 bp, Homo sapiens
caggctacagtgtggtggcacgatcatggctcactgcagcctcgagcttctgggctcagccatcctcttatctcaacctcctgtgtcactaggaccacagacatgagccaccatgcctatttaacttaaaaacaaaaacaaaaaaccgggcacggtggctcatgcctgtaatcgcagcactttgggaggccgagggggggattgactgaggccaggagtccgtgaccagcctggacaacatggcaaaaccctgtctctaaaaatacaaaaattagctgggtgcagtggtgcgtgcctgtagtcccgtgcctgcggcatgggaatgggttgagcctgggaggcggaggttgcagtgagttgatgacttaggatttttcttctcggtcactttgcaagccggggacccctggccagtgatgccccacctgggccctgcttggccacactggcgtgccccaactcacctgtgttatagcttgtactgtgttcggccattcccgagctcatgtaccgcactcaagatcaaggatacactggacattgaagggtgaggagggcggagaagaactttattgagcagtgaaacagctttcagcggaccaggggatgcaggggtggttcccctacctgaaggcaggaaagtccgcctgtgtggctgggtctggggctttttatggactcaggatgcggagtgcttgcagagcttgctgatgggtttgtgagtatgcagaaaaggttaaagtgggcatgacagtgtagaaaaccaattataagaggccgggcacggtggctcacgcctgtaatcccagcactttaggaggctgaggcagacggatcacaaggtcaggagttcaagaccatcctggtcaatgtggtgaaaccccatctctactaaaaatacaaaaattacctgggcgtggttcgcgtgcctgtagtcccagtgacttgggaggctgaagcagaagaatcgcttgaacccgggaggcagagattgcagtgaactgaggtcacaccactgcactccagcctgggcaaacagagcgagactccacctcaaaaataaaaattaggaaagggtaggtatgtgtaaaataggtgaaggatggggatcaatcagaggaaagtgtggcaaacaggaaggcaagttcttcatctagtctgaggatttaacttgtagctcagctgtcaggctttaaactgtctttggcttggaggtgggtttcaccgggaacccgccccatctgcctggcattcagctgcctcctgccagtatcaccgagatcgcgtcaccgcactccagcctgggcaacaaagcgagactatctcaaaaccccatattgatgtcatttcctaaatatttggttaaaaaaaaaatctgggcctggaattttatctggttttttttttttttttttttgagacggagtctcgctgtgtcgcccaggctggagtgcagtggtgcgatctctgctcactgcaagctccgccttccgggttaacgtcattctcctgcctcagcctcccgagtagctgggactacaggtgcctgccaccacttccggctaatttttttgtatttttattagagatggggtttcactgtgttagccaggatggtctcaatctcctgatctcgtgatctgcccgccttggcctcccaaagtgctgggattacaggcgtgagccacggcgcctggccttctggggattttttattacaaatataactttattaacagatgcaggcctattcagattttctatttcatgtcagtcttggtaaattgtaattttcaagatatttgtccatttcatctaatttttctaatttcttggcatgaagttgttcgtattttatccttttcacgcctctaggatctgtagtgatgtctttcctcatgttgctcaaagaaccaactcttttggctttgttgaagttatctgtttgttttcatggatttctgttccttatgatttccttgcttgcatttatgttgggtttatcctgttactttgtagcttcctgaggcggagccttaggccttgattaacgtgttgtactagtcagcattctgcagaggaacgttgccattatctgtgtctctttctaaaggagatttgttatgaggaattggcccacgtcattatggagacggaatctcatgctctgccatttgctgaagattgaggaaagcagtgggataataacagtccaaggacaggaggagacacgtggccccgctcaggctggcaggcgagaaggaaaacccaggccaactcctcctcccacccctttctattcgggacccccgtggactgggacgacactcacctgcacagggcagcgcagttggcttcatggagcccccagctcaggtgctgctcttaccaagaaacaccctcccaggcacaccctgaagtcatgtttcatctgggtgccccacgatgcagcaaaggagacatgaaattaaccgtcatgtacactgtatttattattcaattcaaaacattttctaagttcccctgggatttcttctttgagctacatgttagccggaggtgtgttgttgaatatcaagagtatcttcctcctgggtttccagtttgtagctaagtcagggatagtgctgtgtgtgacctcattccattacgtttattgaaaccagcttgaagccctaacatgtggcttgtcttagtgtacagcattcagttaaaaacaatgtgtgttctctagatgttgggtgttctgtgactgtcacgtcatggtggttgattagttagaaacaatgtagaaacaatgtgtatttgccaggcgctgtggctcacacctataaccccagcactgtgggaggctgaggcaggcggatcacctgaggtcgggagttcagcctgaggtcgggaattcaagaccagcctggccaacatggagaaaccccatctctactaaaaataccaaaattagctgggtgtggtggcacatgcctgtaatcccagctactcctgtgtgaggctgaggcaggagcattgcttgaaccggggaggcggaggttgtggtgagccgagatcgtgccattgcactccagcctgggcaacaagagcaaaactgtccccccccccaaaaaagaaagaaagaaactgtgtgttctctagatgttgggtgttctgtgaagatcaggtcatggtggttgatagtgttgttcagaacatcgatgtttttcctgatttttggtctgttctgtcgatttctgagaaagtattaaaattaaagttgggtcttgcatttttatccattctgtcagtcccttactttaattggagttttttgtccactaacattgaatttaattgttgatatgtttggatttagatcttccaactaattttctatttgtttcctgtgttgagttactttttcatttttcttgtaactttttagcttatacctctttgcattttttatgcagaggttgctgtaaggattacaatatgcatgtttattttaattaattaatttattttgtttatttatatatttgtttttaaggaacagggtccctgtctcctgggctccagtgcagtggagtgatcatagctcactgcagcctcaaactcctgggctcaagcggtcctcccgcctcagcctcccaaaatgctgggactacaggtgtgagcccctgtgccggcccacagtacacagctgcagttcttcaggatctcttggggtggccgtattctgccgtctcacacttctccatgccatggcgtctgtctgtgcacgtggcaaactccacaaggcagtgttggattcttttgctttgaacggtcttatggaataaagtccatcagctctgcccttggtactttcatctatactttgtgatactttctttttattttttcttctagaatagcctaacatggcagaccagagacagcgctcactgtctacctctggggagtcattgtaccacgtccttgggttggacaagaacgcaacctcagatgacattaaaaagtcctatcggtaagtggacaagtgtggcccccacatccccccaggaagacacacatgccccgtgtggtttagtctgcattttaccaagaaccattgcacatactttatcctggccgactcagcgttgaactggtcacagctcggtaacacctttgtatgtgtaatgtgctccttatagcttaaagttatggtattcatgttctcttgccaacaaaaaatagcacttagtagaaactgacacactgtccacagttccatagggagtcagggtctgaacctgtttgaggcctcacaggagccgcagagcgctggcatggtcctgtggtctccttgttttagcacagtgatgacagagacccctcactctgttgtggccttctgattgagcttgaagaactgcactcttgggtacagtttcattgagtaacctgtaagagacaccatcactaatccagacaattcagatagtcctcctctcgtgtgctagcatcgtgtagttcataaaacacttcttaaagtgccatcattacgccccgccgtgcttaccgttcacttggcacttgtgcagttagcggctgggacaccagggctggccttggtgccgctgaacttagatgtgccgtggcactcacagcccttggggctccctcctctgaggctgggtcagggtgaggaggtttacctgaaacaaccgcggagcttgcttttgtccctggcccctgcagccctggagagtcggacagtgaggtggcctgggtggacctgccttccactgcacccggcagtgcgtgcgggtgggatggacgcggcggcgggtgcgggtggaacaaagtccagggtagagccaggacatggttttggtttgcaggaagcttgccttgaaatatcaccccgacaagaaccccgacaacccggaggccgcggacaagtttaaggagatcaacaacgcgcacgccatcctcacggacgccacaaaaaggaacatctacgacaagtacggctcgctgggtctctacgtggccgagcagtttggggaagagaacgtgaacacctacttcgtgctgtccagctggtgggccaaggtgagggcgagctgcctgccgtgcgggcacccgagtcactcctgccgtgcgggcacccgagtctctcctgccgtgcgggcacccgagtcactcctgccgtgcgggcacccgagtctctcctgccgtgcgggcacccgagtctctcctgccgtgcgggcacccgagtcactcctgccgtgcgggcgcccgagtcactcctgccgtgcgggcacccgagtctctcctgccatgtgggcacccgggtcactccacgcctgcagggttcccagcattgcagagcccatgcgttgatgccagcaactctacactcctgagaaaaggcttctgggcatatggagcctttctcctcacctgtgtgatgggcgaagctctgtcactggcttggtgtcctgcctggaacaagccatagcgtacagattgtcccagggaagagccgtgcggagccgccagggtttcttctgtaaatggctcccagtccttcgtgagacaggaggaaataagcctcgatgttacatccgcatttcttcgtttcctcgttttgttccaaatgtcatatatgaggccagagggttggaatcactgcatggcatttgtgagaagcctgtatttggctttgactggtcggcctcctcactagaatccttataaagtactttttatttagttaatgttagacagagtctcgctctgttgcccagactggagtgctgtggtgagatcctggctcactttaactttgaattcctgggttcaagtgatcctcccacttcagctccagaactgcaggagttgaggcgtgaaccactgtgcccagcctggaggctgctttgttttttttttgagacggagtctcgctctgtttcccaggctggagtgcagtggcgcgatcttggctcactgcaa

SEQ ID NO: 9105 - DNA, 6000 bp, Homo sapiens
aggcgcctaccaccatacctggctaattttttttggtattttttgtagagacggggtttcacgacgttacccaggatggtctcgatctcctgacctcgtgatccacccgcctcggcctcccaaagtgctgggattacaggcatgaaccaccgtgcccggcctttttttttttttttggtagatggagtctcgctctgtcgcccaggctggagtgtggtggcgtgatcttggctcactgcagcctccacctccctagttcaaacgattcttctgcttcagcctgctgagtagctgggattacaggcacctgccaccacgccctgctaatttctgtatttttagcagagatggggtttcactgtgttgcccaggctggtctcaaactcctgacctcaggtgatctgccctcctcggcctaccaaaatgttgggattacaggtgtgaaccaccacgcccggccagagtgtgtagcttttgtaaaagttttggaaatggcctcagataatttcagaggtttttaaataaagaacgctcaaaatggagcaaaatggagagcccctgataggcctcctgcgtggaggtttgcagtaagccagaggcacctgtgggtcccagggagagacgggctgctccatggatgctcctgggacctggggcactgggtgggcctcaggcagataggagctggtccgtatctcttgccaagcccaggccaactcctgatgaagcagattcctgtgggtgacaagtgtcagaagatagaataggaccttagggtcaggaaggatttcttgaacaaaaaaggggaaaaacagattgagagattcagaaagctgtaatatattctgtgacctcaaaggtgacttggaggagggctgttgttcagcgacgggcgtgtagtgaacactggggcatttaaacggttcagatgctgaatttaatgttatatgttttttactacaattggtaaaaaaaaaaaaaaaagcttgtgctcatcaaaagacacaccataataagtaaaaaaagaactgtgaactggaagatacttgtaacatttttaaccagtgaagggtcggtgtcctggatatgtccactgggcaccacagacagaacggccttgaaggtaggctggagacgcctacccttatcaggccaggcaagcactggggagcctggccgtaccagtcattgttgaggctgcaggaatggcagggagccctaagttccagtggccactggtgcagtcctcagagagcagttggcacaccgcctcaggctgagcctgcccattcttgggcacccagaagttccactcttaggtatacaccagaagaattcttcctcgactgtttgtgctgaaggacaaggtttaagtttttaaaatttccagtgtcacagactgatgatatttttgtaaactacaacaaaagtgactagctagtaaaggaaatcacagaacataaaatacaaacccatgtcattattattaatattttgaggcagagtctcgctttgtcactcagactggagggcagtggtgcgatctcggctcactgcaacctctgcctcctgggttcaagcgattttcctgcctcagcctcccaagtagctgggattacaggcgtgcaccaccatgcctggctaattatgcctggctaatttttgtatttttagtagagatggggttttgccgtgttggtcaggctggtctcaaactcctggcctcaagcaatctgcattcctcagcctccaaaagtgctaggattccgggcatgagccatcatgcctggttatcgggggaacccgcccccaatatttcaatgtaggttctttctattttccataagtgtcggccagctgagaaataaagagaaagagtacaaagagaggaattttacagctgggccccccgggtgacatcacatatcggtagggccgcgatgcccgcctgagccacaaaacaagcaagttttattaaggatttcagaaggggagggggtgcaagaacagggagtaggtcacaagatcacatgcttcaaagggcaaaaaggagaacaaagatcacaaggcaaagggcaaaagtggaactcctgataagggtctgtgttcagcggtgcatgtattgtcttgataaacatcttaaacaacagaaaacagggttccagagcagagaaccagtctgaccaaaaatttaccagggtggggtttcccaatcctagtaagcctgagggtactgcaggagaccagggcgtatttcagtccttatctcaaccacataagacaggcactcccagagcagccttctgtagacctccccccaggaatgcattcctttcccagagtattaattcttgctaggaaaagaatttagtgatatcttccctacttgcacgtccgcttataggctctctgcaagaagaaaaatatggctgtattttgcctgaccacacaggcagtcagaccttatggttgtcttcccttgttccctgaaaatcacgattattctgttctttttcaaggtgtactgatttcatattgttcaaacgcacgttttacagtttgtacagttaacacaattatagtggccctgaggtgatgtacatcctcagtttatgaagataacaggattaagagattaaagtaagacaggcttaagaaattatcaaagtattatttggaaactggtaaatgtccatgaaatcttcacaatttatgttcctttgccacagctccagccggtccatctgttcagggtccctgacttcccacaacacctggcttctattacttttttaaaattagcttttttctttttttcgagatggagtctcactctgttgcccaggctggaatacatggtgtgatcttggctcactgcagccgccgcctcctgggttcaagcgattctcttgcctcagcctctcgagtaactgggactgcaggtgcaatacaaaaaatgcagaacttttgtattttctgtagagatggggtttcgctgtgttgtccaggctggtctcaaactcctgagctcaagtgacatgcccaccttggcctctcaaagttctgggattataggcatgagccactgcatccagccttattattattatttttttttgagatggagtcttgctctgtcgcccaggctggagtgcagtggcgcgatctcggctcactgcaacctctgcctcccggattcaagcgattttcctgcctcagcctcctgagtagctgggactacaggcatgcgccatcacaccgaggtaatttttgtattttttggcagagacagggtttcaccatgttgaccaggctggtcttgaactcctgacctcaagccatctgcccaccttggcctcccaaagttctgggattattttttaagcagttttgataggtgtgtacctagtagtgctctgtggtttaatttgcatttcccagggagtgggggcactgcctgtcttctcacgcctcagttgcttgttgctgtgacggtcgcccactcctcctgccagtgtctgtgctgctcacggtagctgcatcagcttcacgctgtccgcccttcgccacccaccgcgcctgctgctcaggaatgttccaagcaacttggtggtaacagaagctgagaacagcccagatgtccttcggtgcaagagtggatggatcagttgtggtctattcacagaatagaatgtgaccacactggagatgaatgaattgtagctacaatctgcagtgtagacgaatcttaggaacgtaggcgtttcagaagcagatcaagccaggcacgatgctgtgtgcctatagtcccagctactcagagcctgaaggtgggagatcacttcagcctgggagtttgaggccagcctgggcaacatagcaagaccctgtctcaaaggaaaaaaaaagcagattacagaaaagtaaatccagtgctaggccgtatttttaagctcaaaaaattaaaactaattagcgtttagggataaacatgaggtaattttttagaagcaagagaatagcattgaatttaaggtatatatggggaaaatgaaacttccaagttattgataattttccagtttttaaattagagacgggatcatggtgtttatgcgtcataatttatatgttccatatattttttgttgtttttttgagacggagtctcgctctgtcacccatgctggagtgcagtggcgcgatctcggctcacggcaagctctacctcccaggtttacaccattctccgcctcagcctcccgagtagctgggactacaggcgcccaccaccatgcctggctaatgtttttgtatttttgtagagacggggtttcactgtgttagccaggatggtctcgatctcctgaccttgtgacccgcccgccttggcctcccaaagtgctgggattacaggcgtgagccaccacgcccggctgatatgttccatatatttctttctgtatttcacataatacatagtaaaatatttaaaacagaacaaaaatagacttccttttaagatgttttcatatctgttcttacaaagttggccacagtttttccccaacagtagtttgagttcagcagcagctcttttataaaacgtttgctgcacacactgagattgcacctggaagtacagaaataagaacacacgtattttattttatttttttacccctgaagatctttaagtcttctgaggagcatggacctgctagactgcaagctgctgcattctgaggagcagggacctgctaaactgcaagctgccgcaggcggagatttttgcctgtttggtttattttgttaccactgagtccccagctctgagaacagagcgaggcatgtgatcgatgcatcgtaactgttgagcaaatgaatgctgagctgtgatggcaccgacgtgtccggggagaggacgcacccggctgtgtggacatgtgcccagggcccaggacagcgccacggaagaggacacacccggctgtgtggacatgtgcccagggcccgggacagcgccacggaagaggacgcacccggctgtgtgcacatgtgcccagggcccgggacagcgccacggaagaggacgcacccggctgtgtgcacatgtgcccagggcccgggacagcgccacggaagaggacgcacccggctgtgtgcacatgtgcccagggcccgggacagcgccacggaagaggacgcacccggctgtgtggacatgtgcccagggcccgggacagcgccacggaagaggacgcacaggacagcgccacggaagaggacgcacccggctgtgtgcacatgtgcccagggcccgggacagcgccacggaagaggacgcacccggctgtgtgcacatgtgcccagggcccgggacagcgccatggaagaggacgcacccggctgtgtgcacatgtgcccagggcccgggacagcgccacggaagaggacgcacccggctgtgtgcacatgtgcccagggcccgggacagcgccacggaagaggatgcacccggctgtgtggacatgtgcccagggcccgggacagcgccacggaagaggacgcacccggctgtgtggacatgtgcccagggcccgggacagcgccacggaagaggacgcacccggctgtgtggacatgtgcccagggcccgggacagcgccacggaagaggacgcacaggacagcgccacggaagaggacgcacccggctgtgtggcaggggaggttcccaagagcaggctcagggctctggggtctgagtgagggctctccagccagcagggagcagggcagggtgttgaagagacggcaggtgcgtcaggggctgacgtgggacccggcactctgtgctctgtgtctgcccgggaacaggtagtcctgcgtcggaccgggaagtgtggtgggtgtggtgggggaaggggctggcgtcagcagggctctcgtccgccaacgtctggtggggatgcccgccatgcgggggcctcaggctaca

SEQ ID NO: 9106 - DNA, 6000 bp, Homo sapiens; identical to SEQ ID NO: 957

SEQ ID NO: 9107 - DNA, 6000 bp, Homo sapiens
ggagcactaggagagggcagggagcaccaggagagggcagggagcactaggagagggcagggagcaccaggagagggcagggagctgggagcgcagccgagggcagggagttgagagcacagccgggggcagggagccaggcctggggatgcagtggggagcacctgggctctggtgaggctccaggaggccactctcatccatggggtgctcatgtctgtgaaggggcaggtgacactgctcacttgtgtggcctcttcgttttcccgcctcagaggaacggggtcggagggacgcaggccagactcaggtgagcagcaaagcatggggctcaggccccacagaaggggtgcgagtgacttggccccacagaggggctgagcccaggcccgactctcctgatagccccagaaggaacagcagccgggactcccgcagggccgggtgcactctgtctccagggggggccccatggcagggctggcagggaggggtgcttgggggccaccaggcggtgagcatgacccccgggtccacgggagggcgaggaggccttcccagactcacggaggctacaggacagagttactctccgcccgtcctggtggatgacagggaagtcaatgtggtgagaactgacagcattgagtctccggggccccagcgtttctgctcccacctgtcctgaaccctcctcagtcctctcctgggccccgtgactccttgcagacatgggtcctcactccagggaggggtgaggtggccgctggtgacaggcctgctctgggccaaccctcccttagcccttggacaggcatccgtccatctgtccacgtggtcactgtggcccaagagccaggcttcgcctgccaagcccagacctgccctcaaggactggcactgttggcaggtgggggacaggggaggccagcagagagcagacgcatgacgtttggtgtgaagagtgccaggaagacagtcgggcagagcaggtgggggagtgctgcccttccccgggcttcccctttctctcaggggtgctgggtgggacagagtttccacagagcacggtagggatgggcgaggcccagctgcaggagggggaggcccttgggggggatgggagcacaggcagggccccctgtccatgggctgagcccacagcgcgtcccagcactgggacctggggctggatgcctcctgcctcccacagccatctccttgggtgcggctcaggctcagctggtgccccgcaatgctcacctttactacaaaccctcggttaccatgggcaggtagacagcagtgagggagagagaaaaatcacccccagagccgtgctcccaggggagctgctttgcaccgtagccagtggcagcctggagttggtggtgacatggggagggtggggggcaggggctggtgtctgcaagggcctggttgtgtcccccagggtggggggcgggggctggtgtctgcaagggcctggtagtgtcccccaacctacccgcaagccccctagggcggctcaggccacagaaaagctgtgcccccaaatctggtctcactggactttgaatccagagtttttgtttcctttgaagcagcaatttcaggagcagcagaggcaagggccaggatgtggagtaggaatctaattcagcctcggtgattactgggttcccacaaccagcgctctccagcgggcgcaggtgggagggaggggctgtgcaaattaatgagttagacctgattaatcttgctgcattagcaaatccaaagggaaagccagtgaggttggacagatgtgtgtgagcgtgtgcactcggccgcagggctgtgtcaccagagccccgggcgtccagctgacccggcctggcccctggctccgggagagacaggcctgctggccctggctgagctctcagagtgaactcacctgcaggaatccaccagggagagccgccggcttgagaccgcttgaccctgtggaagcctgggcctgttttgttagaaaagtgaggaggagacagaaaaggcaaagctggcttagtctcagagcctctgctaggctcctgccgaggcccacggcctcttcccctgcaccaacgggggacaaattccagcccctgccccaggccaggacaccaggttcgggctgagccctggctgcggtggggaaccctgaccctccacatcagccctgggccaagtggctctaagctgacatttctccgggcactctggggccgcctgcatcagagctgccagcaatggctggtggaagccacagatttggaggcctcaccccagactgaacagtctctgagggtggagctccagaatctggagttaaacaaacgcccccacgcacggctgagtggacacccgtggcccttcagggattcacccagctcaccacacgccccccgctctgctgtgaccccagataatctccacaggaggcctcgattttaacaagtccagggggaaaccatgagcccaagtgcaggagcaggggtgtcctcttcccaaagaggtctttggtttgccacgggagggtgaggcacccacgagggtgtggaacccacgagtggacatcactttatcagcagaagagccccgtttcggccagctgccaagtcagagaaacgataaccccgtgtcacaggggctccagcagggaccgcagcacggctggcctctccactcacaaaagaatgtggatttggctctgccaatggcatttgctctgcgacaccacaggcaggggcttctcaccaaggtggggcctgaaccaaagggcagaggccagtctataccatgcgggaaccgctggccttgccacctctctgtccccttcctaagcagagagcctcatgggctgtgccgcagggagcgggggtggggttctgtgagtgggtcagaggtcagaggtcagcaggctgccctcacggggcctcgggggactttgctcttctcccctccctgtgtttaccagctgcttgctcagcccaaatatccatccagcttggaaccttctagttcctggcacagaactggcccatggaggggcttcatgtaggccagaaggaccagggtcttgcactgcccaggggcttgggaagagcaaggagaggaggaggaggagagggaatccttccttgggggacttcagtctgcctagggaaacaggcccttgaaaccatcgagggttggatctgcagggtggtctgagggagagccgtcagcagggtgggtggcagacacccatggctccaggaaagagttcaggaaagtagacctgggatctcccaggaggctgtcccagtgagggcacgtcagcccaaaactacatctgaggccagcaggaggccggggtgcagaccctaaagccagatggcctgggttggaatcccagtactgactgtgagcttcggcaagtcgctcggcctctccgcacctgtgttatctctttggtaacgtagggacaattgaagaggccacctcaagggggccgtggaagtgcagggggtccctgcatccagcttgcttggaccagcatgtgggaaggccacagaagcagggcaggtgttgtcgctggaccaggcaattcaggagggcagtgtcgtcgttggaccagccactgtgcagcggctgtgtgttctgaaagctctaattgtaggcactgcccacagagcggacagacagctctggccagtgaggaagagctcctgcccgtcccaaagcaggtgtatgaggagccatgagctcaacctggaaccagaggtgggcagggaggggggagaggggtgggcaggagcagtggctgctcagggaagctggggggaggaggagaaggaaggtagggggtagggacaggggagatgggagagcgatgggaggggcaggagctgtagggctccagaggcctgtgctggagagggggttgctgcagggaactcctgacggagccccctcgcccgaccagcagccttgcagccttggagggaggggcgtgaatgcggagggtcaccggacctctccagccccttctgctctgccttccattaccgacgacggaaatctccgttttcgggggctgtgtcccagctgcagagcctgaggctgggccaggggcgcggctacagggatggccgggtctgatgtttctgcagagcctcgccctctcctcctgcacacgagattcagccgcacaaggcgcccctcctccaacgcacctgctgctctgtgggcggccacctcggcacccacctgagggcggggcccctccctggggaccgtgcgcctgggctcccctctggacgcctcttgggtctctgcggaggtaccagggaaggcgggggctgcaggcggacagagagtcctgaacggctcgctggggaacaagaccagagacgcgattttcaggctgcagacaccggctggcgcgatggagtaacccagatgtgctaggggtgcccctccttgcgccggatcccctagatgtgccccccacccctgcaggcagggagcgggcgcccaggctggagatgtggggagggaggtcagactgactccgggaccccccagtcgcactcagtgaccccggggtccccgtccccggctcaggcacgtctcgaaccccaggagaacaaggaaactttacccccgcccggggcccagcgcagcctccccgtccccctgggcgcgcggtccatccctgctcattctccctggcccttgctccctcctcccttttcactctccgttccctccccctcccctgctccccctcctcccccctcccctgctccccctcccagccggctgaggcgggcagggccgggcggggccgcgccacggagcccacagcccggcgctccctgccgcgccgccgccgcaccgcgccccacaggagaagacgaaccgggcccggcggccgaagcggcccgcgaggcgcgggaggcatgaagttgggcgcgcacgggcctcgaagcggcggggagccgggagccgcccgcatctagagcccgcgaggtgcgtgcgccatggagctagggggccccggagcgccgcggctgctgccgccgctgctgctgcttctggggaccggcctcctgcgcggtaagttacggggcgcgggatgggccccctttcgcccgcgttcggatggcctgggacccccagagccagagggaggcaggctcctgactgcggtcccaagccgcgggtgcgcgcgactgggcgaccgcgaggctccccatccccagccgcacaggctgcgctcgcacccgggctgagccaggcgaggagggagttgaccgccggcgaatgcggagggctgggaaaggggctttccgcggggtgtggggggttccgctgctatttcagggctggccccaaaagctcgaacttgagcagaggtggggccaccttcgcccttcccccatccatccagctaaatttccctgaagacccccatgcctgcttcctccggtttaggggatcagaggggtggcctctgcccttggcggccgccacccaccttttctgcaggaaggacaaggtcgcgggtggggactctgggctgggagtcaaggctcccaggggtgtagaactgacccctccccctccccgagtcctgtctgcgctctcaggccagcgggacccaccagggaggtggaggtctccccctccgcccagacccgccccttatggcagcgcccaggacaggcggggaatgcctcagatcctggggccccggacctggagcacagatggacctagggctgtgctcctccagagcgactcatcaggggcgttctgggtctgcccaacagcacgggcaggctggggtgcggagggggctggcacctcgttggggtctgcatctgaaacactcctcgggcatcaggggattgatgaaccaggggaggttccgtaggaagcgggcgcttgtgggggcccgatcctccttccccttcctccctcttcctg

SEQ ID NO: 9108 - DNA, 6000 bp, Homo sapiens
gtagagagaatggtttagcaaacctctatactcctatcacttagattttcaaatctaaaacaaaccacagtaaaggtttttttgttttgtttctgtttgttgaggcagggtctcacgctgtcacccaggctgaagtgcagtggctgatggaccgacctccccaggctcaggtgatgtgatcacggctcactgaagcctcgacctcccaggctcaagtaatcctcccacctcagcctcccgagtagctgggactataggtgtgcaccaccatgccagctaatttttttgtattttttgtagagacaaggtttcgtcatgtgacccaagctggtcttgaattcctgggttcaagtgatctacccacctcagcctctcaaagtgctgggattacaggcatgagccaccacactcagcccagcgtaagggttttaataactccattaactcagagatatggatcctcatgaggctgaagaacaaactctcagtggctccaaggaaatggtcacaaacacatgttaggacctctctgagcagccctgcctaaaacccgttagagacagagtcttgttcagacaattgtcatttgtcccccaaataatatcctcatcggcctgggagcagtggtttcccccactgggtgtggctatgtgtttttctggtgatactcaagattccatctctctgggtcccccaaaccgtatgttttgtctttcagtgcccagaaaattatgagagaccccaaactcctaccagtaacgttgcttaaattagcaagagacagcttttaatttcttgtaacccagatccctaaatgacagtcaggctacagaaaagccacagcggccacctctaaggagctggcacctactgttccctgaggttaaaataatccattctttcaggagagagacaagagagagatgttattagggaacgtgccagatcttctggctttctggaaaattactgggctatagtctaactattagaaatcaatcccttaagatcccagtagccctggggaataggcagtgtggaaaagggcaaagaagaaattaattgggtggaggacagtactaacatttgctgggcatactctgtgctgagcagttcttcatacactccatttaatcctcacgggaacactgtcaggcagatattcctagccccaggtcacagacaaggaaactgaagctcagagaggtgaagttacttgcccaagacacaaccaaggtctggctaactctaacacccatgttcttctttgccactgccctaccctgtgtggccttaggtgagtctctctctctccttctgagcatcagtttcctctccctgagatgggaatggcttgcctggctcacagaggctttggaaggatctagactcctaagtgcttagaagcatgcccagcacccagcctgggactgggattgccttttttgtcatcctcaaagctgacaaccttggagctctgaaagaagaaaatccaaggccccgctgagggacgcgggtgtgcctctggggcgatgggacagaggaaaatcactgggttccctcaggtctccaaaggaggaaggaggagaggaggcagagggaggtaagctgaagggggaggtgcctcgggtgttgctgtttttggtgactgctcagctgacagctttccaacctgagaaacacacatacacaaagtctaacctcctctggcttaaaatagagccactgaaccaaaaatgccaagcacagggcagagtcatctgcctgacggagccagacagctcccccatggccccagtaacatccacccccagtgggcacacctgaccaagcgcctctcagctgcgcatcatggggccctcacaacagtgggcaagcaaagccagccacggatcctcggccccatcccggagacaaggcaagtgagagccagagaggcgatgggagggggataaagccagcagcatctggcctgacaaggatcatgacctggggaaccggacagccctgagttcaatcctggctcagccacagcctggctgggaggacttggcaggttaagtatctcttggcaggttaagtgcctctgtgtcctgggctgtaaggtgagagtcctgtgagtgatgtctgtgattatgcctcgcacaggcagagtgtttggccctgtccctgcttctggaaaaagaattttcgacatctgcacacagacagttgtgaaaaaggaggagaagcagctactggctaaggggcacctggatagtgacacaaaacagcttctataatcctctacatggtcctatggggtgagggtcattactacccccgtttctcagatgagaaaaccaaggcacagggaagtacaagtgttctgtttatggacacctagtggtatggtttggctctgtgtttccacccaaattgcatctccaattgtaatccctgcgtgttgaaggaaggacttggtaggaagtgattgacttatggaggcagttttccccatgctgttctcgtgatggtgagtgagttctcacgagatctgatggtttaaaagtgtttggcagtccccctcctctctctctctcccgctgctatgtaagacatagcttgcttccctttggtctctgccatgattgtaagtttcctgaggcctcctcaggcatgtggaactgtgagtcaatgaaacctctttccttcataaattacccagtctcaggtagttcttcatggtcgtgtgacaacagactaatacacccagctaggaagtggaggagctggaattcaaactcaggtcttattgactccagctgtgtccacaaccatgccctcattaactctcccctgagtgggccctgcccttcccctaagatcaggccattccccacatcccactgtctccacaaactcttttcgggctcttgttgggctgtgggtccttggagccccactcactccgactctgagacttcagcccaggtttctgctcctctgaagtctgagcagaaatcggaatattaaacttactgatgctgttgctaaaaatcaggctgaggtagtggcaccagcacgctgcttccagcccactgagcttcatcctgcttctcgggagaagaaggggtccaggccctctctaccaggtactggggcccaattctgcctgggaactgagtcggacaggcactgggttggacatccctacaggcccgggcgtctgctcacttgtgatatctgtaacagtggctcacacttctaaacaaatcctcagggccaagctcagctctccggctccacatctactggttcatttaatcctcacacccactgtattagttccctgttgccactgcaataagttattacaaacttagtggcttaaggcaaatgtattatcttctagttctgtagggtggagggctacacaggtctcactgggctcaaatcaaggtattggcaggactgagttcctttctagcggcttccatatggaagtatgtcctcctctgggacctggagggcctaggcggcaggctgggcctcaggggcttaacatacgtcagcgacttaatacaacagaagctcaaaactggggctcctgattgggggttgggggacaaccttgcaatgtgtcattcagccccaggtttttcccaccttgtgggctccctctcttctaaagactttagttctctgcattcagccgtctggtgggggaaagagatggagcacgtgtagggcagggttttatgggccaggcctggaagtggcatatgtcacttctgcccatgttccatgagctaaagcttggtcacatagaccctgctaagtgcaagaaaggctgggcaatgtggccagctgggcgcccaactccacctccccggtgcatcccggatcccctcatttctctccatcttcacacatttggactacactagccttcgaactggcctccactcctagccaccatcccttttccccatgacagccaggggctctttaaaaaatatgaatcagatcattgtggtggtgttgcgtgtgtgtttgtttgcctgtgtttgtaatacagcctttccatggctttcaataaacccacataagggcttgtaagaccctgtgtgaagttgcctctttgccttccttctgctcccccaaagtatctgccccccagttctctgggctccagcgacaccggctcctctgctattctggctgccaagtcatgctcagttctgttttaagcaccaccttagatggtggggttcaccttccccaagaaactatcccttttccttctttctcactcctgtcttaaattagtttcttgtttgttagctggccctcctcactaggatatcacttttacttacaacaggaatgttgtttgcaccagtaggtgcttggtaaatatttgtcagaggattgactgactgaatgaaagaaggaaggaaggagagaaggaagggaagaagagatgaagggacgaagggaggaagggagggacggagggaggaagggagggacggagggaggaagggagggacggagggaggaaggatgggagggaagaagggagggagggatggggaaaggagtgaaaggaaggaaggaaggaaaggagggagggagggaggaagggaggggaggggggaggggagggagggaaaaaggaaggaaggaaggacggaaggaaggacggaagactggcacgaggtcacaacatgagttagtggcgggaacaggacttctgcaggcccggggtttgggcctttgcttcagatctcactattcacagacacatgaaccccgggcaggcgagtgggaggcggacaggggagcggttcttccggcccccacccgtggcgatcccagcctccaggttcccggcagtcgccccgcctcgcccgtcacaaccctgccgcgtggggccggggttggagggggcggagcgcgcggtccgggcacacggagcaggttgggaccgcggcgggtaccggggccggggcgccatgcggaggccgagcgtgcgcgcggccgggctggtcctgtgcaccctgtgttacctgctggtgggcgctgctgtcttcgacgcgctcgagtccgaggcggaaagcggccgccagcgactgctggtccagaagcggggcgctctccggaggaagttcggcttctcggccgaggactaccgcgagctggagcgcctggcgctccaggctgagccccaccgcgccggccgccagtggaagttccccggctccttctacttcgccatcaccgtcatcactaccatcggtgagccgcccggagcctccctccgcgcccgctccagccccagccgtcccggggcgcctctgggtttcggtcccacctctgcccccgcccagctgagctactttggacgggtcatttcggctcaccgagcctccctcatctccttcgcctccctcgtctccctggtctcctttgcccccctctgctgaatggagctgtcagcccacgcaggcagggacgggaggaatcagtaaatcgagtttgccaaaaggctgacccaggagtgctcagaaaacgtccaaggggcttggagataggtgaagcggggctgggagaccaagtggctggatttgcttttccttgcctggttgcctcacacttgctgtgtgaccttagacgagttgctcaacctctctgagccagagttttctcttctgtaaaacagtgtcgctaatcggccttatctcagggctgtggtgagagttattattcaggagacagactatgcacagacaaggcctgtgctaaaacatgacacatacagagcactacaaagaaaagatcatttttttattattgcaattgttattgttaccccatgagaatggggacccagtctgtcttagggactgctgtatgacccgtgcctagcatgcagtagatgatcaataaatacttgttaaaggaatgactgataaccacaggctctggactctgccctcagggatgcagagcagt

SEQ ID NO: 9109 - DNA, 6000 bp, Homo sapiens
ctgggagatggaggctgcagtgagctgagattgcaccattgccctccatcctgggctacagagtgaacttgatctcaaaataaaaaaaaaaaaaaaatcagccgagagaagcctttccaagtcagatgccctgtgtggacggacaggtagtgctgtggaaacccgctggccagtcaggtggggagagccccgggctgagtcctgcctctcgcctgcttgctgccagcgccaggaggaagggttcccagcgctattctgggcagctgaggaccaggtctgccattggccaggagaaacccaatggggtacagccccagccctaagggaaggagggagactgggccagggagggtgagacctgcttgtgggaggggtggggctggtgacagtccacacagggatggtggggcgggggctggggtccagctggcaccaggtgcagaagggtttacccacacatgggtctagggggtcctcagaacccctcatggacacgggttggggagattaccaaccccttcagcgggttggccaagacctccctgggggtaaaatgggtggggagattcctggtcctgcccaggccctctgccctgatgccacccgaaggagttcaccctactccagaggctgtagggccaggaccactggggacttgagccagccatgaaagagtctaggtccccagatggaccacccccatcttgataaggacagaaagtccccccttttctggtttatcatcctctctttccacctccccgcccccagctctctccatcgacaccgtccccagcatggacctagatggggtccttacacctgggggtgctggtgaccccattttacagatgacgagactatggtcaggaccaaatggcagagtcagagttcataacctgatgcgtgaccccggggtcctcaccacccagcggcagcgcccccagcccccgctggtgctgcgacacttccagcaccgcccagcaggtggtgctgcagggacagcttctggggcccggctctccggctctgcactgggggcttggagctggggtcagggtctccctccagcctgcggttaacggcgactgcagctgcggtatcagggaaggccgagcatccagaggccagtggaaaaaccatcttgccacggagtctgtttcctcctgaactggaaacggatttcaggtaaacagtgttgagtccgggcccagcagagcagtcactgcaccttctgggtctcgggttcccagttccctcccccggagccgccgtcttccctggtccctctggacaggtcaagcgccctgtagggaaagcggtcggccccacactcctgaagccccctccacgctcccctctgcctgggaaggctccgtctccgccctgactcaagaggaggcaggagtggcctcggagacaaacagccccttcgccaactccccagccaaaaatatacacaggcaggagcgcggttaccagcacagcctgagagcaggaggaagggcctgcaggccacaagggcccccgagccacacaggaggtgagggacggtgcctgtcatacccttctctttctccgagccaaagcggccctctgcgtgagggcagtggcagaccttggatcctgagttcacatctgtgcctccctacttttctttctcctctgatggaagtcgggacaccaggggaatgagggggacccccagactcacatgatgttgcccctagctctggggaacccgtgagaatggcatttcacacccaagcggccaccaggcttcggttcccatgagctcctattttaacctccttctcccagaaggcagaggtcttcagcacaggcagagctacctctggtgcagggctgggcacaccgcagaggccaggtgcctgtgaggctggggagccggccctggagttggaatgagcaggttctggaggctgagggggctagtgtaggaggctgagggggctgggggaggctgagaaagctcatcttggcagttgaatgatctcgtcttgggagaaggcaacatcataggggcttttagggtgccacagggggcagcacccaggcctcggcctttgggtgggagggtgggatccctccgcctttgggcgcctccctcccgcctctgctggaaggcttctccctttgtcacgggacccttgggctgttgcttttcctgctggaagcctctgtggccggtggcacctttgccaaggtttgctggggccctctgggctcattccgcccactcggcccaggaggttgggcttggctcatgctacccgcgtggaccccacacctgccgagggctagccaggcgcagagcggtgtgtgagcgagtgagcgtggggtccaggcactatgcacagccaggcatgccggctgcggcagggaggacagctccacatgccggctccctgtgaggctggcgctggaccaggcagaccacaagtggcttccacagctggcaccagggaacgtggtggtgcctggaagcttggaggtaccaggaactgcagagccccaaagatggcgtcacagccctggctctaggagctccttggtctgggctccccgaagggccgcagctcttctctcctctcttctctccctctcatcacccacagcatggcgagcaaggggggtgtctcaaccctgtctgtcatggctctttcagccctgccatttgggccccacattcttgttccacaccaggaagaatgaggtacgtggacacgtgggggggtgaccgggtgaaggggagcttcactgaacagctcagaggcgacccgcagtgggtcactcctctaagcaagcaggtgacccattgtcatctggagtctggctgagtctgggtttttatgggcttcagaggggaggaagtgcatgctgattggtccgtgggtggtcatgcatgctgattggtccatgggtggtcatgcatgctgattggtccgtgggtggtcatgcatgctgattggtccatgggtggtcatgcatgctgattggtccgtgggtggtcatgcatgccgattggtccatgggtggtcatgggtgggcccagaaaaagtatcacaagttctcactgtggtccacagaactggcagccctggcctgaagatgaggcttcactgggaccccccgctttccacccaggagcccatctgccccctgccaccattaacctgctctccacggtgcccacggtgcccagactgtttgtgctgaaggctgcctgcaggcccacactgacctgcccttagtgtccctcagcctccctcccatgcttgtcagcgcccaaagtctgaaggggggccagggcagcagaggctggtgtgtcagtgctgccccaagggtgagtacacccaggcgggctgtgacagtgcctgggctcagcctcaactttgccctgaaatcagagcaggcactgggagcagggagaggccaggcagcgggggcaggggcttcctggacctccgagagtgcagagatgcctgggtctgcagccacagctgggcccccaccctgtcaactcagaagtgggtggagcttccacctgttcccagctcccaccagctccacagagcgcacagccccggctacacctccccgacggcagccagcatcatggcagcccattccagacaggccgccgctgctatcaccttcaccgttgggtgatccagtctggttacatgctggcctctccctccccctgccttcgacacaatcaagggaacagatcatggaaaaaatgcagaaggagcctgagtggacactggacgtgtgggtttgagtctaatttttgagcagatgaagaaaggcccctccttttctttgaaaattgaagctggaataacacagagtatccaacagcagatccgtgtggagggccagctgtgagcaaatttcagtgtggacacagcacagtgcaggcacagccctaaaggagggtaccacgcagcgggggtgaatggggggccccggagcacaaagcggagggtggttttgggaggctggagttgctgttttgtgtgcacgcacccccttcccccactccctgtgtcttccacctcagactgtcccccactcccttccctgggtgaccctcagagctgctcatcctggggagcaggtaaagtcagcaccttggatagctctgtcacacagaggaggccaggccttgagcaaggccccctggcttcagctcctaacagcttccactcctacaagcgtgcagcttcgggtcagagccccgcgaccccacagcccacccagaagacgtcctcgtggcacggctgtcccattgcactttgccaagtgttggctggaaggtggtgggagaggagtgacagtttgatgaagaatgaatgaattaattaattaaggcacagggtaatagaggctggccaggcccggtccccgttccttatttcctaatgcagataaattccagtaatttctgtggggtgagaaatgggcatcagaaataatggttttactatcaaaaattgaaacatagtgcctgtgtgtatctgaaacaatactcgttgttcagatgtctctggggcaagaacagctcgatgccgagggaggaggctttttcgattcccgcactgcgaggtactcagcagcgatgaagcccccagggctgggccacagctgtgccatcacacccccggccccggggctgaccctttgctgacgtcagctcaccagtgccagctcagcttccctgcaatgcccttgatatttacaaggtagatgctagaagcccgggatgctttgctgttgggagggaaacgcctgccagacggagtaaaccagctgctccggaattctcaccagcactgggagggttggtgttgctgctcagcacgggggctcagaagccctccccacgcccccattatcctcagcttccccaggctccatccagcaggagggagcagacggtgggccctgcctcctggccttgagaccagaagacggcccagggtttgaagcaggtgaaagtctgagctacttctgcaagtgcagcctttgttccaaggaagcagggctgccccgcaccccggtgtgcaggggggcagctggcttttcccgtctgcagagctccgtctccccaggaggggcgtcctgtctcgggccagcatgaccgccgtctccctgctgctgaaggggagggccccctttctgtgggccttggcctctgtctgtcaaatgacggtaagacgcaatcggggtgcatgagctatggtccagagaatggcatgggagggagctggctcacctgccccccaggctggcttagggtcatggttcacccgtccactctgcaccctgtgaatgattcaagtcaaggccgtgccttcaaagagctcacggcctcatgaaatgtgacccacagaggcacgtgcaggttgctatggaaacacacacaggctattcggggtgggggatgggcccggagggtctcgccggggatgaagtgttgaaagatgaatgagttttcctctcagagccggggaggtggcggtgcggtgggaggcgtgtgctccggaagctggaggagaccccacactccagatgcatcaacctgccgccccgcaaagctcgtttatttagaaacgtctcggcaaagccaaccgtgggatggaagcctttccctcttctccctgatctggatgtgcagaggcgaagccactaccgtgactggctgctgatgctccctccggacgcacccgtccctggtgcagctccgagctggaggggcctgggtgcccccggctgtcaccccagaccaagggccaaagaactgagctccccagatgagccaaatgggggctccctctgtccccaccccccaaggagggatggcgggggaacccaggtcctcggccccggtggtcgcccgggggctctgcggtgggtccaccagctcccctgctgtgtctacacccagagcctttatttctcccaggcaaa

SEQ ID NO: 9110 - DNA, 6000 bp, Homo sapiens
gcagggcactcatgggtcgcttctggagatgtccacatttctgggtctgggactgtctaggcctggctttggggccatctgtaatctgctccccgtagccccatgttttgtttaggctggaagtgcactcagctaaaatgccgttatcctaccaaaagtggcataggatggagttctggccagtgagatgtgagcagaagtgctgggtgtgtcttcagggacagatcctcaaagggagctgactcatctagggggcagcacttttgctcttcctcttttccttcctcctttctggtcaggtatgcttgtgatggctggagcatcagcagctgttttgggccatgaggtgacactgaggctggaagccagcactaggagagtgatacagtaaggtaggagctgcgtccctgaggatgccactaggagaggatagtgtaagataggagctgtgtccctgaggatgcatggtaccctgccagctggacagcgcaggcttgtgtcaccgagagaaaagtacgtttctactctgtcgaagcctctgttactctgagctttctcaggaacgcagctctaaccagttctaaagggcaggcagccatgttggctcaaatgcttcccccagcaaggcaggaagccactccagtgtcctgcaagaaacttcatagaaaaaaggcttccatccccatatgttgggggtctgcatcaggcccttcctgggccctggagcctccatgtgcacctgagtgggaagggctctgggaagcctaaggctggggagggcacctgttgactttgtttaaatagtgttctcaagcctacttgactgaggaaccccttcctccagaaacaaggaattacagccggaaaggcctctgggaaggccaccttctctgcccttcactgcggggtggggcgtgtccctgagctactgcactcagaggagctgggcctggccccgggcaggcagcaagcactccaggagaggctgtggctgctgccagctctgtgagcgggaaactggggggcctttctcccctctccccagcccctcattccaactgctctggagctgtggcctgagccccaccctggccctctgctcagaagggcctgttcccaggcaggtctcagtgcccaggagtggagaggggggctgtggagaccagggggatcatcccaggaagagtgggtttgcaaagctgcagcagcaaggaagctgtggggtaaaaagtttataagaggaacactattttttcttttggcagaatttaatgggtgcagattgttcaggtcccaaagacatgggaaaaaaaaaaaagagagagagaaagaaaaagccctttgctgctgctattgataacttgtctcgcttcacgtggtgggttcaaaactaaaaatactctcctccccacagcagagaagccagggctgtcacgtcgcagaggagactggagagctgcggcggggaggggtcagctgcggccacgtgagggccaggcccctctctgactgcccaggctgcatccacacagaagattccatggctttccataaaagagagtgggagaatgtcctctctaaaggcctggggagtgcctggggagaggagacagcctcagctggggctcaccagccagcagctgccagccaggccagcaatgccaaggcacccggcgttcctggaagccaagccctgtttgatctaatggggcagctgtgggtgcagacccagataaagagataaacccagacccagaaacctgggggaggaggtaagagtggagcgggggaaagggcggtgggtcgtaggcgggactggtgctgccaggccctgggcaagctgcttctgctctctaagcctcagtttccccatccaaaaggtgggagcaacaacctctcttccgcctccttcaccgtgagaggaaaggaagcgggatgacatagttgtggctgggactgctggaccccgcatgccagccctgggaggtatgtgggtcatgaaatccacccactggtgacctcccccatggtgagggagggagagagcttctcccctccttggctaagaggacagagggaggatcctacaaattctgtcaggaagcagaaatttggtctgagagcagtgaaggtgggagcagacaccccccaaatcacctgcaggatgagcatttctcaggctctagagagcatgtgtgggacacagccgccagcccacctggtgcgggggtccagcagccacagccatgggaactcctgggcctgttgttcgtgtgcggatcctggtccgggagcctggatgcggctctgccttgccgacaagctcctgggccaggcctggtccaccagacctccctatgcttggagtgcctgcttgttgtgcctggagctgtgctgggcccttcctcattgcagggctgggggagtcacttaacctgtctggggctcagtcttctcatctgtaaagtgggaatgatggcacctggtacccacttgattggctgttgcaaacatgaaaccagatgggcctgtaaatcacagggcactcggccgccatcaccatcatcatcatcaacatcatcatcctcatcatcatggccccagctcatccatctttgttgccttctccacccccatcttccatccttggagaactgtgcctcttgaattggcctcgtgacctagtaaagatcataacaaagacgcctaagttggtctcaaggcaccctccttactacccaccaactgagggaggattctcgcctagtcccagcaactggccccggggaggaagtacccttcccagtcctggcacgtctccagcagtgctggctgacggcagactacccttgaagctcagttactgcatttgtggagaggggtgaaacccctgctccagcccaggggccatctgagatcacacccccaaccccaaggccagggtggatctccctgcttggccctggggtggtccctgggcagatgagagggtccttctgcctgagcctctgaggctgccctcactgcagagctcgtggtcaaggggtgggtgggcaggttggatcccctcaagggcacaggggttagagtcttagagacttagggtgagggacatggagagtgatgggtttctgggaccctgagctggccctggcaaggcccacagggaaagctgtggagcgcagtcatctccgtggcaactggcctcatcgtccttgtcctggcttgggggccgcacgccttcccttccctttcaccggctggagtcgctttcttcagaggtaaccatggcaacccctttgtttctgaggcctgcccgccctcctccccgttctctcttcaggagaggctcagccagctccttcctggtcccggcacgtctctagtggcgccgactgacagtggcccaccagtgagtggggccagcccctggggtgggggagaacggccctgctgggcccagagatgtggcctgggccccacccctgccacagaggccacgttcattggctcactcatgccctgaaatttatagagagtacccacgtctgccacggggccacagatggggcaaaggcctgtccctgcctccatggccctgctaggggcagcctggaagtggggagacaaggcctgaggagggggtgcagaggcccaacgggggctggctttgctgcaggacgcactgcggggtcacgggtcatctgccagagctctcaaggccacaggaagcccaggactcttggctttacctcaaatgggctgaagcagaaacaagcatgtggttcacgtaactgaaaagtcaaggaaaggacctgctgaggtgcagcagggtccacgtgacccggccgtggttgctccggctttcctctgggctggcttcattctcgtgcagccctgttctcgggtagtgagatgtggaagactggccccttccctctctcacctaacccagctctggagaggtctgtgggcagatgggagagtcatttgacttcagcctcccctccggtctgaactctgaccctacagcaaaagtcccaggactgagcctctttggctagaactgggtcacaggctgacccctaaaccaactgctgtgactatgtagccagcctggtttatgccactccactcacctcaaaccagacccatgacttcaatgagatgttgacaggggaaccctggtttgcagatgaaactgagtgatcacagactcagagaggttaattaatttgtccaaatccacacagctggtaaagaatgcaagctccaggtctgattccagaacttctgggcttaaccctggagccactgtaggtcagtgggagtccaaagggttttaagtatggtggtgaaacggtcggggatgcagctggaggggtaaattggcgctggattttggttggcggtgaatggcatgcaaaggaggtggacgatattcaggatttggtaggacagtggaagcagctacgccccagctatcgcacggtccccagcatttgtaggaaaaagcccccagggctttgggtagcctcgcaggcccgcactgccgccaggacgcagtgcacctgagggcggagcacccacgccccgggccacctgactcactgtttgtcaactctgctctctgcagccacgccctttcctccttgcctccctccccttttggctcaggggcggcataaccccgcctctctcctgctgtgactggctgtccttgccgtcactccgctgcgtgggcggggctctgagggggcacaggtagaggcccttcgcgaagggattagcatagtcccaccccccggcgcgagcctcgggccgggcgctgattgggcaggcagcggccgacgcggcggcgccgggcgcagcgagtggcgggcgcgggctgtcagtcggcgaggcggcgggccgcacttccgcctcggtgtcagtgggtcgcgggcctacggggcgggggcggggcggcagtgagctcggccggcaaccgagggacccgcgtccaggtgagtggcccccgccgccgccacgcgaaggcccgggaccccggcgagctgcggggcctgggccgcgggctggggctggagccggggcggggaggggagggcgggccgggcaggacccgggtccgcaggccgcctccagccccggccccggccccggcctcgacccccactgggaggcgcgcccggcctaggccgcagcctggcgccccggggaaactttgggaggaaagttccggccgggcgtggggcctgggcctgggtcccgcggcccccgcacccttccccctgcggtcgcccggcaactgcgatcccgggacccccggcccggcccccccgagatccccagcccccctgctgccccgctgagcaggaagtggggacgggcgcacctgctcgcggcctcgccctctctcaccacctcaccgggaacagggaaggatttcgtgcgcatttagggcgatcctgtaggtgaggagggcgagttccgccgggaagaagggcagggagacgcagtcccactccgaccctggccttcttgtcccgcaggcctgtgtgcacgtcgtcccggggagggtgcccgcgagcccttgtccgttcccctgggctctgtttttgtttttaatttataaatcttagcagactacacacggttgagaacttgctacctaaaacctatctttggtaatgtaattttaagaggttccttctttcgccagttatattttggtactcagaagaatacgtctttagactttccaagtttataagcccagaccaagactgttaggtcgtcacagcacctcagcctccccgcttcatgggaggaccggcgacgaggcagtgggtgtcggggtgttgcaggctctcctggggtgagggtcacctcccaggggcgtttctatctgaaccgtcctctaggacaggccctggcctagcctggctccggcagctttgggatgactgcccggaacacctggagaaggggtcccattcg

SEQ ID NO: 9111 - DNA, 6000 bp, Homo sapiens
gctgtgcctgtcccccccgtggattatttacagtctgtggctgcttttgctgtttcggctgtggcttcccagtgggagaggaccggcaaaccatttaatccactcttgggagaaacgtatgaattaatcaggtaaggggggaaaggcccatcataaatatcttgtaaatggaattccttggatgacagataagtttgattctttcactagcattgattcctctgctctgagaataaactgtttgaattaagagctcacgaaagcgtttggatgctgtaggcgagatgtttcacacacacggggtgttgtgctagcgtgccacggcgtctgagtgagtgtaaagcgctggcaatgagatattttagtgtgttcgactcaagcgtggagatagcgcgcactgtagacgcttccgtgtgtgtgtgcgacgtctgtgaaatgtgtaggattgttgtgagcttcaccgaaaatggaaataggtactaatgagcaaaactaggctgtttcactaaagcatttagtgaacgctattgaaaaagcaggtaaatccaaacacaggaatgattgcaaagaggagcttcactcccaaggccacgtttgccaccacagcctccccagagttttaggaagggtcagacggctctggccaagggagagttaaccagaccacgcctcatctccagacatccctgaaacttcttcctatggaactttcttctaggcagcgttgccatcccttcctagagtctccccagcttccctcctgtctctggtggccctcacctcacagacgtgagactgactccaagtcctagaactctgaccccagaggtccagccgggccccagatccgttgtttgtggctgggcctctggaaggactggttggggttctcttcacccacctggttgccctggggactgctgtggttattcacagaatcatcctgggattctgcccaggtgacagtgcccacccacaccaacaaatgaagtcaaaagcaggccagaccatggcatgtatgtggcagtgtggtaattcctcagccattgagcagcctggctggggctccggggagctgtggatgagagggatgtgggtggcttccttcagggccgtttggtgatgtctaaaatgatttttattccactgcccgtggaccccgtcattctcttgtagatgcatgcaggtgcccatgggcagatgtgtagggagagtcagcagagcacagttcagctgctgtctctgtgacagggctaagctgtggttctgaaggagggaggggcagggcactctcgctgcacccttcagtcttccgactgtcgaggtagcccagcacacagagctcactctgggaagaaggagcttgctggtgggacacccttcactcttctgactgtcagtggagcccagcacacagagctcgctccgcctgcctggggagaaggagctggaggggcgtgggtggttatctagacaagtctgctgtgcagaatgcaagctgtttgccacaggctgctgggctgcacgcctccctgcccaggaacagagtgcagacgggagggaaggcgggctcctttatcatcttgttttattatttttctgtgaaaaagggagttgagccaaaacaattagcctcttatttggattctgggttagttgagattctgttgggttattttattatgaagtctgtttgtttttttaattacgagagagtgctctttatagaaaatgtgtaacattgagaaaggtagaaaagatgaatcaggcataatcccatacaagacaatagctggctgggctcacgcctggaatacctgcaactcaggaggcgaggcaggagcatcacttgagcccaggagttcagttacagtgaccgtgccactgaactctaacctggactacagagccagaccgtgtctctttaaaaaaaatgagaggaactgtcagcattttgttagactttcttttgtgtgtgtttcaaaatatgataatttaatttgtatccctttttaacatgtcataattttcctgtgacattaaaaactttttctaaattagagtgtttcatcgattctaagacgccttgttcacgtggcagcacttctacatgtcagtttcttgttcctttttttttttttgagacgaggtctcactctgtcgcccaggctgaagttcagtgacatgatcacggctcactgtagcctcgacctcctgccttaacctcctggatatgatcacagctcactgtagcctcgacctcctgggctcaagttatcttcccacctcagcctcccaagtagctggaactacaggcgtgcgccaccatgcccagctaatttttgtattttcagtagagacagggttttgctgtgttgcccaggctgctcttgaactcctgagctcaagtgatctgcctccctcagcctcccaaagtgctaggattacaggtgtgagcctctgtgcccagtccaagtcatagtttcatttgcagcatttttttctttctttcataaaataatggtgtgcagtgcaatgaatggcatcttgggttccaagaagtgcagttcctttgaaacttaaggccgctgttttggggccctttattgtattttatgtgttattaatgattgagaatttttttttttttttgagacggaatctccattggttgcccaggctggagggcagtggcatgatctccactcgctgcaacctccgcctgctggttcaagcaattctcctgattctccgcctcagcttcctgagtagttgggattacaggtgcacgccaccaggcccggctaattttcgtgttttcagtagagacagggtttcaccttgttggccaggctggtgtcgaactcccaacctcaggtgatctgcccaccttggcctcccaaagtgctgggattacaggcgtgagccaccacgcctggccatgattgagatttttatcaatagtgagcaaatggttgtgggatttggtttgcttcagatggactcttttccagtgtgtaaagagtttaaaagtgcgtgcccatgtttgtcctagaaggtgtgtcagcactgcctgtcagaccattttgggaggatgcgttgttagtagtacaagctttcctgcacttctgtatataaatcactatgcagtttggagaagcaacataaatgtcacagcttcaaattctaatctgttcctggctcatcctggctgggtcagctgctggtccttacccacatgctgcccgtgcgtgaatgccaactttgtgttttttgtctgatttagaagttggctggcactgggcagccgagcacctgttctcaagatgtcattgcctttgagcaagtaggactagtttggacagagtgtggcgtggtgacagcagggtccagcaggcaactgtcggtcttggcacaagctgcagggagcagccctgcttctgcttctgggaaaggggaggctgaggcctggacaagggaaagactggccacgagaaccacttgtgagggagtcttctgttctgaattcatgtagagtgtgcttccttttctagatatttctcttgagcagtattcctgttgctgcctgccagccttctcgtcctctggtcagcgtgctgtgccactgtcagaggcattgacgggattggctcttaaaaaattattaaaatgtcttgaaaaagataaatcaggccgggcgtggtggctcacgcctgtaatcccagcactttgagaggttgaggtaggcagattgcctgaggtcaggagttcgagactagcctggccgacatggtgaaacctcgtttctgctaaaaaatacaaaaaattagccgggcgtggtggcgggtgcctgtaatcccagctactcgggaggctgaggctggagaatcacttgaacctggaggcggaggttgcagtgagccgagatcacgccactgcactccagcctgggcgacagagattttgagattccatctcaaaaaaagaaaaagaaaaagataaatcagaagaggaaagaagttctagatgatagagaagaagccttgtgggtgaaaggaatgcaagccgcctgggctgggtagagcggggcgtgccgccagcacccttccccaggggctgcacccggggccggagctcctgctgcacagccagaagcaagctatgcaccttcgcaacgccgagacacgtcgtctgtcatgagttcacttccagatcgtccttgccagtgtctgccatgtgctgtgtgtctgtgagaccctggcagtctgtcaggttaggggccatggacgtggaccaagtcctttcctgataccctggatccctacagatcccttgttatagctaaaaatacacattcttttctcagacaagtattcattttgtaaattacataccttggtagtcaaccttttaaaatctaatttttcaactttctttcttctgtaatgattggaaattctgattccagttaagttggtaattatgtggtttagcttttctaatttttaatgactacaactgtaggtgtattcacagttccggaacaattaaaagctgacattttgattgaaaaagagagtacactaaaaatcctgttcctggacaggagtattttggggtataagccattccatctcggaaatttcaggggccttgtagaaagacaaggaaggggcacccccttcagaaagggtttagggtcctgagttcctgggcaatgggagtccctcggggttgagggtttggagtcagaggtgtgtaaggattgcttctccacctgcgtctctgggtacctctagccagacactgctgtggctcaggtggagagcaagcggggcatcagggtggaggcctctcctgcaccattgcgctctctgggtgggtcagatgtgctctggaagccatgtgtgtgtgtgtctgttgccagcgttaggccaagtgcgatgtcatgtttgtgtgtgtgtctgttgccaacgttaggccgagtgcgatgtcatgtttgtgtgtgtgtctgttgccagcgttaggccaagtgcgatgtcgtgtttgtgtgtgtgtctgttgccaacattaggccaagtgcgatgtcgtgtttgtgtgtatgtctgttgccaacattaggccaagtgcgatgtcatgtttgtgtgtgtgttgccaacgttaggccaagtgtgatgtcatgtttgtgtgtgtgtctgttgccaacattaggccaagtgcgatgtcatgtttatgtgtgtgttgccaacgttaggccgagtgcgatgtcatgtttgtgtgtgtgtctgttgccaacgttaggccgagtgcgatgtcatgtttgtgtgtgtgtctgttgccaatgttaggccaagtgcgatgtcatgtttgtgtgtgtgttgccaacgttaggccaagtgcaatgtcatgtttgtgtgtgtgtgtctgttgccaacattaggccaagtgcgatgtcatgtttgtgtgtgtgttgccaacgttaggccgagtgcgatgtcatgtttgtgtgtgtgttgccaacgttaggccgagtgcgatatcgtgtttgtgtgtgtgtctgttgccgttaggccgagtgcgatgtcatgtttgtgtgtgtgtttgttgccaacgttaggccaagtgcaatgtcatgtttgtgtgtgtgtgtctgttgccaacgttaggccaagtgcgatgtcatgtttgtgtgtgtgtctgttgccaacgttaggccaagtgcaatgtcggagaggtggtgttgggtgtttccgccacatgttgtggcatggagggcccctgcttcccagcgtcctgtgaggggctccacatgatgtctgagctgccctttcttttattttgctgccattaatgtgtctctcttttttattctttgacctagggaagatttaggattcagatttatatcggaacaggtcagtcaccacccccccatcagtgcgttccactcggaaggtctcaaccatgacttcctgttccatggctccatctaccccaagc

SEQ ID NO: 9112 - DNA, 6000 bp, Homo sapiens
cagccattgagcagcctggctggggctccggggagctgtggatgagagggatgtgggtggcttccttcagggccgtttggtgatgtctaaaatgatttttattccactgcccgtggaccccgtcattctcttgtagatgcatgcaggtgcccatgggcagatgtgtagggagagtcagcagagcacagttcagctgctgtctctgtgacagggctaagctgtggttctgaaggagggaggggcagggcactctcgctgcacccttcagtcttccgactgtcgaggtagcccagcacacagagctcactctgggaagaaggagcttgctggtgggacacccttcactcttctgactgtcagtggagcccagcacacagagctcgctccgcctgcctggggagaaggagctggaggggcgtgggtggttatctagacaagtctgctgtgcagaatgcaagctgtttgccacaggctgctgggctgcacgcctccctgcccaggaacagagtgcagacgggagggaaggcgggctcctttatcatcttgttttattatttttctgtgaaaaagggagttgagccaaaacaattagcctcttatttggattctgggttagttgagattctgttgggttattttattatgaagtctgtttgtttttttaattacgagagagtgctctttatagaaaatgtgtaacattgagaaaggtagaaaagatgaatcaggcataatcccatacaagacaatagctggctgggctcacgcctggaatacctgcaactcaggaggcgaggcaggagcatcacttgagcccaggagttcagttacagtgaccgtgccactgaactctaacctggactacagagccagaccgtgtctctttaaaaaaaatgagaggaactgtcagcattttgttagactttcttttgtgtgtgtttcaaaatatgataatttaatttgtatccctttttaacatgtcataattttcctgtgacattaaaaactttttctaaattagagtgtttcatcgattctaagacgccttgttcacgtggcagcacttctacatgtcagtttcttgttcctttttttttttttgagacgaggtctcactctgtcgcccaggctgaagttcagtgacatgatcacggctcactgtagcctcgacctcctgccttaacctcctggatatgatcacagctcactgtagcctcgacctcctgggctcaagttatcttcccacctcagcctcccaagtagctggaactacaggcgtgcgccaccatgcccagctaatttttgtattttcagtagagacagggttttgctgtgttgcccaggctgctcttgaactcctgagctcaagtgatctgcctccctcagcctcccaaagtgctaggattacaggtgtgagcctctgtgcccagtccaagtcatagtttcatttgcagcatttttttctttctttcataaaataatggtgtgcagtgcaatgaatggcatcttgggttccaagaagtgcagttcctttgaaacttaaggccgctgttttggggccctttattgtattttatgtgttattaatgattgagaatttttttttttttttgagacggaatctccattggttgcccaggctggagggcagtggcatgatctccactcgctgcaacctccgcctgctggttcaagcaattctcctgattctccgcctcagcttcctgagtagttgggattacaggtgcacgccaccaggcccggctaattttcgtgttttcagtagagacagggtttcaccttgttggccaggctggtgtcgaactcccaacctcaggtgatctgcccaccttggcctcccaaagtgctgggattacaggcgtgagccaccacgcctggccatgattgagatttttatcaatagtgagcaaatggttgtgggatttggtttgcttcagatggactcttttccagtgtgtaaagagtttaaaagtgcgtgcccatgtttgtcctagaaggtgtgtcagcactgcctgtcagaccattttgggaggatgcgttgttagtagtacaagctttcctgcacttctgtatataaatcactatgcagtttggagaagcaacataaatgtcacagcttcaaattctaatctgttcctggctcatcctggctgggtcagctgctggtccttacccacatgctgcccgtgcgtgaatgccaactttgtgttttttgtctgatttagaagttggctggcactgggcagccgagcacctgttctcaagatgtcattgcctttgagcaagtaggactagtttggacagagtgtggcgtggtgacagcagggtccagcaggcaactgtcggtcttggcacaagctgcagggagcagccctgcttctgcttctgggaaaggggaggctgaggcctggacaagggaaagactggccacgagaaccacttgtgagggagtcttctgttctgaattcatgtagagtgtgcttccttttctagatatttctcttgagcagtattcctgttgctgcctgccagccttctcgtcctctggtcagcgtgctgtgccactgtcagaggcattgacgggattggctcttaaaaaattattaaaatgtcttgaaaaagataaatcaggccgggcgtggtggctcacgcctgtaatcccagcactttgagaggttgaggtaggcagattgcctgaggtcaggagttcgagactagcctggccgacatggtgaaacctcgtttctgctaaaaaatacaaaaaattagccgggcgtggtggcgggtgcctgtaatcccagctactcgggaggctgaggctggagaatcacttgaacctggaggcggaggttgcagtgagccgagatcacgccactgcactccagcctgggcgacagagattttgagattccatctcaaaaaaagaaaaagaaaaagataaatcagaagaggaaagaagttctagatgatagagaagaagccttgtgggtgaaaggaatgcaagccgcctgggctgggtagagcggggcgtgccgccagcacccttccccaggggctgcacccggggccggagctcctgctgcacagccagaagcaagctatgcaccttcgcaacgccgagacacgtcgtctgtcatgagttcacttccagatcgtccttgccagtgtctgccatgtgctgtgtgtctgtgagaccctggcagtctgtcaggttaggggccatggacgtggaccaagtcctttcctgataccctggatccctacagatcccttgttatagctaaaaatacacattcttttctcagacaagtattcattttgtaaattacataccttggtagtcaaccttttaaaatctaatttttcaactttctttcttctgtaatgattggaaattctgattccagttaagttggtaattatgtggtttagcttttctaatttttaatgactacaactgtaggtgtattcacagttccggaacaattaaaagctgacattttgattgaaaaagagagtacactaaaaatcctgttcctggacaggagtattttggggtataagccattccatctcggaaatttcaggggccttgtagaaagacaaggaaggggcacccccttcagaaagggtttagggtcctgagttcctgggcaatgggagtccctcggggttgagggtttggagtcagaggtgtgtaaggattgcttctccacctgcgtctctgggtacctctagccagacactgctgtggctcaggtggagagcaagcggggcatcagggtggaggcctctcctgcaccattgcgctctctgggtgggtcagatgtgctctggaagccatgtgtgtgtgtgtctgttgccagcgttaggccaagtgcgatgtcatgtttgtgtgtgtgtctgttgccaacgttaggccgagtgcgatgtcatgtttgtgtgtgtgtctgttgccagcgttaggccaagtgcgatgtcgtgtttgtgtgtgtgtctgttgccaacattaggccaagtgcgatgtcgtgtttgtgtgtatgtctgttgccaacattaggccaagtgcgatgtcatgtttgtgtgtgtgttgccaacgttaggccaagtgtgatgtcatgtttgtgtgtgtgtctgttgccaacattaggccaagtgcgatgtcatgtttatgtgtgtgttgccaacgttaggccgagtgcgatgtcatgtttgtgtgtgtgtctgttgccaacgttaggccgagtgcgatgtcatgtttgtgtgtgtgtctgttgccaatgttaggccaagtgcgatgtcatgtttgtgtgtgtgttgccaacgttaggccaagtgcaatgtcatgtttgtgtgtgtgtgtctgttgccaacattaggccaagtgcgatgtcatgtttgtgtgtgtgttgccaacgttaggccgagtgcgatgtcatgtttgtgtgtgtgttgccaacgttaggccgagtgcgatatcgtgtttgtgtgtgtgtctgttgccgttaggccgagtgcgatgtcatgtttgtgtgtgtgtttgttgccaacgttaggccaagtgcaatgtcatgtttgtgtgtgtgtgtctgttgccaacgttaggccaagtgcgatgtcatgtttgtgtgtgtgtctgttgccaacgttaggccaagtgcaatgtcggagaggtggtgttgggtgtttccgccacatgttgtggcatggagggcccctgcttcccagcgtcctgtgaggggctccacatgatgtctgagctgccctttcttttattttgctgccattaatgtgtctctcttttttattctttgacctagggaagatttaggattcagatttatatcggaacaggtcagtcaccacccccccatcagtgcgttccactcggaaggtctcaaccatgacttcctgttccatggctccatctaccccaagctcaagttctggggcaaaagcgtggaggcggagccccgaggcaccatcaccctggagctgctcaagtgagtgtcggtgcgtcctgctgagatccgcttcctgcagaaactgaaatgggtgctggtgatgtggagggaaagcttccttcaggaggaaaccctgtcatttttctcctgaggtggggacctccccacagcagaaacgtcttcagatgagcttcctgaccagggtcccgtgttgctggggtgcgtcctcacgtctgcagttggaattcgcccccctttcggtcacatcattcattgtatgaccagggtcccatgttgctggggtgcatcctcacgtctgcagttggaactcaccccgctttccggcatcattcattgtatttcttgtcttttgctgcataactgtcccaaacttagcagcttccacaccaggctggcaggtgtctgagggccggggaccgtgaggttgcggtggcaatgagggttgggttgcccatggcgcctgtgtcctggctccccttctgggctgcttgctgcagggcactgcctcccacagggggagagagctgagaaggaagccagggaagtggccctttgcacactcccccaccctgtgctcatgtggcaggggtgacttagggttggaatttgaaacagcgtgggaggggaccctctgagaggctgcttgccacccctcttcactctcagcctaaatgctccccaatccagtgtcaaccaaagacacctcagagcaaaacacaagtctccaacaaatgccggccgctaagacccgacagacacagaccggatgctggcgtcctcctgggccaccagttctgagacgtgagtcttgccaagccactgcctgcagtcttgttgtaggcagcaggtcctaacaaatacatacagaaataagtaataaacgacaccttgcctgatgaagcatttgatttgggttttgcttcacattggccctgcctggatggtggctagaaggttccacaaggacctggagaagcccctgagagtgtgtcct

SEQ ID NO: 9113 - DNA, 6000 bp, Homo sapiens
gggattacagacaggcgtgagccaccacgcccggacaattttttttttttagggttctctcaaaaagatattcatactatcgtgacttttttttttttttttttaagacagatttttgctcttgttgcccaggctggagtgcagtagtgcaatctcggctcactgcaacctctgcctcctgggttcaagtgattctcctgcctcggcctcccgagtagctggtattacaggcatgcgccaccatgtctggctaattttgtatttttagtagagatggggtttttccatgttggtcaggctggtcttgaactcctgacctcaggtgatccgcctgcctcggcctcccaaagtgctgggattacaggcatgagccactgcgcctggcctgtcgtgacatcttaaaaatgagcaggaatcctcctaccatcagatactcactgtgtttagatttccactgtcttataaatgtctccatgaaatcctgtctgcctgtgtgtaggccttgtttgcatcctgtttcaagcgtcattttaattggtatgcctttttttttttttttttttttttttttttttctggagacagggtcttgctctgtcactcaggctagagtgcagtgatgcaaccatggctcactgcaaccttgatgtcccaggctcgagtgatccttccacttcagcctcctgtgtagctgggaccataggtgggcgcaccaccacacccgactaatttttgtgtattttgtagagatgaggttttgcaatgttgcccaggctgatatccaacccctgggctcaagcgatccacctgcctcagcctcccaaagtgctgagtttacaagcgggaaccactgcacctggccagtatgtcttttttttaaagacagcttttttgaggtataattggcatataatcaattgcacacatgtaacatgtacgataggttttgacacgcatgtgcacccgtgaaaacatcaccataatcaagatggtgagaagccttccctctccttctctctttctgtctttgtaattgatttgttggagagactgggttggtcgtgcatgggttttgctaactgcacccccacgttcgcaggtagtcgaacatggtgtgcccacgcctaagaagtggctgctcagtcaaagtcacgaggtttcctttctcctcccgggcgcctcctttttcaatgtggttgattttctgcagaggccagctctgctgggcgaggtgccaggggtccgggtgctgctgctgagtcgccgtggtgtggcctctggtctctgtacttccctaggttgggaagtgtgttaggctgttcctgggttgctataaagaaatacctgagactgggtaattgataaggaaaggtcgtttaattaggtcgcggttctgctctacgggaaacatggcgctggcatctgctcagcctctgaggaggcctcagggagcttttactcgtggtggaaggcgaagcgggtgcaggcgcctcacatggcgcgaggaggagtgagagagacgcctttaaagaagcagatctcatgggcactcatccttgcccaggaccaggaggacagcaccaagccgtgagggatccactcccatggctcaaacacctcccatcaggcctgcatccaacaccggggatcacatctcaacaggaggtttggtggtggggacacatccagaccatgtcagtagataaagctagaaactggacaaacctgggctcagtgttccgggcaaaactgcttcagcagtggcagtgtcatctctccccgggaggcacccaaggccgtctctcggggttcagtgcctggatgtgtgaattctccagtgtcgtctaatggtgatggtcacgcacctgtgtgccttgttcatccatttgctgggatgcttccataaagcgcaatttcctcacctgttacctggcgacagtggcacagcagtgtgtgtagggaaggcaggatgctatctccttgattgccagtttcaaaataacttgtgggcttactggcatcatccaccatgaccagttaatctcctttttaggatcttaggaactctggacttgaatgtattcaccgtgtttcagccttttcccatgtactggtgctcagattgtctcctctttcttgtgggagcttctgtaggttcatcctgagtcattcggtgagagcccctggcgtagcctgtgttgtgctgctacagcagtgccacaggctgggcagtttagaatgagcagcaatgtgcaggctcctcgttctggagtctggaagtccagtccaaggtgctggtgtctgctgagggctttcttgctgtcatctcatggcagaaggtggaagggcaagagaggagggaagagagcgggagagagagaggagagagggaaagggagggagaaggagggggaggcaaagggagggggagagagcacactaaagggggccaaactcgcccttttatttatttatttatttatttttgagatggggtttcactcttgttgcccaggctggagtgcaggggcgtgatcttggctcactgcaacctctgcctcccgggttcaagcgattcacctgtctcagcctcccaagtagctgggattataggcacttgtcaccatgcctgggctaattttttttgaatttttttagtaaagatggggtttcatcatgttggccaggctggtctggaactcttgacctcaggtgatccgcccacctcagcctcctaaactgttgggattacaggcgtgagccaacacgcccggccgactcacccttttataacagacccttttataaaacagcattaagccattcctgagggcagagccctcacagtcccaccacctctcaaaggccccacatcctaacattgtcacatggcagtcagatctcagcatgtgtttggagggacgcacattccaactctacaccccagtctttctgggcaggcagcttccttgctaccatggcaagaggagcccagtcctggattcagccgcgtctcctcaggaagccctggctcctcagtgctctgaagggggaagcacatcgctgcagttgtgaaggggacctgagtgagtgacagcaacttctcccgtctgcaagggcaagcacaccctggccgtgagcagggctgtctgcgccggccttcaggggctgccgcagtctggctgggaaggagggaggaaccgggagacactggagagtctctcaggggacgtggtggctgtcctgttgtctggagggaagcagctgctgctgccccgtgcggctgtggcagggctgcgggatgagccgcttgaggggtcacccagcactgggggccgttctcgccccggcgccctcaccctcagaactgtgcagagagctctgggctggtttttgtatttttgacacaagtaaggatgctgattttggcttccttctcttgtcgttcatcaaacgctgcttttcctgatgggagacactaatgtgcatgagttctagaatattgagctaaggtcgttgtgagaaaatgtaagtttacttcagtttatcctgggagtagctaacttacatagcagcctcaattctctagaattgatgttggtttcaggtagttgtgaaattttagacataattttccatttacttatacagccacttgttccagcctctggtgaatgtttgcaatgattttcagcaaaacttccagagccgtgtttgaacctcggatgctgaacacctcattgaagctcacctgctctctctgactgcccccatgactttttttttttttttttgagatggagtctcgctctgtcgcccaggctggagtgcagtggcgtgatctcggctcactgcaacctctgccttccggattcaagcgattcttctgcctcagcctactgagtagctgggattacaggtgcctgccaccacgcctggctgatttttgtatttatagtagagacagggtttcaccatgttgtccaggctggtctctgaacccctgacctcaagggatccacctcaagggatccaccggcttcggtctcccaaaatgctgggattacaggggtgagccaccacaccctgcgcccatgacttttcccaaattaatgttttattgttttcttacataactgtagataatgcttttaattttattttaattttattttaattatttatttgtttatttatttcgagacagagtctcattttgtcacccaggctgaagtgccgtggcacgatctcagctcactgcgatctctgcctcccgagttcaagagattctcctgcctcaccctcccaagtagctgggactataggcgtgcgccaccacgcctgtataatttttgtatttttagttagagacagggtttcaccgtgttggccaggctggtcccaagctcctggcttcaagtgatccgcccacctcagcctcccaaagtgctgggattacaggcgtgagccaccatgcccagccaataatgctttttagaaacaactcttgttatagggctgaattattggtctgttattcattgattgatcttccgttataaatgctccctctcgtttactttttgaaattatgtttgtgatgtgataatttattttactaatttgcttacatggaatttagattgattttaggatggtgaatgggtatttttaaaatgtttttaaaccgtgaaacttctggaagctaagtatgccaaaatttttttccctttagatcttcagtgtctattggatttttccaagagaaagtttgtaaaattccttacactgtagatgtggatcagatacgatgattcagtagaagagcacatgtcaggggcagtggaggctggctgctgaaggatgaacggagaggaagaattctttgatgccgtcacaggtgagtcaaaagagaaccaactggggacgtactggaagggtgaacgtccctggattcagatgttggacctggcgtttggggtgtaaagatgctcagtaaagcagtgtgtgggtgagcgttcacgatcccaaacacggactgttcagcaaaacctgacatccatctcagaggtgggaaaagccttgactttggctgacagggtttaagtctcccgaagagtttcctggggtgcggatattttcatttgtctcctgagatagccatcttcttcccctatttctgcttcatgatgagaacgttctagatatgatgaccctgtcttgcttggcactgcttgatgcatcccatcagacagcaaacccctgggtctgcagctgcgctcacagccgcagagtgcagttatttttttctttcgcacgatggtttaaagtggcggcatgcagcctgtggtctgaatgaaatcctgtggcctaattgaaaagaatgtgttttggcatccagtcactcaaaaaaagaagaaaatgaagaccgtgttgcagggctcatgggcatgtgacggggcggctagaggaaagggcaggcggggctggcagcttggccttccagagccgccccttctcctggcacagggaagagcctgaaaccctttgagctcgtgtcttgtcaggtcctcatgttcattctccactcttctgtgcctcggagtcagcatctggaattccgcttgttttttctggaaaggaccattgctggtgggaaggggcatcaggagattctccttgatgttcccttgtccttaggcgtcgggatcagaaaggagtggctttggaaatgtggccgcaggccaggaattagtgatgatctttagaagcacttctgcggttactgccgctcaaggatctgtcagggtctctatggccatgccccaaggacacggcgatggctccgttggcacctccagtctgtggccctgccagggtgggtgtgtcaggagggtctctgtggccacaccccgaggatgttgatggctctggtggcgcctccggtccgtggccctgctggagcgggctgattgtcccgaggctgtgctgctcctgtac

SEQ ID NO: 9114 - DNA, 6000 bp, Homo sapiens
agactccatctcacaaaaaaaaaaaaaaaaaaaaaaaaaagtaggaatccagacttgtatctttggacacccaatgtggagtacaaggcctagcacactgagtgactgcttgatcaactgatgcattcttaaaaagtgaaaaagcaattatttcctacgtggacagaggaaggtagcacacatctgacctataaaatacagactgtttttattgtcttagactactttttgaaaaaagccagccagctctcatcaggagcaacactatacattttgactaatatttttcagctaccaatcattgtatttatagattcaaactgactttcaacaagcctttggattactttctgtccatctcctccattcagaagtccaatcagttcgctatacaaaaagttcactatacagaaacccaaaccagctaactcgtttagtaaataacaaaaatatccatccatcatttatggcctgcaaagcactcagggattcctagaaacgcatttgatcctaagtatcctatgaggcaggtgacattgtcccgttttataaatgcaaagagttaactcattcagggtcacacagctatatatggcagatctgggatctaaaccaacattaattttaaaattaatgctctttcctttatgtaaccctatctcctaaagatcaattatgaactccaatgctcacttaaggaaaagagagaattgtcaacttttaaaagaactatacaaggttgttacagtgaaattttaaaactggcctattaagctaatgttatctagctttaaaaataaaaacaaaatcaaggagttaaaaacagcataaaaacatgccaaagacttaccaaaatgtcaaacaaattttaaaggaaagctcttagctgagggcaaataataataatagacaggactcatatctactttattgtagccttcaatcttcttgtcctggtcaaggccattcagaaataacctcctgttggttcttttagggaaaacaataaaataaactaaccagtacgggaaaaacttacataataaagaactggccagaatttaaaaaaaaaaaaaaagttaactaacctacaatctgctaggaatgacttgaggccactgatcatttacatctcattacaagtatcagatacatataaccacacctctattagaaaatcttttagttgagaaagcagtaagatgattggccttcagcacacatatcatgagacagaaagcacttttagtctgtttcctcaagtattccccttagaaaaattccctcagaatccagctccaaccgttagtttctccatcatgcaatacagatgactgctaagatcatattcacatagagatcaaaaggattctaaagcttaaaggttgctattatgtaaccataatttcttgccccttaactagtgaattgtcatctttccctagaaaaatgtagaaacaaggaacttaaaagtatctctacaaggaaattttagttcattctctaaggtaccagcatttaaaggaaaactcagtttgttgacaccgaaagagcaggtagcacaacaggatgttttaatttagaagtttctctctatttacgtagatatatttcctcatttcctccctgccaacaaaatgagaaaaatctgaacatctactgatgaagtcgtaagataaacaaaaattaatggtcacaatcaaattctattagatgaagaacctaaaattctatgccaaagtaactgatgactttctccctagtatgaagcaagtactagaaaaactggattgttcacaagcttgcttcctgatgcatgctagcaattatcatccctacaggccagaatgggtatatgctccacaataaattgtcctgtatctatcttcaaaaatagctaatattcccattcaaacgtttactttattaggattggtgtaaagaaaaattaaggactaaatggtgttcacataaaacatatacatgtgctgtctctaccacatgcagaaatctataatatcattcctcagaaccagatcacctggtttcattcctggttctggcacttaccttgcgctgtgtgtgagacctcgggaaaattatccttctcagtgccttagtttccccatctgtaaaatggggctaacagtcttacctttcattggttgttatgaagactgagctaatatgcttaaagtgcttaaaagaaagcttagcacacagtaagtactgtaagtggtaactattattatagactaattgtctgataccacctcatcagttggtgaataaatcacaaatggatggattctatataaatgtccatgaatagcatatatgctatgtctaatctatacacgtgtatattcatgcagatggtcaataacatctattgaaccccaactatatcccagatgcttattttcattattgagcttgtcgcaacaaaaatatatcaaaagctgcattaccatttgtgctatatagacgagaaaatgattcagaaagactggatttgcctatatgcaaaataaagtcctataataatataccattttttgaaagcaacatgtgtacaaagcagggtttagtgtcatcagatgttaactggagagaaaaagccattaatagtgaactctgattaaaaaacaaaccaaaagcttatatttaacaatttacagtttataaaaaaggcttaatgataaccctggaaataagaaaaccaagaaccagagattaacatgctgaagattcagaaagctagaaaatattgcaggcaagatttcaaccaaatttacctgactccaagtccagtgctcttcctgcttctctatccacagccgaatgggcaaaatgcactttttgtagcggcccaaatctctggagactctgcctagagaaccagcatcatgggaatttgctcagcctggttttatagaggctgcctccctgatctatagcgctccaattctaaaatggcttcaatataacaagcactgcaagatgtgaaatgtacaaaagattacagggtaggcgtcatactccaggggctggcaatccataaatatttgctactgatgaatgaggatattcagtttgaaaaaaactaggtgtatagtctaggccaaatcacctcatttctcataaagacttcatctgcaagataggtgaatggtttcttatctcattggaaggacaggccaggaaaataattctgcagttgctacaggattattagccttccattttgaaagccacacttaaatttctaacttaggtccaataagattgacaggttttacactcacacaccgtgtgttgccaaggacagggatccaagaaaaatgagggctcaaacaaatgagatatccctaagtaagaaatagggtacactggaagcagtcaagaagaaattcaccaagaacaaatacttatacacatttccaaatgaaaatgcaaaagctgcagtgtccaggtctacaaactgcatctgtgtctggcttcacatgaactgacagaatgagaaatgcagacaattttcatattcttataagtgcttcacctttctcttttggttcccgaggctgattttatgttcatagcatcatcttgccaaattccatctcccacacagggcaagcaaaatcaggacctgatgctatctagccttaccaaagagaaatgcaatgaaggcaacgacaagaaacatgtattttacagaaaggttggcaaattgcttaccaaggctgccacctctgaaaaccccattatatgggagttctccatttgcggcaaagatgcactcaccttcccacctcttcttccctccgctccccaccccccgaccaggaagccaccgggcaaatttcagaccgaaaaacgtgctaacacacaatatgggggaatttggggtaaagacacaaaagaatctggcattaaatgacggtaaatactgtgagaaaatactccgattctcaccccctgatattttttcctggggatccggcctgactcagtaaccggctccaacaaacagattttcttgattcaaacccaattcccttcctagggaatcttgggtcctgccaggctccataaccagtgaaggatgatgaaatggttttactgcaaaatgggagggggttcccccactgctgtctcccaaggttaaaccccttactcatccaggaggagccaaacacggggactggggctagaaaactcatccgcgtttgattaaattttaatttctggaaaccagaaagcacggagcagaggtgacagggctgaaggggacgttcttgccgaccaagacgcagggaggggtcgcgtggggcccgaagcagatagtgagggagggtccgggatccccggctccgctgtcccttacggcacagtacggagttgcaccccgcccggccggcaggacctcaggcggcccgagcctctccaagaggtaaagggcccggccccggaaacagggaggggccgctgcgaggtctggcctcgccgccggcggccgcgcggagcgaaagaggcagcgcgccgctaccccacggggcccacccactgggccgccgtcgtcgcagcagccagagaggggcttcgagtttgggcccccgggggccccggtcggaccccgcgccgcactcaccgtgggagggctgcagggaacaaagacccttccgagcgaagctccgagcgagatgacctcttccttcctaagcccactactcaggcggcggcagcggtgcctgcagtggctgcagcggcggcggcggcggcgactaccccggctccggaatcggcggcggcggtggcggtagctccacttccgctccgatcgccacttccgctccggtcctggccgcgccccgccccaaaccgtgttctcattgggcaagcgaggcacggggttgccacggccccacgggaggggcgcagacggaagggaggaggaagaagagcgaaaggcagggttgcaggggccggggcagggcggatggccgggggagggacccaggaggaggtgggcggagaagaaggaaatggggcgggggagcgggaaaaggaggtgggaggagagagggcggagctgggggtggtcaagatacgggctgtgtgggaataaggaggactaggagtgtggtctggatggggattgccctttctgctgggactggaaacgcgccagggccagtcccggagattcgaggtttagcagttccccctccaccccgaaagtaatcctcactgggtcggaggccgatgtcagtcctcttactgtgtgctttggtaatgctggagccagggaagaacagaaattgctcatccctcaatgttcatttaatcctttcaatccttcagggtacttaccttttccttctttggtagactgaagaggccacgtgaagtgccaggaatccaatgcacaaacgtctttttaaaaaacctgtgtagggtcgagcgcagtggttcgcgcctgtaatctcagcactttgggaagctgaggtgagaggattgcttgaggccgggagttgtaggctgcagtgagctatggtcatgccactgcactccaacctgggagacagagtgagaccctgtctccaaaaaaaacccacaaaaatctgtgtacatgatttcttctttaagatgccccctcgttgaggaagttcagggaaggaaacaggcctccatggctcccctcccctccatgactgctctcacaattaccaacattctactcctctgaaggtagttgattttgttttgttttgttttgttttgttttctgtttttgagacagagtctctttctgtcgcccaggcagtgtcacaatcttggctcactgcaatctctgcctcccaggttcaagcaattctcctgcctcagcctcctgagtagctgggataacaggtgcatgccaccactctcggctagtttttgtatttttagtagacacggggcttcgccatattggccgggctggtctcaaactcc

SEQ ID NO: 9115 - DNA, 6000 bp, Homo sapiens
agctctgggagatgcccaggcagtgtcctcaggggcatgagcagcacaggaccagaggcctggggtctgtttcagctgccccacgtgcaaccctcaatgatcatccagggtgttgaaatgcaaggagttgccaagggaggggctggcagaagggctggattgtgggaacaacccaggagtgaccctctccccagagtgggagattcagactggggacagtcttcttcttttggatccaggtacttcaggaccccaaattggcaagtggtcctcccggaatgaccctgttttcccacccttcactcctaggagcaggaagttctgttcttccaggaaaatagattccagcatgtaacactgggcaagtggcctccctctctgagtatcagtttcctcatgagtgaaatgcaaggtaagggtccatggcatctctagttactccaagagtccatcagctctgagcgggaggtgggttcacttggtgggtggcgggatggagagtcagggtgcaggcaggcaggtgctttatgcccaacaactccacccgcctcctgatcattctactccaggttttcttgagcgtcactgtaccccacccttagtcccttccgatcctgtgaggttgacctgctccaaggctccaggcctggacacaggatccagcctgaccatccacagtagctccttcctctggctataatagttggttcaggaatgactgtacggctcaagctggaacttttccaagaactattaggaaagaggcactcttaaaagaggttactgagttgatagattggagctgctgttgccagtagtggtggtgattatggtgggaactcttacagaatgaacccaaaggaaaataaggaaatgaaggaaaataagagcctggagttggaggaaaaaaaaaaaatctaatatcatttgagcacctggatccagccatgcctgaagctcgatacccctaaaattttcagttaaattggccaataaattccctttttacccaagctatttgaacaaaagccaaagtatccaggtggatataagtttattctccgttctctacctccatggtagcagcagacaatgggaaaatcaacatgggttggtttgtttttaggatttggaggccagacactcagaacaactcacacagaacttcctgctgcccctgctggagaggaaaggggactgccttcctctctgctttgggcctgcagctcctattcattcaacataacactcatgaggacccactgtgagcctaaccttaggacaggcaacaaacacagaaatggaaagtgtgacagcaaacctagaagagtgttcagtctagacggtgaccaaggcctgcaaacaagcctttctaatgcaggatgagtgctttggtgagggacaggcaggcaggggcctttgagctcccagaggcagaaggcctactcccattgaagtgggagggacagatgcagaaagccttcccagaggaggtgatccctgagataagatcaaaagacaggcagaacgaagctgggacaatacaggtggggggaagtttttaagcagaagtttcctgctaggagcatagacactgaggcctcagaaggcggaaagcatgcgggggagtaaaaccaattccaaatgataaggtataaagtgccagggaaacagtgatgagaatggaggccacatccggcaggggcttgtaaaccacagaaagagttggagttcaaaactgaagaattttaaacaaagaagtcagggctggattgtgtcttagaaaaatcactctgggctgggcatggtgactcacacctgcaatcctagaactttgggaggccgaggtgcgtggatcacctgaggtcaggagtttgagaccagcctgggcaacatagtgaaacaccgtctctactaaaaatacaaaaattagttgggcatggtggcgtatgcctgtaatcccagctactggggaagctgaggcaggagaatcacgcgaaccggggagatggaggttgcagtgagccaagatcatgccactgcactatagcctggacaacagagcaagactctgtcaaaaaaaaggagaaagaaagaaagaaagagaagaaggaaagaaagaaagaaaaaaggaaggaaggaaggaaggaaggtcactctggttgcaatagcaaaggccaattaaccagagttcacttctgaggctgttgttctccctacaagagaggaagcaccccggtctaagagagtgatggtggggtgtcttagcccattcaggttgctataacaaaatgcactaagctggggggcttataaacaacagaaacttatttctcacagttctggaggctgggaattccaagatcaaggcaccagccgatctggtgtctggtgagagctccctgcttcatagacggtgctttcttactgcaacgtcacctagcaaaagggaaggccagctgtctaggacatgtttgataggagcgttaatctcattcccaaggcagagtcctcacgagctattcactcccaaaggccccaccttctaataccatcaccttgttgactaagtttcaatagatcaatttgggggcacacaaacattcatatcatagcagggagtaatgatgacagctgtcactggttgagcatgtattatgtgaaaggctctgtgttaacctcactgcaggaatcggtcttttagccactgtaacatcactattttgacagaagaggaaactgagagacaggttaggcaacttggcaaaaggcacacaaatagggggtcaggaaagccaagattccgatccagatgtgctggctccagcattctgagtagtgaagaggtgacagagggggaaatatctaaaggatcatgttggaagaacaggtctgattggatggtaaggtcaggagcagagtgagggatgagggaagcctcatgtttcccaggcagggcctgctacctaatttgtggaactcaatgaagaatgcaagtgctgagtactttgttccaaatgtattaagaatttcaagacagtgctggcagagtgtaaaccaagcatggggcccatctaagcttggggcctggtgtaactgcctcgttgggattatcaagcagctcagtcaagacaatcataatgacgaccaccattcacactgcccttctctgcacccagagctgtgataagctatcagtccacattactctcacatggtcagggtgctatgaccccatttacagctgaggcaactggggccaagcggggcacgcagagctcagagcatgtgggaaggctcaggggaggctggaggctgataaccagctgcttttcctttgcctgcaaaagccccacacctggtataatgttctcagtccccagatgagaccacagttcacagctgcccagaagcagcctgccccaattcaaaactctatcgggatttgagagaacaaaaaggaaaatactaaacagccagactggcccctactctgaggaaacaagcagggagagaggaaaagcccaaacagctggcagaacataaaggcagcccatgcaggaaaggccccaccaactcctgggcaccttctgcctggagaccatgtcccccagggacaaatccctgccctagaggagtttatgctccagtgggtcgtgggaggggaggtgcaatgacaactataacattgacaacggaaaatatttatttagtgctcgctctgtgccaaccttgctctaactcacctaattttcatgccatgtgaagtaggtggtattattttcctcattcaggaggaaatgaaggcacagagaggttaagtgacttactcaaagtcatacagctggtagatggtagagccaggatttgaacccagaagctgaaaacttctccatccccatgctgaggactcacacgcattcctcctgcaagagataaggtttacccagtttacagatcagggtgtggaggcccagagaggcacagctgcccaccctaggtctcgtggccagctgtcggggagcgagatctagggttagcctcctggcactccaacctcctctccccactgcctcctctccacatccccactccagcagccccaggacaatctgccccaggacatgacaacttctcattactgttacaagcaaccaagccagggccatcctggggcataccactttcccctggccctgagggagaagagaggacaggaagcaactcccagctgggttgctcacttgccccaccttggaaggattttctgtgtctccagaggcaaagtggattcgctgggccctccccagcctcacccctctgcctcctcccctccctctgctctctccgggggtcacttgtactccaagcgctaacatggaaccagagggaggaaggtgcagcggggagagaaggggatggcagcgggactgaaacttgagatcttagacttggggggcaggggatgggggtggagggaaagagggagaccaagacagagacaggaagggagagttaagttgcatttggttttccaaagcgggcagcattggagcttggcgtttgtgtgtacatgaatgtgtgtgcgtgtcagcgtgcgtgtgagtgtgtgctcgtgagtgtgtgcatgagtgtgtgcgcgtgtctgtgtgctgttttcttccctcccctccagcagggaagccaggcctcactggataatcagagggctcagaggtgaggcagacagagcaaggttggtgcacgcttagggtaagggcgacgtgccaccaagactgaggaaggaggaagggaaggagtgaagaatagaggtgagagggtgtcgggtggggccggagggaggcggtgagaggaagcaagcagagcagccgtggtattcagagcaagtataaatagctgcctggacagagctcggccagacagaggtttgtagctgcagctgcaggcaagcctggccactgttggctgcagcaggacatcccaggcacagcccctagggctctgagcagacatccctcgccattgacacatcttcagatgctctcccagctagccatgctgcagggcagcctcctccttgtggttgccaccatgtctgtggctcaacagacaaggcaggaggcggataggggctgcgagacacttgtagtccagcacggccactgtagctacaccttcttgctgcccaagtctgagccctgccctccggggcctgaggtctccagggactccaacaccctccagagagaatcactggccaacccactgcacctggggaagttgcccacccagcaggtgaaacagctggagcaggcactgcagaacaacacgcagtggctgaagaaggtacggggcatgggaggtttgcagggggcagagggcggctttggggtctgtcacaatcagcaggtggagtgtccatccaagaggccttccctgagcacagagggctgtctctgagctgcacaaagaggggcaggggtgggtctgaggccacacagcaagattgggcaatgtcagctggcaacctggctctttaactgccgtcccttcattcatccaacagaaatccattcagccctgaccaagggctgaacggaccaagccttcctgggtgctggggatacgacagtatagtatgtctccctctggactagtaggggaaagaggcagtaagagataatctactatgtcagatggtgaagcaaaatgaagaagaaagagggcaagtggcggccctgggtggctgcttgaggtcagatcattagagagtacttctcagaggaggtgacatttgaacccagagaacaagggaaatgatagagtgggccaggcaggtatttgagggaacgttctgcaaagggagctgcatgtattttgaccgtgaggagggaatgcatccgcagcggtgtgtgcctggagaaccatggggcgaaggcctgtgtagctggagcagaggagagggagcaagggtgcggggaggtctgagaggtgacagca

SEQ ID NO: 9116 - DNA, 6000 bp, Homo sapiens
tgaagctgcacatacatgtacacaaatgcactgcaacgtatatgcatgctgggctgggcatgggggtgcacgcctgtaatcctacccacttcgggaggtcaaggcgggaggactgcttgaggctaggagtttaagaccagcctgggcaacatagcaagaccccatctcgccctatctcactcaaacacacacacacacacacacacacacacacagtatatagatatatatcttttatggcacttatcacaattgcaattaaaattattattatgcaactattagataaggtagtaattaaataatttaaataattattagcataattatttgtttaatgttaccaaactataaactccatgaaggcagagaccaggtctgttttattcatccctgtatttgtagagctgggtacaatagtgagcacttggaatttacatgcaataaatttatctatcaagtacttattacatgcgatgcactctgtatatgtccaatctccaatcttcatcacaattgtgcaaagaggtgttaattattctctccctttttttttttttttttttttttttggagacagagtctcgctccgtcacccaggctaaaatgcagtggtgtgctctctgctcactgcaacctctacctcccagattcaagcaattcttgtgcctcagctttccaggtagctggggttacaggcgtgcgccaccatgcccgggtaatttttttaatttttagtagagacagggttttgccacgttggccaggctggtctcgaattcctgacctcaagtaatcctcctgcctcagcctcccaaagtattggaattacaggcgtgagcctccgcgcccagcccattactctcattttttgatgagaaccttgagggaacatacccaaggtcacataaataaaataaggacaggcgtttaaacccaagtcaggcaatgcttcttccgctccactccactgagctgcctggttcttggcatcctccatctcactggactgtgaactccaacctggaagttcatttctgacttcccatcccttccttctctggatccacatccaccacttccctcattcattttcttaagcatccctctccaccccccaaacttgttcttagaatgcattattcatacccaggtgtaagtggctgaccacttaaatttcccatggggaaacattacatatttacaaagggtaaatgatttaagtgtacaggcccaaaccctatggatggaattttaggcatgagctaaccaagaaaggagaaatcacaccaagaagtccaggcacataggaggtgctattttcagctccaacatcacatcctcagggaagccttcttcgatctccttatgttgggttagattccccacccacttttttttttttttttttttgagatggagtttttgctctgttgcccaggctggagtgcagtggcgagatctcggctcactgcaacctccacctcctgggttcaagcaattctcctgcctcagcctcccaagtagctgggattacaggttcctgctaccacgcccggctaatttttgtatttttagtagagatgaggtttcggcatgttggccaggttggtctcgaactcctgacctcaggtgatccacccgccttgccctcccaaagtgctaggattactggcatgagctactgcacctggcccccacccaccatttttgacaagaggcctactcactatgaccttgagtaagtccattccccttcgtaagcctcagttctttatctgtaagatggggagaggatgcaaaggatacctatctccttcctatggctggtgtgagaatttattcattcaatcaacaactatttacagaacacgaactttttgccaggcatctttctgggctctgggaaggggaaaaagagacgataaacaaataaacaagaataaaaatgtgtgtgttgtgtatgtgtgtgtatatatatatatatatgcaaacacatacacatatacatgcatatacacatgtatgtgtgtttgcacatacatacacgcatatacacatgtacataaatatgtgtgtatctgtatatatacatgtacccccccacatatatatgaaacatgtcagatggtgatgagggctacagagaaaaataaagcagggtagagaggatctggcatttcagggaggggtttttgctacttcataaagagtggtgagggaagacttcagagggaaagtgacatttgagcagagatctgtgagtgagctacacagccctttgcaagggagagggcttcaggcagagggaacagcagtacagatgttctgaagccgagtgagccaccggggtgtcctgggtatgaagacagaggggtggcagagccaaagaagttaggaccttgtagaacatggactttgactgtgagatgggagggtttggggcagagaagtggtcagtttctggttacattttgtgtatagaaatgacaggagttgctgatggattgaatgtggtgtgtgtgagactggagtcaagtatccaacatttctgatccaaacaagtggaaaaatggagctgccattgaccaagatggggatgattataccagcactcttaaccatgacaccaggctgcctcaaagtctagatctggtccctgggaaggggctagggctcaggagcacctgccgaaggccagcactgtgctaggtgttttgcacactgtgatgggcagatgtgtcagaataactccagtgatccttgcccttatgtaataccttgtgtgatcccgcccttgtgtgagcatgggtggaaactgcgaccctgatcaggaatcgctaccgtgattatattacattatatgtcaaagggacatcatgcgagtggacctgatctaatcacacgagacctttaaaagcagaatctctcaggccagtaagcagaagccaaggtagaaagattctactgaaggatgagaagggcttgacatcctgaaactggccttgaaggtggaaggggccaggtgaaaggaccagaaagccacttctaggagctgaggttgacttctggctgacagccagcaaggaaacaggaacctcagtcctgcaaccacaaggaactgaatcctgccaacaacctgaatgatcttggaagcggattcttctccagagcctgcagagaagagcccagtctggccaatactttgtgaggccctaagcagagaacccagctcaggctgcccagacttctgacctacaggattgtaaatcactagattggtgtttttaagctgcttcatttgttatgcagcaatagaaaacaaacacctgtgttatcttacaggcagttcacaaccatccaaaatggaaggctcctgtccccattgtacagatgaggaacaggacccatgggataaagagttttgccataggccacccagaaagacagcaccacagctgagattcaaactctgggctgtctctttctgaggcctgaactgtttccatgtcgccagatggcttcataaagaggtgtgcgagcagctgagaaggttgtttgacatctggggcctgattaggtgggcagggaccctcacgtcccaggtcacatgcagggaatggaacacgggtttccgattcgctcgtctctgtcctggggctgtgagtgtctgagcccgtgtgtgtctgaggactgcgggtcgccgagggtgataatgggagagtctgtgagtgtgagcctgccaagtgtgtctcagtgtacctgagtctgagggtgtcagtcaatccgtcgggatgcacccacactgggagggatggagtctgtgtggctgtgtcttggcgtgtgtgtgctactctagtgtgtctgagggtgaaggtgtgtgcatctggccgtgtcagtcagagtgtttgacagtgctgagatgatcacagggggaggcgacacagagtgtgtgctgggtctgggcttgtgtgttcatctgagtgtatgaatgtgtgtatgaattctggggtgtctttggtaagtgtgaatgcatgagactgtgtatgcctacctgaacttcgtggggttttgtggcatctgagagtctccccgtgagggaggccgggcaccagggatgtcctgcctacctccctgagtgtgtttgcaggtctctgcgtgagtctgcgtgtgtccgtggacgtgtctgtccccgcatctgtgagggggtgggtctgtgggtgtatctgtccgggtgtctgcggggcatgttgcagagtgaatgtgtaggtgtgggtgcctgtttgagcttctctgtgggtgcaggtgtgaagccgagggtctctgtgtgggaggccgagtgccgacccgcctgggcgggaccctttgagcgcatcccctccgagcgcgccagtgtctctgggagaggcctgtctgggtgagggactggacgccggcctctccgcaagtcggccggctgagggtgggggccgaggcggggtcgggaacagccctcggaccagggcccagacaacctcgcccggcgcctgcctccccgcgcgcacctgccgggcccgggggctgctagaagaggccgcagcccgcgccctccgggctcccacgccccgcagcggcgccccctcccccggcggcacggattggctgcggcgccgctccaagcccgcctcgcgctgccggcggggggcgccgcggaccagagcgcgctgcgccgccaccgccgccgccaccgccgccgccgccgccgccgccagcagcacagcgcgcctcgggctccgcgcgccgccagctcctggcccgcccgccggccccgccgcgcccgccagccccgcagcggagcctcggcccggccccgggccgccgccaccacgccgcgcgccgtactccgcgtcaagaatggggcggccaagctgcccaagccgcccgccgccgccgccgccgccgcggccgaggcgcccggcgccggcgcgggcatggagcgctcgcagagccgcctcagtctgtccgcctccttcgaggcgctcgccatctacttcccgtgcatgaactccttcgacgacgaggacgcaggtaagcgcgcggcccgccccccagacccccggggtgtcccgggatccaggtccggtagccccctccccgacccgtgcgccctcctccccacccccaatcccctgggaaggcgcccccagggtctccttccgcacccacgggaccccagggtctccaggatgcgctaccttctggccttctcccccagggaccccgagattgtctgcattcacctttcccgcaggtgggccctttgggtcgccaggacccatctccctcctcacccgcgcctattggaggccccttgcctcgtccctggagccgacctgccaccctccctgagtctcctgaatgtgcccactcttcaagccctgggctttggccgtcccacccctggggctccgacgcgccccccgccattggaggtggcgcgcagaccttacctctccatctttgtcttggccacatccagaggatccctgcccaagacccctgcccggcgccccaggccttgagcgcccccatttatctctcctctccttccctcatgggctggggctccagactcctgcttcttatacgcctggggcagacggaggggaaccggccaggtgacggcctttcctcccctctcttcccggagagaggtgtagggcggcgccaactctacacttgtccgcccgctggtgtgtgcccctgacctcaggtgctcttgtccctggagtcgcctttcttggtgggctgaagccggccaccagccagcggcttgaacctcctcctcccaggcctgcgcacaacctcagccagagcgaggggtggggagctgtagggaaacctactctttagggccctgggacccggcagaaggaacatgagagctccggatttggttctggggtgaggaagggaatccaccaacaggtggggtagctagagggcttgggtgagagttcc

SEQ ID NO: 9117 - DNA, 6000 bp, Homo sapiens
acatgaagctcactgacctcgccaaggagatccagacactgaagggcctgcggcacgagcggctcatccggctgcacgcagtgtgctcgggcggggagcctgtgtacatcgtcacggaactcatgcgcaaggggaacctgcaggccttcctgggcagtgagtcccctccctgctgccacgtggccctgacgcgcctgcgaccgccccttccctcctggcgcagagctgaacctgcggggtttccgaggtgaaccgggcctctctaccgggagcaggtggccccggctgcagatcccatccctgtctggtctccagccaacagggggctggcgtcaggtctgggccaggccagagccttgtggctccggggctggagctggtgttcgggggcggtggggggcgcggtcccatctgggtcaccagccttggtctaatgtgacatagacccagcccagcctctggctcttctctgccctggtctttgtcgggggcctgggccggctgccgggtcactgtggtgagtacaggaccctcgccctgtctcacttggggcttcccgtggccttagccggccatgccatcctcgccacgtcttagagatgaggaggctgaggcatgggggaaggtgacgtgggtggacgctggcctcaccggccgttggccccgtgccctaaaagaccccgcgctgtctcctgcagcccccgagggccgggccctgcgtctgccgccactcctgggctttgcctgccaggtggctgagggcatgagctacctggaggagcagcgcgttgtgcaccgggacttggccgcccggaacgtgctcgtggacgacggcctggcctgcaaggtggctgacttcggcctggcccggctgctcaaggtcagcggaggctctgggcccctgacccagagggggtgggtgaggggaccccggtccacctgccctaccaggggccttccctcgcccccaggacgacatctactccccgagcagcagctccaagatcccggtcaagtggacagcgcctgaggcggccaattatcgtgtcttctcccagaagtcagacgtctggtccttcggcgtcctgctgcacgaggttttcacctatggccagtgtccctatgaaggtgggtccccaggcagccagagggaggatgcaggctctgcccaggagtcactggccccgggcctggacgctgtcggcaaggggttggagggtctggccaagggcaggcagatgacatggggggctacaggaggcctcctccatagggacccccaggcagaatcgaggcagctcttgccccgcgcctcccagggatgaccaaccacgagacgctgcagcagatcatgcgagggtaccggctgccgcgcccggctgcctgcccggcggaggtctacgtgctcatgctggagtgctggaggagcagccccgaggaacggccctccttcgccacgctgcgggagaagctgcacgccatccacagatgccacccctgagtcctcacgtgacccaacgctctgggctccagccaggccagcccctcctccctgcagagcgccaactcgaagggatgccggtctgccggaccgaggagcctctggctgtgggcctcaggccctggcgtgcacacatgttcgtgcaccaggcagacgtgcagacggagggctggggctgacgtcccccgtgcagtgtgactcgtgcagacggagggctggggctgacgtcccccatgcagtgtgactcgtgcagacgaagggctggggctgacgttccccgtgcagtgtgactcgtgcagacggagggctggggctgacgttccccgtgcagtgtgacacgtgtccctggcctctcaagagagacaacggcacaggagggtgggtagaagcctcggaggctctgggtgaggaaccctgagccctgtgtgtctcctgcctgggtcccctggactccctcccagggtgaagagccaaaggcccagttctctccctagtcccagcttgggtttgtggaaatgaccagtgctgactcccaggcagaccgtggtgttgaccccactggatgtgtggtatgtaggcacggggtggcaccgtcacctgcccctcacagacacactggcggcctgtgcacaaacccactcacgcacacagcactcagtaagccgggactgacccactcagacacgcacacaggcgcacatcacacacaggctcagccccccaaacccagacccaggagctggagcgtacgggtccacgtggctagaaaatgcaggttggagcggcccccatgccgcccggacccccagcccaggacatcatggtgcccagagagcgtgagccccaagggcattggcaggagctgccgattccatctccctgggtgggttccaggtggcacaggaagggtgggccgggaggcttggtgacctgggagctgcccttggaggctatttccaggggcctcagggtgggccgtgggggatttggagtcttctgcctgtgcagggtcaggcagggtcggttgggggctcggaggtagatgccatggtatgctgggcagcaagtggctcaggaagcctctgggtgtgagtcctcgggggtcaccaaggcaggagggggcagggatgtgcagggtccgccctcgtctccccacgtctggctcagggaagcttctgctcaggtcttcgtgaaacacgtcaagaagcaagggggccggtggggtctgtttgtggcccccggagaccctgccccccaccctcctgggagcccaggttggcagctgtgcccagaaggctttcggggacagaaagtttggagacaagttcaggcctgactgagtccttgtcccctagagttggggtcagctctgtacctgctgagccgaagtgctgatggctgccgtccacaggccccggccaaagcctggctcaggagggagctaagagatgagactcccgtgtgcagagacaggtggccccggggaaggaagaggccactcggaggctccgagaacggaggcagcgcgggggcttcctggggcccgtgcatcggaggaacaaggccaagcggagggaagcagcaggaaccaggacccctgcagatggtggaggcaagaggctttatctgagcctttgggaccctggccacctgcccagctccatctgcatgggagaacctaggggaggggctggttctggtacctgggcccactgaggccttgagctgagcttccagttctggcaggtccccagcacagcagcctgggggctcctctggcacagaaggcctcgccctctgtgctctctgcagccgccactgggattaaggggaccaggtgtgtctgtggcacctgtgccctcctaggcatctcgccagccaccagctgaacaggtttggtgctcctgggtatctgggaggggctggggacgttcctgcctcctggtgtggcttagactgaaagtcctgcacgtccgaactcagggatactcgaggcttcctggacatagactcacgggcccagagtctggccgggctctgagggacgctgcccggccaggtgccccggcaccctccttccgcattccccaccccccacccctccccctgcatcctccccaaccgaccccagacagagctgggagggcctgagggacactgcccaggccggcaccccgctgcccctccccaccttggtcagcgctgagctgggctgcccagaaatctatgagcctgttaaataatccagattattgttcttaatctcaaaacaatgagtggaaggtgccattatttctctttgcaataaaaataaaagttgaaatacgcagtttagggactttccttaccaccccttgcagactttgaatttcccttcccgccccttcctgcccccttgtggctgccagtccaggtccctgggttggagctcccgggtggacacagtagggtcagtgggagggtggggcggggaggggcctccagggagggggtgtcccgagtctcaggggctggggggcaggcggccgtcgggtgcaggtgggggtcacggcagggctcactcaggcatgagtcgggagaagggaggccagctggaagggggcaggggtcctgcgggctggacaggaggaggcagaggctggaggcgggaggggctgcctgggagggacctgtggccttgggccccagcgccatgggcgcttccaggccgcactcacggtccttgcctgccccctggcgtccgtgtggaggaaggcagtgcccgtttcttcagccgtgggtgcccctggctctgcctccccggggatcccccaaaaccctcgggccctcctcttccgggaagtcctccgggccgacccacacagctgtcgctgccctgattccactccctcttccctgcttggcccttacccgagggcgggcctgcccatgaggccgctctcaggacgcctgcccacagcagctcctgacattgggccctgtgctcaggggtggagtctggggctgggtgagggcaccgacgggtggaggggaagctgccggaagcggggagagaggcggcccccacctgtgcccccgcagctctgagggttgggaaggcagcgcctgcagccctcaccttcctgccctcaggctgcgaggcttgttcccagagggccgttggcttccctgagtgcctgagtgtccataagttggacccccaagaagccccaaccgggaggtcctcctccccctctcctgcgctcaggccggccctggcggtgcttgcccagtgggttcccatagtgcgggcgctaagtgctcagatgggccccagtgggcctgaggacttgtggggccggctgggccctcaggaggagccggggtgctctggagcgcctgtgggtgctgggtgtggctgcttcccggcctgtcatgaggaagtgggacggcccgcctgccacgcccagctctgggtgctccagctgggccacagcctggtcctgccgctgcgcccgcccgccatggtgtcccgggaccaggctcacctgggccccaagtatgtgggcctctgggacttcaagtcccggacggacgaggagctgagcttccgcgcgggggacgtcttccacgtggccaggaaggaggagcagtggtggtgggccacgctgctggacgaggcgggtggggccgtggcccagggctatgtgccccacaactacctggccgagagggagacggtggagtcggaaccgtgcgtgtcctaggctgctgggagctttggcacaggccaccctctaggcacaggggagggacagggctctgggctgctcagggaggcccaagaaggtggggaccccggttccatcttcctgcaccccaaagtccaggctgggcatcccgcttgatcctccctgcaggccccatgcgctggcgcccaggagtgcccaggactgtccctgcgggagttggagcacgggggtcagagggcacggcccctgccttgggctcatccttgtcacagctcgggggtggacgctgcattgccgggacccagggaggacagagggtccagggtggacttctggggcccggtggccagtgacaaggtctgtcggagcgttccagggcctttgggggaaacgaagcttgaagcttgcccagtttccaaagtgccggaaccagacacacgacctagttaggggagcgggccggctgccgggcaaacttcctgcctgctgtgccctgcggggaaccagacagcagctggtgtggcctggccctggcttccacagctgcccggagctcaggctgaggagggtcacgctcctgagatcccgcgtttctcatcagtgattgggcacccactgtgtgtgtgcgtgagtcacaggctgtgtagggttagctcccgggggacccaagcaacaagcaggggaggctgtaaagaggccgtcgggcaggggcccatggtggagacccctctattacgtgcagacccacgacctcgttagcagggtcac

SEQ ID NO: 9118 - DNA, 6000 bp, Homo sapiens
agagatacttagagaagtgaagggagtggggagaactgactaaagctgtcttaggcaaaataataaaattatctttgttgttgctgttgatattgacttaacgtaaccaaaagatgaagtagcttgcttcaggcagagcttgatccaggagctcacacaatgctgtcattttgatggtttcattctcgggatccagatggtagctacatagcaccagaagctccagtcctgcatctcaggctcaagtctggtgggaaagagagcgtctcactccccatagttcaaacaaagcttccaggcctgattcttgttggctgaactgggctacatgcctgtctctgagctgatcactggccgaggggaagggatgccctgattggccaggctgagctggaggcccagtctcaggagctgttccctccaccccactgtgatcatgtgccacggggagggggttccgtaaagaaaatttgagatcttgttaccagaggaaggggaagtggatattaggtagccaagcagccgcaagaaatgcacccctcagagtctagagccgtttgcagtgcagctcacactttcacgtgcaagggcatcatctggggctcgcattaaaattcagattctgattcagcagctgggggtggagtgggctgcagttctatgtatctaattagttcccaggtgatgctgatgctgctggtctctgaaccacactttgagtatcaaggcactaaaccacatgagccagatactgggtaaaccttatctccatcccaagagggaagtttcagcatatccattgcatggaggttgactgcttgagtccagagttgttggtaaaccactgggaatgtgtgctttgtctcaccttttcctcttgcagccttaactatggaggagtttgcctggcgtcggacgcccagttcagtgacttcctgggaagcatggggccggcacagtttgtgggccgccagaccctggccaccacacccatgggtgagtgccccaaggctggtttcaaatggactaggggagttgggtgtcacaccagaagctcagcgtctctccctccttcccctttgcctgttgatccatcctctgcgcatgccgcctagagcccagggcacactctcaagccctcagcagagcctaggcacttggtgggagttggttctggtcttattctgggctgggagcaggggaagggggtttcagccctaagtaaaggagaagagctgagtccaagcttgagcttctgaaccatttcccagtctcatctcttggtgcctcttccaggggatgtggagatcggtctgcaggagcggaacggtcagttggaggtggacattatccaggctcggggactgacagccaagccaggctccaagacactgccaggtctggggcctaccttcccctgcaaggtgggggtggaggtcagggaggatatcctgatgggtactgagggccttgaagagagaaaattgggcccaactgtggggaccccctgtcccaactctgatgtcttatgtggaattggtagtttagggtttgtttgaagagccagttgagattgtctgttgaccttgttcctctcctccactggactgagctcctggaaggcagggaccatctttccagcttatcattataccccagtgcctagcagggttcttggcatgcagtaggtgctcaggcttggtgagtgagggggtcagcagatagatgcataagccagggagggggtgggcacattatggactgagagaggaaacaggtgagcacagagtgagcaaaggaagggtggagacagtgaggaccaccagaggaggtggggcaggctgcacccaagcccagctgtacctgctgcccccaaatgcccaccccccatgtgtcctggtgcgtcctccccagaccccatgggggcacacctatctccagcagagggtgggcagcctccctctgttgcaccctttgcccaccatttgagggccaaactagaactcacccctgctggcctctatccccagcggcctacatcaaggcctacctgctagagaatggcatctgcattgccaagaagaagaccaaagtcgctcgcaagtcgctggacccactgtataaccaggtgctgctgtttcctgagagtccccagggcaaagtcctccaggtgaggggcattgacgcgctcacgtgtgtgtgtgtgcacgagcacacatgcacagtaccagaatgagaggagggcacccctggcggggggtgtctctggagggcctcgcctggaggaaacaggcgaggccctcagttcactgtggctgaactgagctccacaacttactgcacaactttgaacaagttcccttctgaccctcagttccttcatctgtaaagcggggaccctaatagtacctacctgataacattctggtgccagtggaatgtgtgctgtgtgcaggaaaagtatttgcagttttgcctacagcaagtgttctacccattaccatcgtcaccgtcaccattaccatcaacagcctctggaggccaggggcttggtgtgatgccccgtgataagaaaggcctgttgaggaattgcagttttaaggaggtagaaatcacaggactgagctggattgggcatggggcgacccaggttctgcttctgggcctgtgagtggcactggcaggatttgaaccactgtgtctcttgccccacaggtgatcgtgtgggggaactacgggcggatggagcggaagcagttcatgggtgtggctcgcgtgctgctggaggagctggacttgaccaccctggccgtgggctggtacaagctcttccccacctcctccatggtggacccagccacaggccccctgctccggcaggcatcccagttgtccctcgagagcaccgtggggccctgcggagaacgatcttagtgctggaatggggaggggctccccaagatggcctggagaccacccagccctgacctgggaccccaggcccaggggcacattgaacaggaggacggggctctcccccacagtggggaagcagaacggggagacctgcccccccttgggcccctcctcaccccttctttgcctcctacccccgagacctcccctctcccaacgggattggctacacttttgacttggccggttcttgacctggtggatgtggctgcagtccagagaaaggaaagattgaggtggcagagcagaccactctcccttcccaaactgtccaacttctccccctttttgcctcctcggaagctcgctgcccagagccatgtccagaacccagccggccatctccatggtgccaattaccagcaagtgtctttcctgcggcaccgggttcaggcagctactcctgccccagagatgaaggggcagctttgcaaggatccggagccagctcccaggggcccagagccccccacttgaagaggagcttgagcttccctctgcctgcccgtggaaggagctttgccgcagcctgtccgagtccatccgtccgtcccctcctgcctgcccctcttctggtggctctaggaattggggttcagcagggaccaaaggaaaggaggaggtgccgggggcctggcacagacccctaggtgcctcgctccatgggattgcaacaagctagtttaggaaccgctggcggactagaaagaatgttgtcgtctgtgttccggtggaggagctgtggaacctgagtttccagaaccccaaccctagagagcatttgggggtgctgtattggagggggaggctaaggaaagttgggattgggactggtggtgccaagataagggtttctcaaattggagaacccctccttgttgcatgaggtcaatggtcatcctgtctacccaccctgcctccaggccagggggctggggaggcaaatagagcccccctattttagtctttttaaaaaaaacatcctatactaagggcagaacccactgccccggcctcaattaccttggctgaaggaaagatggcggtaggagagaaaagtgaagaggcgtgagtgtaagaactgggagattccttttccagcaggcctgggtagctgccttcccagcccagccctccctggggcctgcgggagcccttttgcatgcaagggaggatggaggctggcccctctttatagaagcacatttctgccacctcccctgggaggcacccagaagcctgccactctttacctagtccctgctgtgtagggcgtagtccaggttagctaggtagagttagtgctccaagccctggggcctgttcttagctcatgcatagtccttacagagtcccaggaccgggggtggagaggagcctcaagtacattccaggagaccactgtctcctcgctggcctgggcctagatggggcagcctggctcacaggaggccagcccctcctcctccgcccccttccttcccttgtccccgtagggttatagctggagctgcctgttatactcggctgttctgatttattattcttggtactgactttctttatgagggactcctaagggttgtaggaccttggcagagggggcctggtctccattagagggtgttgttttctcctgaggacacccaggctgcctttggtcccaccctgttcctggtcccggtcccggtcccagtcccaccaggcaactccttccacccggaaattcttcccttcccttagcctgtggaaaccctgggtattctttaaagttctggtcaatgtatatcacctccacagagctgcttaccctgcactgggaaggggagatggagacgccccctttacccaggaggtcttcagagtttcctgggaccgcggtgggtggaatcccaaggctgggggtggaaggagcagggctctggagggattcgcattcaaggcacagaattggccccttgcctgtttgtttttctaaccagtgtgatttctctgctgttcgtttattacttaccattggaatattttgagccaggagagcgccttctctctccagccatcaccgctgtggttgttcaggggtagcttttcaaaaacagggcagagcctggctgtcccaaccagggggagcaggggcttggccctgacagcctgagcccttcccctggtgtctgcacagcctttataaagagagagagagctccgaagcaataacaacacctgggggtggtcagtgagggccccctcaatgattttcttgtttgttctgtgaaatcccgctcacctcctggaggggtggagcagctgggggctggagccctgtttctttgtgtcatcgtgagcatgtgccccttcccaggggctgtgaccattgggtgtgggaactacggtctgtcctcaccaagggatgggggtttggggaggagagtgacattttcatcattagcttcggagaagcttcaagcccatcctgtccccgctactgcctggccccttgctgactcaggctgcactgtttgaagaggagcagagaggctggcactaggggccactggggggctggggtctccaggggatgactgttttcaatctctgggccaagatcacatgcaggataccatgggaaggagccatctccactctccttctccagaacccccttgaagggcctttgggaccattagtccatttccattttacagacaaggaaatcaagacccagcttgggggaaaagccacccctggagtcacctgtgtgttcagtggcacccccagcctgggtcccctcctcccaatagaggctgagccggagccagggcagtatgaggtggggctgccactgcccatacctcctcctcccttctttctttgaagcctaatggccccccaaaagatgggcaggacaagctgtagcccatctgagaggttgggaaactgaggcccagaaacaggaagtgactcacacaagacccctcagcaagggtgcaaagggggaagaactaggggctccattgttcttcaggc

SEQ ID NO: 9119 - DNA, 6000 bp, Homo sapiens
aagtgttgggattacaggcatgagccactgcgcctggccccagagttattttcaaatgcaaatctgagggcagtgatttggtttagttaccgatataaataagtaaaatgtgttctaagaacaagtttgaccaagaacaggaccaagaagagtccaggcacataggaagtgccattttgaacatgacatcctcagggaagctttcttccctctcctcatgctgggtcagactctccacccacttgaagctgcacatacatgtacacaaatgcactgcaacgtatatgcatgctgggctgggcatgggggtgcacgcctgtaatcctacccacttcgggaggtcaaggcgggaggactgcttgaggctaggagtttaagaccagcctgggcaacatagcaagaccccatctcgccctatctcactcaaacacacacacacacacacacacacacacacagtatatagatatatatcttttatggcacttatcacaattgcaattaaaattattattatgcaactattagataaggtagtaattaaataatttaaataattattagcataattatttgtttaatgttaccaaactataaactccatgaaggcagagaccaggtctgttttattcatccctgtatttgtagagctgggtacaatagtgagcacttggaatttacatgcaataaatttatctatcaagtacttattacatgcgatgcactctgtatatgtccaatctccaatcttcatcacaattgtgcaaagaggtgttaattattctctccctttttttttttttttttttttttttggagacagagtctcgctccgtcacccaggctaaaatgcagtggtgtgctctctgctcactgcaacctctacctcccagattcaagcaattcttgtgcctcagctttccaggtagctggggttacaggcgtgcgccaccatgcccgggtaatttttttaatttttagtagagacagggttttgccacgttggccaggctggtctcgaattcctgacctcaagtaatcctcctgcctcagcctcccaaagtattggaattacaggcgtgagcctccgcgcccagcccattactctcattttttgatgagaaccttgagggaacatacccaaggtcacataaataaaataaggacaggcgtttaaacccaagtcaggcaatgcttcttccgctccactccactgagctgcctggttcttggcatcctccatctcactggactgtgaactccaacctggaagttcatttctgacttcccatcccttccttctctggatccacatccaccacttccctcattcattttcttaagcatccctctccaccccccaaacttgttcttagaatgcattattcatacccaggtgtaagtggctgaccacttaaatttcccatggggaaacattacatatttacaaagggtaaatgatttaagtgtacaggcccaaaccctatggatggaattttaggcatgagctaaccaagaaaggagaaatcacaccaagaagtccaggcacataggaggtgctattttcagctccaacatcacatcctcagggaagccttcttcgatctccttatgttgggttagattccccacccacttttttttttttttttttttgagatggagtttttgctctgttgcccaggctggagtgcagtggcgagatctcggctcactgcaacctccacctcctgggttcaagcaattctcctgcctcagcctcccaagtagctgggattacaggttcctgctaccacgcccggctaatttttgtatttttagtagagatgaggtttcggcatgttggccaggttggtctcgaactcctgacctcaggtgatccacccgccttgccctcccaaagtgctaggattactggcatgagctactgcacctggcccccacccaccatttttgacaagaggcctactcactatgaccttgagtaagtccattccccttcgtaagcctcagttctttatctgtaagatggggagaggatgcaaaggatacctatctccttcctatggctggtgtgagaatttattcattcaatcaacaactatttacagaacacgaactttttgccaggcatctttctgggctctgggaaggggaaaaagagacgataaacaaataaacaagaataaaaatgtgtgtgttgtgtatgtgtgtgtatatatatatatatatgcaaacacatacacatatacatgcatatacacatgtatgtgtgtttgcacatacatacacgcatatacacatgtacataaatatgtgtgtatctgtatatatacatgtacccccccacatatatatgaaacatgtcagatggtgatgagggctacagagaaaaataaagcagggtagagaggatctggcatttcagggaggggtttttgctacttcataaagagtggtgagggaagacttcagagggaaagtgacatttgagcagagatctgtgagtgagctacacagccctttgcaagggagagggcttcaggcagagggaacagcagtacagatgttctgaagccgagtgagccaccggggtgtcctgggtatgaagacagaggggtggcagagccaaagaagttaggaccttgtagaacatggactttgactgtgagatgggagggtttggggcagagaagtggtcagtttctggttacattttgtgtatagaaatgacaggagttgctgatggattgaatgtggtgtgtgtgagactggagtcaagtatccaacatttctgatccaaacaagtggaaaaatggagctgccattgaccaagatggggatgattataccagcactcttaaccatgacaccaggctgcctcaaagtctagatctggtccctgggaaggggctagggctcaggagcacctgccgaaggccagcactgtgctaggtgttttgcacactgtgatgggcagatgtgtcagaataactccagtgatccttgcccttatgtaataccttgtgtgatcccgcccttgtgtgagcatgggtggaaactgcgaccctgatcaggaatcgctaccgtgattatattacattatatgtcaaagggacatcatgcgagtggacctgatctaatcacacgagacctttaaaagcagaatctctcaggccagtaagcagaagccaaggtagaaagattctactgaaggatgagaagggcttgacatcctgaaactggccttgaaggtggaaggggccaggtgaaaggaccagaaagccacttctaggagctgaggttgacttctggctgacagccagcaaggaaacaggaacctcagtcctgcaaccacaaggaactgaatcctgccaacaacctgaatgatcttggaagcggattcttctccagagcctgcagagaagagcccagtctggccaatactttgtgaggccctaagcagagaacccagctcaggctgcccagacttctgacctacaggattgtaaatcactagattggtgtttttaagctgcttcatttgttatgcagcaatagaaaacaaacacctgtgttatcttacaggcagttcacaaccatccaaaatggaaggctcctgtccccattgtacagatgaggaacaggacccatgggataaagagttttgccataggccacccagaaagacagcaccacagctgagattcaaactctgggctgtctctttctgaggcctgaactgtttccatgtcgccagatggcttcataaagaggtgtgcgagcagctgagaaggttgtttgacatctggggcctgattaggtgggcagggaccctcacgtcccaggtcacatgcagggaatggaacacgggtttccgattcgctcgtctctgtcctggggctgtgagtgtctgagcccgtgtgtgtctgaggactgcgggtcgccgagggtgataatgggagagtctgtgagtgtgagcctgccaagtgtgtctcagtgtacctgagtctgagggtgtcagtcaatccgtcgggatgcacccacactgggagggatggagtctgtgtggctgtgtcttggcgtgtgtgtgctactctagtgtgtctgagggtgaaggtgtgtgcatctggccgtgtcagtcagagtgtttgacagtgctgagatgatcacagggggaggcgacacagagtgtgtgctgggtctgggcttgtgtgttcatctgagtgtatgaatgtgtgtatgaattctggggtgtctttggtaagtgtgaatgcatgagactgtgtatgcctacctgaacttcgtggggttttgtggcatctgagagtctccccgtgagggaggccgggcaccagggatgtcctgcctacctccctgagtgtgtttgcaggtctctgcgtgagtctgcgtgtgtccgtggacgtgtctgtccccgcatctgtgagggggtgggtctgtgggtgtatctgtccgggtgtctgcggggcatgttgcagagtgaatgtgtaggtgtgggtgcctgtttgagcttctctgtgggtgcaggtgtgaagccgagggtctctgtgtgggaggccgagtgccgacccgcctgggcgggaccctttgagcgcatcccctccgagcgcgccagtgtctctgggagaggcctgtctgggtgagggactggacgccggcctctccgcaagtcggccggctgagggtgggggccgaggcggggtcgggaacagccctcggaccagggcccagacaacctcgcccggcgcctgcctccccgcgcgcacctgccgggcccgggggctgctagaagaggccgcagcccgcgccctccgggctcccacgccccgcagcggcgccccctcccccggcggcacggattggctgcggcgccgctccaagcccgcctcgcgctgccggcggggggcgccgcggaccagagcgcgctgcgccgccaccgccgccgccaccgccgccgccgccgccgccgccagcagcacagcgcgcctcgggctccgcgcgccgccagctcctggcccgcccgccggccccgccgcgcccgccagccccgcagcggagcctcggcccggccccgggccgccgccaccacgccgcgcgccgtactccgcgtcaagaatggggcggccaagctgcccaagccgcccgccgccgccgccgccgccgcggccgaggcgcccggcgccggcgcgggcatggagcgctcgcagagccgcctcagtctgtccgcctccttcgaggcgctcgccatctacttcccgtgcatgaactccttcgacgacgaggacgcaggtaagcgcgcggcccgccccccagacccccggggtgtcccgggatccaggtccggtagccccctccccgacccgtgcgccctcctccccacccccaatcccctgggaaggcgcccccagggtctccttccgcacccacgggaccccagggtctccaggatgcgctaccttctggccttctcccccagggaccccgagattgtctgcattcacctttcccgcaggtgggccctttgggtcgccaggacccatctccctcctcacccgcgcctattggaggccccttgcctcgtccctggagccgacctgccaccctccctgagtctcctgaatgtgcccactcttcaagccctgggctttggccgtcccacccctggggctccgacgcgccccccgccattggaggtggcgcgcagaccttacctctccatctttgtcttggccacatccagaggatccctgcccaagacccctgcccggcgccccaggccttgagcgcccccatttatctctcctctccttccctcatgggctggggctccagactcctgcttcttatacgcctggggcagacggaggggaaccggccaggtgacggcctttcctcccctctcttcccggagagaggtgtagggcggcgccaactctacacttgtccgcccgctggtgtgtgcccctgacctcaggtgct

SEQ ID NO: 9120 - DNA, 6000 bp, Homo sapiens; identical to SEQ ID NO: 2965

SEQ ID NO: 9121 - DNA, 6000 bp, Homo sapiens
ctcttaagtactaggtttctcctctcctgggttgtgtcagatgatatgcaaagtattcctgaaagtgtttttgcaaactcaggctgcatctgagtgctgttggcgtttagaataggtcttcatgggccgggcgcggtggcttacgcctgtaatcccagcgctctgggaggccaaggcgggtggatcacatggtcaggagttccagaccagcctggccaatatggtgaaaccctgtctctactaaaactacaaaaattagcagggcgtggggcgggcgcctgtactcccagctactcgggaggctgaggcaggagaattgcttgaaacgtggaggttgcagtgagcacagattgtgccactgcactccagcctgggccatagagcgagactcggtctcaaaaaaaaaaaaaaaaaatagaataggtctttaggccagccgctcatcaccaatacaaaagtgagattcagcagggtgcagtggctcacacctgtaatcccaacactttgggaggccgagagggaggatgacttgagcccaggagtttgagaccagcctgggcaacatggtgaaaccctgtctctacaaaaattacccaaaaaagcccggcatggtagcacatgcctgtagtcccagctactcaggaggcagaggtgggaggatcacttaagcccagaaggtcaaggcttgatcgccttgacagagtgagactgtctctaaaaaaattaatttttaaaaatcaaaattttgaggctatattatgccctgcatttgtcaaaatggaagggttttactcaagattgccttctgatcctactttctgattctctgcagtaatcttgtccttaaaaaaaaaaaaaaaaaaaactacatgttttctttatcatagaccctctggttctctctcctgggatattcctgagcccattgcttagacactttttaatcaccacttcattacccaaaacgtatctggcttcatcctataaagcagtctgaaatactaagaaaaataccagattaaaataaaaccaaattgatatctcaaaaaaattcctccactattgactatggtattgaatttactctttcttctttttttttcttcattcaacaggtatttgctgagcaccaaatgctgccccctccagtttgctgtttgagtggaattgctcattgccctgtcttggctgtcctgtaaaccacaaggcctactcatatgttctaggaaacacacatcgttctttagtactggccacactttaaactatacctttcttcccttacagtaaggggtaacccactgtacaccaaattttaacagccagtgagcttaaagatctatctgacagaaatcagatggcctccactgtagcagattttcaatttatctcctggtcaaactttggtgctcacctctgaagggttacaggcttttacaccaatcaggtaccccctgatttggaagggaacctcttatcccagaagacagtatcactcgtggttacaatagcattttgggcatcaggccgcacaggttcagtgagtctggccatgccacataatctctgtgggacaagcaaattaactggcctcaattgtctcatttgtaaaataggaatatagtacacatattacagtgtgtccagaattggtgggttcttggtctcactgacttcaagaatgaagccgcagaccctcatggtgagtgttacagttcttaaagacgtcgtgtccggagtttgttccttctgatgttcgcatgtgttcggagttttttccttctggggggttcgtgggctcgctggctcaggagtgaagctacaggccttccaggtgagtgttacagctcttaaggtggcacgtctggagttatttgtttctcccagtgggttcgtggtttcaatgacttcaggagtgaacctgcagaccttcccagtgagtgttgcagctcataaaagcagtgtggacccaaaaagcagtagcaagattgatagcaaagagcagaacaacacaactcccacagtgtggaaggcaacccgagcgggatgccactgctggttcaggcagcctgcttttattcgcttatctggccccacccacatcctgctgattggtccattttacagagagccgattggtctgttttacagacagctgattggtccgttttgacagggtgctgattggggcgtttacaatccctgagctggacacaaaagttctccacgtccccactagattagctggatacagagtgtccattggtgtatttacaaaccctgagctagacagagtgctgattggtgcatttacaaaccttgagctagatacagagtgccaattggtgcattcacaatcccttagctagacataaagattctccaagtccccactagatacagagtgtggattggtgcatccacaaaccctgagctagacacagggtgctgattggtgtgttcacaaaccttgagctagacacagagtgctgattggtgcacccacaatcccttagctagacacgaaggttctccaagtccccactagactcaggagcccagctggcctcactcagtggatcttccactgggccgcaggtggagctgcccgccagtcccgcaccgtgcaccggcactcctcagcccttgggcggtcgatgggaccaggcaccttggagcagggggctgcgctcgtcaggaaggctcaggccgcgcaggagcccgagggaggagggttggtggggcggagagactcgggcatggctggctgcaggtcccgagccctgccccacggggaggcagctaaggcccggtgagaaatcgagtgcagcgccggtgggccagcactgctgggggatccggcgcaccctccacagctgctggcctgggtgctaagtctctcacgcctggggccagcagggcgggccggccgctccgagtgtggggcccgccaggcccacgcccacctggaactctagctggcccgcaagcgccgcgcgcagccccggttcccgcccgtgcctctccctccacacctccccgaaagcggagggagccggctccggcctcggccagcccagagaaggacttccatggtgcagcggcgggctgaagggctcttcaagcgcggccagaatgggcgccgaggccgaggaggcaccgagagtgagcaagggctgtgagggctgccagcacgctgtcacctctcaatagggttgtgaggattaaatgagatgatatgtgtaaaggattcagcacatggtaggcacacaatagatgttacctattatgtaaagcaaacatctaaataagaagtcaccaagtcctgagcacctgcctccctacaagaatctttcttcataaaattaacttgctcctctatcaaaaatactcatcaaacactatatattatcgtttgtttattgctcatattccctaataggccatgagctccctaagcacaaggattttgtctaccttactctctactctccacaaaatcaagtgcataaaaaacactcattaaacacttaatacacaagtcactgaatacatcttttggctaaagtccactacccacttgaggtactgccactcacctctaaaccaacatttttccctaagcttggttatcttaatcatctaattaatatgattcttcttaaattttcatagtattaggatctatattggagggaaaggaataagaatgaacatttgttgggtatccattatttgacagactttatgtcttcatttctaatttcatacagtcttataaagtgggaattggaataacccactttgcctgtgagtaaactaaagttctagttacaaccattgagaatccctatttctttccatcacagcgtttatctcagtttgcaattacacactcaagtgtgattattcgtctaatgctttcaccagactgtaatctcaaagatagcagaaaagggtctgcatttgctcataacagcgcctaacaagcaggcatataataagtatagggctacatagtaggtatgtaataaacattcagtgaataaatgagtggagtgagcataggggtagatgtcaaagaaatctggcttcttgtagtgtttaaattccgcaggcaccattttttcttagtaggcaatattcgcaaggagaagaactagaccccatggagtctgaggcgtttccaacactaataaaagagtacctgattaatatagctatggctgtgattaatagagtgcatttactattgtgtgagcaaatcccattccctgtgacaaatgtattctatacatgaaatgaacagtacaacattttacaggcttcacggtcaacagttacattccgggaaatttttgacgttgaacgaatattccaagaataaataactcaagaagaacctgtgactatatctccagaaaccttttgccgcttgtcagtgaaactaatagagtacagagcctatttaaatgtaaatttaaatacaacattttctccacctttctgctctctttgttccttgtggtccggaggttacaggactatatatattctccaatacacacgtgtatagggatttggggtttttgctttcagttttatgcaagactaaatcaaggtatttggggatttgaatgttctgttcccacagttagggaggagggaatgtgctctgaaaacagaaaaaaagtactctggggcgggggctgaggcgaccaccgtggggcccatcctcagcctaggacgctgttgctaggcaactccctgcgttctcaactcccgcccgagagccacttcccgggccctcattgccaaggagatcgacgccccaactcagccctgccgtaaacacgcgcggtcttgcgacagtgccgcgcctgccgctacgtgcgcgccctctgcccccatctccactctccgcccggccgccattgcctcgtgcccgcgccggtcggttggtggcgcctttgtcctacggcgggcaggtgggccgacgcggaggcggcagcggcgggcctgaggcgaaggagcggccgggagcccgccgcgctggtagcggtgagtgccgggaagcgctggccgtcagccgaggcgtggggctgacgggcaggccgttgtggggggcctggccggacggggaggctgaggcgggaaggcccactcgacgcgcggccacggtctcggctcctctccgggtgcgcgcggtgctgcgcatgcccggtgcggggcgcggccgcctccggctcccgtcaggcccaggcccggccggccgaggcggcctacggttctctgtggtggacgcaggtcggcggcgtcgcatcgcagccgcctgtctgtgcacgaacggtcggtcactaggagtcctcaaggcttctctggttgagccgcacatcccgcaccccctgtcgaaacggtggagtcgctcgcccgcgggtcctcagcgagtcagtggcgcagtcgggattcgaaccgggcccaaggcgtcccgtggcaccgggcgttctccaggcgtgcagcgccgagcggtgtactgagcgctgtcccccgccaccgtctcgcggcccctgaccgcattctcggggtgtctccttgtggtgtgacaccccacgcgttttgtaggcgcggacctcgggcccagagaacggggagaggaactgttcccgggtttaccacgtagctcagcgccagcgtccgatccggccggctttccaagctcccggcgcggggcactgtccgctccccgccagcgggcgaggggcttctcttaggacggcgttgcacacgtttcagtctcgcgttgcacctttatgtccgtggaccatctgtactgctatttaccaaatgttacattttttaaaaaattcaaactgactctttttttctccttaaatatatttaaggcggcaacttcaatcacaaaccgggtactggaaagccagttatttttctaatgcttataaaaaaaataaatatctgtctgttgaaataaacagtgcg

SEQ ID NO: 9122 - DNA, 6000 bp, Homo sapiens
aaaaactacctattttccttttttataacttttttttcacaatgttctggtcaacactatagtcacctggggcctctaaggactgaaatgtatgagaaggctcatttgcatggctgacagttactgcaggctcttgcctggaatctcagctggggctgccaagtggagtgcttcagtttttacttcatgtagcctctccatgtggcttaggcttcccataatctggcagctgggttccatgaggaagaaagtgtaagctgccaatcatctttattttattttattttattttattttattttattgagacagaatctcactctgtcgcctgggctggagtgcagtggcacaatcttggctcactgcaacctccgcctcccaggttcaagcgattctccttcctcagcctccagagtagctgggtttacaggcatgtgccacggcgcctggctaatttttgtacttttagtagagacgcggtttcaccatgttggccaggctggtctcgaactcctgacctcaggtgatccacctgcctcagcctcccaaagtgctgggattacaggcatgagccaccccaatcatcttaaagcctagacttgaaagtcccatgacatcacttccactatttccattggtcaaacagttacagagtcaactccagttcaaggaagaggaaataaagcctacctttcgatgtaggagtggcctgtgcaaacagcaggaaagaatgatagtgggcacctacacagactatcttgtagagtgtgtcactcatttggcttagattttgagtctagagcagtgtttccacatgtcactcactacaagatcacctacaggttccatcaaactctgccaatgtttgccaggcgcagtggcacacgcctgtaaatcccagcatgttgagaggccaaggaggttggattacttgaggtcaggaatacaagaccagcttggccaacatggtaacaccccatctctactaaaaatacaaaaattagccaagtgtggtggcacgtgcctgtaatcccagctactcgggaggctgaggcagaggaagcccttgaactcaggaggcggagattgcagtgagctgagatcacaccactacaccccagccggggcaacagagcaaggctctgtctcaaaaaaattcagctgagccagaagtttgaggttacagtgagccatgattgtgccactgcatttcaacatggagaaaccccgtccctactaaaaatgcaaaaaattagctgggcatggtggcatgtgcctgtaatcccagctactcaggaggctgaggcaggagaatcacttgaacccgggagtcggaggttgtggtgagccgagatcacgccattgcactccagtctgggcaacaagagtgaaactccatctaaaaaaaaaaaatttctaaaaaaattcagatggtgtatggtatgaatcattgtgaagacaaagcagggtgatatgactgtgtttgtgcctgtgtgtgtgtttagtgctttagaagttctatccgagaaggagacattgcagcagagacttgaatggcaatagagagcaagccaggaggaaagaaaattctaggcaaaaggaacaacaggtgcacaggtcctgaggcaggaatatgcttggtgtgttcaggaatgttagtgtgacatggggtgagatatagggagagatatatcacctgagatcagggaggggagcagagaccaaatcaattagggtcagagtagtttgttttcttaaatggagtcagggtctccctctgtcacccaggttggagtgcactggcacaattacggctcactgcagcctcgaacttccgggctcaagcaatcctctcacctcagctttctgagtagctaggactagaagcgtgggccaccacacccaactagggtctgagttttatcccaaatgcaatgggatgccattcgaagctgtttaggttggaagttttttgttttgttttgttttgttttgtttttgagatggagttacgctcttgttgccctggctggagtgcagtggcatgatcttggcttactgcaacctctgcctcctgggttcaagagattctcctgcttcagcctcccaagttgctaggactacaggtgtgtgccaccatgcccagctaattttgtatttttagtagagacagggtttcactatattggtcaggctggcctcaaaaccctgacctcaagtgatctgcctgctttgccctcccaaagtgctggaattacaggcgtgagccaccgtacccggcctaggttggaagtaacatgatttaatacatgatttttcaaggatccctctggctactgtattgggagtgccctgtagaggatgaaagggagagaagcaaggagagtagctaggagacaggtgcagttgctgaggtgaaaggccatacacgtgtgagcatttcatctctgggttctcagcatctaacgcagtattttattttattatttttattttatatatatatatatttgaaatggagtctcactctgtcgcccaggctggagtgcagtggtgcaagcatggctcactgcagccttgacctcccctactcaggcaatcctcccacctcagcctcctgagtacttgggaatacaagcaggcgccaccacaccaagctaattttaaaattttttgtagagactgggtatctgctttgttgccaaggctggtcttgaactcctgggctcaagcaatctctcggccttccaaagtgttgggattacaggcctgagccactgtgccctggtggaaatatatatatatatatttttttgagacagagtttcgctcttgtggcccaggctggagtgcagtggcgcgatctcggctcactgcaacctctgcctcccgggttcaagtgattctcctgcctcagcctcccgagtagccaggattataggcgcctgccaccatgcccagctaatcttttgtatttttagtagagacggggtttcgccatgttgggcaggctggtctggaacttctgacctcaggtgatctgcccaccttggcctcccaaagtgttgggattacaggtgtgagccaccgtgcccggcccagaaatgagatatttaattttttaatttttactttttttttttttgagacggagtttcactcttgttgcccaggttggagtgcaatggtgccatctcggctcaccgcaacctctgcccccaggttcaagtgattctcctgcctcagcctcctgagtagctcggattacaggcatgtgctaccatgcccagctaattatgtatttttagtagtgacggggtttctccatattggtcaggctggtcttgaactcccgacctcaggtgatctgcctgccttggcctcccaaagtgctgggattacattcgtgagtcaccgcgcccagccaaaatgagatattttaaataacataagtaaacagaaatatatcatgattttaatgataattcatgctctgaaaataaatgaagaaaggaataggagtagggaaagctgggatcagagtgggcaggaagttaaaatagagcagttagggaaagcctcactgaataagtgacatttggacaatgaccatggggagattagggaatgggttatttgaattttctgggaaaatactgttctaggcagaggaaatagcaagtgcacgatctttaaggccagagtgtgctaagcacgttggagaggccgagtccattgtagctgagttacagaagtgagtggaagagaagaaggtgatgagtttagagagggaagggcagggcaagagacgggctgtatggggctttgcaggttactgcaagaattttgcaggagggacagagactgacttggttcttaccaggattcctctggctgctgtgttgagtatagactctaagaggaaagagtggaagcaggcagaacactgaggaggctgttgcagtggtccaggtgggaaatgatggtgctgaccgtggaggtggtaagtggtcagattattctattttatttacactcaacacatctaatactgactcaatattatctaacatacagtccacattgaaattgccccccaaattctttttacataaaaaaatcatcctgaatccaatcaagtctcacctattgcttttggttttcacctctttcatgctgtcatattttaaaagactccaggctagatgttgtgtagaatgtcccacattctgaattcgtttattttttcaagtaagctttttgtgtgtatgtggcaagaatacgacagaggtagcaatatgctttccccactgcatcatattaggagacacataacaacagtcctgacccattattggtggtgctaagttcgatcacttggtaagggggtgcctgccagatctttccattgtaaagcaagctgttctttattgtaagtcataaatacgctgtgggatgatacttcgggactaaatataccctgaatatactgctgcccaacaacatttcacccagtgactttagcagctaaggaacagcctcgtggcttccgaccttgtgcctcagttcgctcatctgaaaaatgaggatgatcatggtccctaccggatgcttgttttgaggatccgtgcttggcataccagaaacgctccacaaatgttaggtattactggacgaaggcaaatatgaaaaaaattaagggcagggctaggactgcattccggttctccggatcccgagggagctcccagtcgatgctgggcgaaagcggccgcacgagcccacgtcgccacgccctccgccgcggaagccagggtgggggtcgctggaaccctaggccggccgcgcaaggccccctgggaccggtagtgctgggcgtggcctcgggactacatatcccagtggcccccgtgcggcgactttagctgctgctgtctcagccgctccacagcgacggcagcggctgcggcttagtcggtggcggccggcggcggctgcgggctgagcggcgagtttccgatttaaagctgagctgcgaggaaaatggcggcgggaggtgagtggagataaaggaggaggcggtggcgggcgagggggtggagtgcgaggcggagggaagaggggcgagttccccaggctgcgagagccagcggcttcagatctgccaaggcactgaggggcgcgccggccgggggacgcgctgaggtagtttcggggtgtcggggccgcgccgcttcccctcagcccggggggcggcccgcggcggtaggagctgagacgaagctgggtggcagtccgcttggggatccgagggggtccccgcgcggaggggtcacccgaggagtttgcggggggactgcaggggcccactttccccttctgtccctaaagttttttcttcctcttgcctcccccagcccttttgaaagctccccgcgtcgtcctcctgctgccccggctccttagcagcttctgggacgcacgggagggaaaagccgcggggaccccccccaccccagcctcccagccgggtgagatttggttgctgtgtttcctcctcacttgggcatttaaaaaatattttaacacgaattgtccgcggaattttcatgttgggctcgggtagcttcttagttttctcggtaaaaaggcgttttactacctctggtgtgaaggctgggaaatggcaagtgggaagttggttgataaaattaggagtttggctgtctttattactactttttttttttttttgctctccccatctctcattttatgaacatcgacccagttcgtcatggtttaaataaactgcttgtcttgtacctgccttaacaaaactagccatgggtcgttgggagacttagttgcttcctaggcagtttgagggcatctagggtggaaaagttaaccgagagagcgagcatctacctcactggcaggatctgggattcccaaatggaatgacacggaagctatgagattctctcgaagtcgaaa

SEQ ID NO: 9123 - DNA, 6000 bp, Homo sapiens; identical to SEQ ID NO: 2963

SEQ ID NO: 9124 - DNA, 6000 bp, Homo sapiens; identical to SEQ ID NO: 3702

SEQ ID NO: 9125 - DNA, 6000 bp, Homo sapiens
gggagactgaggtgcaaggactacttgagccctggaggttgaggctgcagcaagctgtgaccattgccactgcacttcagcctgggcaacagagcaagaatctgtctcaaaaaaaaaaaaaaaaaaaaaaaaatattcaagcaacacaaacagaggtgtttaaataaaagttttctccttttctcctcttcaaagataagctccattaatagtttgtagtaaattcttcctgaatttatctaaaactataagacatatagatctactaatttattgtatttatttattttttttgagacagagtcgcgctctgttgcccaggctggagtgcagtggtgcaatctcagctcactgcaagctctgcctcccgggttcacgccattctcctgcctcagcctcctgagtagctgggactacaggcacccaccaccatgcccggctaatttttgtatttttagtagagacaagttttcaccgtgttagccagggtggtctcgatctcctgaccttgtgatccacccgccttggcctcccaaagtgctgggattacaggcatcagccaccgcgcccggcctactaatttttataagacataaaaatttttattctactaatttttataagacatacatctccagctgaacgcagtggctcatgcctgtaatcccaggactttgggaggccaagacaggcaatcacctgaggtcaggagttcaagaccagcctggccaacatggtgaaatcccatctctactaaaaatacaaaaattagctgggcatggtgggcacctgtaatcccagctactcgggaggttgaggcaggagaatcgcttgaacccagaaggcggaggttgcagtgagccaagatggcatcattggactccaccctgggcaacaagagtgaaactccatctcagaaaaaaaaaagacacacatctcctaattatttaaatgtgctttttaaatgttttctgatcaaactactgtttgtctcttgctttgtatcgtataacagaatgtcagggccagatttctatgtcaggacataatactgtcttcattcttttcaatggctttgtcacttgctgtgtgacattggactagttgtttaacctctctgagacttggtgttcttaatctctaaaatggggattaaaaatgtactggccacagagagctgttgtgaggattaaatgagttaatagatgtaaagcatcttgtacagtgtctgacacatattaagtgctcaaaaatgttagttctcattgctgtgaatagccccatgtctggctgtaccataatttctttaaccagttccatgcctacgattacttatgtgatataatgtttgcaaaggtggccacaacaattccaccctccttatacacatgactccttgcagtatgatttgatgtttttctcatgaagagatggaatctatttctactctccttgaatctgagctggccatatgactgcctttgatcgatataatacagtgaaaatgatgctatatcatttctaagcctagatctgaagagatcttgctgcttttgttttctttcttctgggggccgtcatgtaagtaagcctgagttagcttactgaagaagcaacatggaggagaaccaaggcactcaagccaacaaccccaaccaactgccagacatgtgaatgaggccatggagttctaaccagtttgctggcctgttcactgacagcaaacgtaagagtaagccaggaaagaccacttggagcagaaaagagctgtcctggctgagacatgtccaaactgccaatccacacaaacataaaatattgttgttttaagccactatattgtggggtgattttgttaagcagcaatagaaagcaaatacacttaggttcttagtgcatgattaaaacttttgcctgtaattctagcactttgggaggccaaggcaggggaactgcttgagcctaggagttcaagaccagccctggcaacatagcaagaccccatctgtacaataataataatagtaataataatactactaaattaaaaatgagccaggcatggtggtgcatgtctgtagtcctagctactcaggaggctaaggtgggaggatcgcttaagcacaggagttcaaggttataatgagctgtgatcatgccactgcactccagcctggacaacagagcaagatcctgtctcaaaagagagagagagagagagagtcactctaatggcccaggttgaaatgcaagctccatctccggcatgtgaccttgggcatggcctgtgatctctgtgaacctgagtctcctcatctgtacggtgagatacttttggtttctacctcatcaggttgacatgaggattaagtgagatgatgaacattcagtgtgtggcacagtgcaagtactctcaacatcttaactcttgcttctgctgctgttgtttgcagaaagactagcctgagaggtgtgatgtgggggatcagagacagtaagagttaaggataaatgttaagtctacaactaggtgaacacttgggatgggaagcctcttgagaccggagacctacatgaggctggcgtagtagacggcaggagttgggtttcaattatgtcctgcatgagtatgagggttgtatatgtgtgcccaggtgagccctctgaatgaagtcatggatagaggccagaactaggaagaagaatgaagaactaatgctgtgagagaggctgagattggaaaggcatgaaggctaagcaatgggaaatatcctcactacactcagatgaaaacccagcttccttatcatgacctgaatgccctgcccacctctcccaccatatttcttcctcttcttccctttatttgcagtgcttcagccaccatggcctccttcttcaaacttgtgatgctctttcctgccttgggacgtttgcacttactgtttccttctcaaagggaccttctgaaccactcaagctaaagctctatacttcacagctacttatcttttcctttcgtagcacttattgctacctgaaattactttgtttatgcatttgtttacctgtgcattacttgcttctcactttagaaggtaagctccaccagtgagcaactggtgtatgtcttcctcataacacatccccagtacctagcacagtgtctggctcatagcaaatgatgaattgttgtgagttaaacaaatgtgaatacagttgggaaaaacaaagccacaagagccaaaaagatacgttcgagaggtaggtagaagggtatcatttcctggaagatggcttcccagaaactttgggattatcttgtataacctcctcagtccacaagtggggaaattgaggcccagttacaggacactgagagaaaaactgttgtgggttcccaggcaattgggatcagatgtcacaagctgtctagcagatgaggtccagagaaggccacagccacctccctgaggccatcactataagtctgcagccaccaccagccctaaccccacatggggaagaggtgcctctttgggagcagaggtgctagtcagctgacaaactgtgaaggcagggctgtggagggtggagaggcccattcctgagacaaccagctattctgagacagttagggataatggttggtactgaaagaacctggcctcctcaccctcgttccagtgctcacacctctgtcccaccagaggtgagactaatacttgaactcctttcagcaactcttagacgcttcagcttttatcagggcctgcaaaggagaggttgatcatcagatggagccctgtccactgggggctcccagtctgatggaggagacagactgaggtcctcaggttactgactgatagtgtctgggttggagggagttaaacagagaggagacccctagaggaaaggatccctgaattagttcaatcggcatacagaaattatccagtccatgaggtgacagtaagagaagtaactgccagtgtaaagggagggaggcaacacagctaagttccaggaattgtttgcagtcttgtgggtggaatcttccggaatttgagaagagagtggcagaataggaggctggaaaggagggtttggccaaattatggaggactctgaatgtcaagtgaagagtttgggctatctttggtgcataaagaggtccatgggagatttttgaccatagggagaccatgatgagctctgcatggtagaaagtgctttgtggctgttttggggaggtagctcgggcaaggagagcaggggtgggaggcagatagaaggaaaaaaaaacactgtattttggacgcacagctcttggcaggactcctgtaggaggaaggaattgggccttggtctcttgagagctagtatcctcacttctcagactcctgcgccatgcccttcctagggtccaactttcattcacttcttccgaactccaagtttgaatagaaagtgttgctgaaaccctaatttaaaacgaggggtcagagcaaaagagacttcagctcccagaatgcttggctctacagctctgcaggtcgcgcatggttcttttcaagaaaggggggccagctgggtgaagtgtgggaaacctgggtaccgccatcttaacttgggtcaaaccaactgttcacctaatgggaggttcgtgttctctctgttgtcacttgttaacactattgaaataaaatgcgcttaactattgcaagtctccttattctgctttgcgttggggattccttccattttgcaccctaggccagaactgaatccctaaggttacaataggacatcccagcatggccgcattcagagagattcctctgggggcggagtcggaagctgtctcgccccgcctcctggtaggagggggtttccgcttccggcagcagcggctgcagcctcgctctggtccctgcggctggcggccgagccgtgtgtctcctcctccatcgccgccatattgtctgtgtgagcagaggggagagcggccgccgccgctgccgcttccaccacaggtacctagggagcagccaggcgaggtcgttggcgggtggggtgggcccaggatagggcagcggagcgcggccgaccctcacgcttccagcagactcctgagcggcccgtcgccttcccctgcccccaccttcacacataaaccaagcgaggcccctgcagcccatcggggaggcccaggggccacccctcagggcggagggcgaggtttgggggcagaggccgatgtgagggtgggaaccggctgccggagtccagcttattgcagaggagaggactgaactgggtggggactaggggacaacttggaggagggggtcgtcagagggggaagggaacttgaggggtggggccgcaggggggtgctgggggagggtgcggagggagtggtgcctgctgggtagtgtgcagtgaaccctcccgcgaaactgggcagctggagtaggggccttcttagggtccctctgggcggggctgagcttcccacctgcagagtgggtgcgaggtggagagaaccccaggcggggttgctggggcgaaagggggaagggaccaagacgtggggcagaacgtctggagttggagttaaggactagttaggagcctggatagaaaaagaggtatggagagaaagcttggctaagggtatacatatgttggtgaccttttgaaagagtaggacttttcaattttgtttttcgttgtgtgttttttgcagtgttggaacattgctagattaagcaggtgatgggtggagcttctgtagtttgttttggggaagcagagtcagggtcaggagaagttgcatcttggctattgctttgtgtggaggaaagagttttgaaaagaaggtggcaaattatttgggaagacttgattacttttcagctgtttaattctacgagaatgggacatggggagaggaaatgaaaactaagaagagaggccgggcgtgtggctcac

SEQ ID NO: 9126 - DNA, 6000 bp, Homo sapiens
ggaaaagtacaaggtcctaagggctccccttagctatggcagcagagcataaaattctttgtattggggtcactatttctgctaccaaaggaggcggtacagatgtttctgcaactggagggggcggtgtaggccaatttttatcctccctctccattttttattttcaattggagctgtgggtgggacaacagattctttcagattttttagactcagcctgctgtccagcagaataataaggagatagcagaagaacagtacgaactagactccaagtggagaaaacagaagaatcaactttaggacctttttgatgagcctgttttaatccttctcctggtctatcccaattttccacatcaagagtgcctgcctgtggaaaccatgggttatgcgtaataaccttttgtggcttctgcaggaggttagttagtgcctgcgaattaacctgagctccagactgtctcaacagaactttaagcaactgcacatgatgtttttcttcaatagacaaattctgcttcatgttaccctgattcagaaaacttcccattccaagtacttctttagagcactgaccttatatcgttcccagtacctctttagggcactgaccttctatctgctgccagcagactcatcctggggtccccgttcatcttgtcaatttcaattcctctgctccagcagagcttcttcattcacgtcttcaaagtccctgtgttcagatgccacgtgtccgacatccttggagtccctgttctgggtcgccacttgtcacctgcacagaccttgggggactgaacaaagggggcaaacatgggaataaaagacaaagacaagagagcatatttgaaagaaggggtcagggggctccttgcttctggtaaacagggggcctgagctttagagcccttcacatttattaggcaaaagagatagcaagaagtggggggtgattgtcggttagcagtttgatttacagcaggcttgcaagactgcagtctttgaacaataggatctagatgtcccagtagataatctcaatgagcatggcgccagggccctcagcaaacctcctggcggcaggcgcagttgtgagtttgcccacatcctgcattcatgataaacagtttgctgtttgatcatatatccttcagtggaatgctgagttggtcacaatccctttggccttttcagctcccaacagatgggtacaatagcagaatggagattgcagggaaacatgccagtgatctcaaagatagaaaaatagaaattatccaatctgaacaacagagaaaaaggactggggggagctgaacagaacttcaggcacctgtgagacaattccaaaatatctaatgttcgtgttaccaggatctgagaagaacaggagaaacagaatggagcagaagaaaatatctgaagaaataatggctgaaaacttcccaaatgtggtgaaaggcatacacctatagactcaggaagctgagtaaaccacaaacaggataaaccaaaggaaatccaacccccatttttcaggttttagaacttcagggagggagtcacttccccttgtcatgagggatgcttatgacttcagactgaaatgattccctgtctcctgttacacaaagagagtgaaaataaatttaatcagttcagaatgatattaaatgaaagtcagaatctcctgctctttctcccagttccatctcttagagtcactcactctttctgttttttgttctggtttgctaagggtgatcccaaagaacttaactacttaacagagttgttaataactaggctatatataaacagaatctaaattaatttagaaaggaactctcccagttacttcaaaaaatcagataaatgcttaataagtgccccttgtccccaggtccaattcatcttaggtctggtggcagaactgatagctacatgctttcctgtgttttcccaaagcactgaggaagaagtggtgcaaatgtgaggttcttggggaacccccatctatataaacaaagcttatatccatggattgagatggccactgtctcaaaggcaggtctatgttttgaaccgatacccaattcagagccatgagagagaccacaggatgaatgtgaggcaagccttattctgctaggcttcagggaaaacggaatccaggaactctctcgcccctggttgctctcattctccatcatttattctcgctgcagtctgattttctctaggtggtgtgaagcagtgtcctggcgactgctggggccctctttttaatttcatctttcgatctccattcttccattctatgagcacagaacctctgattttagttgggtgtgtgtacacccagaatgaagactttattccctagcctcccatgcagctaaatttgaccatataactaagttatagtcaatgtgaagtataacgggaagagatgtgtgcaattctaagtcgtacccttaaaggaaaagggaatgtaccccccattcctcctttcccccttcccactagctgagatgaaaatatgttggagagccaacttggaccatgcatatgagggtaggattctaaggatggggagccacaagtagaagaaggatgagtccctgggcagcctgtgaagtcctacctgcactgaaccacctgcctctgaactgttacatgagagagacagcaacttcagcctcttttcagccacagttaatttggttctgttacagcctgtattcttactacattaaaatttccaaagcagtcacgagctcactgagattttaggaaaggggacatagatgagggttggggtgtcaaaaaactgtgaggtcatgtttaaaacactacaggagctggtatggtttagttctgtgtccccacccaaatcttatcttgaattgtaatccctataatcctgaggtcaagggagggacccggtgggaggtgattggatggtgggggtggtttcccccatgctgttctcatggtagtgagtgcattctcatgagaaatgatggttttataggtgtttgacagttcctcttcacatactctctctcatgcctgctgctgtgtaagatatgcctgcttccccttctgccatgattgtaagtttcctgaggattcccagccatgcagaactgtgagtcaattaaacctctttcctccataaattacccagtctcaggaattttttttttttttttttttttttgagactggttctcactctgtcacccaggctggaatgcagaggtgcaatcttggctcactacaacctccgcctcctggtttaagcaattcttatgcctcagcctctcaagtggctgggattacaagcctgtgccaccatgcctggctaatttttttgtatttttagtagaaactgggtttcaccatgttggccaggctggtcttgaacgcctggcctcaagtgatctgcccgcctcagcttcccaaagtgctgggattacaggcatgagccaccgtgcccagcctcaggtattctttatagcagtgtgagaatcgactaatgcagaagcacacacacacacagatcagagaaagattagtcacatgtgcctccttatgtcctagaccatgtcacagtgttctcttgcgttacagtgcctctgcaggtactgctccttctgcctccccttaccccaacacatacacacaattggccttctaaccttggctaaacctggctaaacctggctaactcagggaaatatctgaccacattccagactaagtgaggcatctctgttatattaacacgcccctcacagcatgtattactgtctcataatattacagatttgaaactttacatttattccgtatctttttttacttaaacaggttatttgattatctctcccacatcatacgtagattctgtgaggtcagggactaagtctgactccttcaccgctgtatcctcagcacctagcacagtacatgacatacagaaggtgcttgtcaaagtcaaaataaaatatggagatgaatctctaaatgtaatgttttatttggggaagcgagaatcgcaactcggagcatacacacagatctggtggtctttggtatgtccgaaaaacaaagagaaggctgggcgttttattagaaagggaaatgcattggcactagtaaagtttcagggagctggcaagctctgattggtgactgacagtggtaagtaaaactagtattaggttatggcgggttgtttcagcagttactagctgaatctggtctcagggggacagcaggccatttccgcagcagttagtggaaatattggttcttggagcaggcgctgcgtgcctccagtgcttttcccctggcccctggattctgattccgttgggcataagaagagtgacccaattcgtattatcaactttcacatgctcaataagaatgtatgcatgtaagctatgggtgagtgaatgaatttggacaactcctcctccagtgaagaaaagcagaacttacaaccttgagccacttataaaatactaacatactaccaccacctgtgcgctgtcttctcagaaccatgctcttcccaggatgagtaactgtgtgcttctaagtggaaacctgatgacagtcacccagtcagtgactggcggaccccctattattactcccattctttgggcagggagatgcttaaccggctggaagcacagaggaagggcaggagaacgaagcaagtcacccggcaaacacagctgtatccggaggcctccgggcttccggaggtctcggggcttctgggcttccggtccctcttccggaggcctgggtttccgggacgtcgcgcgccgtgtggggcgcgcacgcagggctgggcgtgagggggcgtgcgcgtgcgcaggcgacgcgccgaggtactaggcagagccgtggaaccgccgccaggtcgctgttggtccacgccgcccgtcgcgccgcccgcccgctcagcgtccgccgccgccatgggagtgcaggtggaaaccatctccccaggagacggtgagtagtggcgcgcggcggctcggagtacctctgccgccgcgcgcatcggctcagcatgcccgtctctgtctcctcagggcgcaccttccccaagcgcggccagacctgcgtggtgcactacaccggtgagtcgggggcccagcggggagggggcccgggccgcagtccgcagcccgggtgcggctggccgtcgaggcctgggggcccggggcctggggtccggggcgtggcggcggcgaggtccgcatggcccgaggctgaggcctgggcggtggctcaggggcagcctggggcttgcggaacccgggcgggtctgaatcggcggctgtgagcgtcggctgcgggctaggtgttatctgacccgtcagaagcatttctgcaccttagatgctgcccttatgcccgctgcacagatgaggaaactgaggcttggcgaggcgaagtcactttcccaaggtctcactttcccaaggtcacactttcaggaatgggcagagctctggccagggaccattaggaaggatttgtaccatttctgtgcccctgcccccacttccatccctcccttcactggagatgaggacgaggtaattccgagtctgcagagctgctgcttcctccggggaactcggaattcgcccctttgcctagggtggggaaacatcccacttcctaagtcattgctttggcccttcctggccttgggggaagtagagctgcacggccttcttccgtctttttacttttgagccacttacaaatccaaggctcagtgacagcgctggctcaggctgaccgaaagctgcacgtgtaatttagtcccccagctcttctagaagtagagacttttctcgtcctcattttaaagataagcatctggaggctaatacatagtgataatacaagccaaaggaaattttagacacctccccctccccagccaga

SEQ ID NO: 9127 - DNA, 6000 bp, Homo sapiens
gtgtggcaagtcccccttcgctctctctctctctctccctcctgccaccatgtgaagaaggtgcctgcttccttttctccttccaccatggttgtaagtttcctgaggcctcccagtcatgcttcctgttaagcctgtggaactgtgagtccaattaaacctcttttattcataaaatatccagtttctggtagttctttatagcagtgtgagaatgggctaatacacggagcaagcattgtttcttttcatttgtttattttatttttatttttttgagatggagtttcacccttattgcccaggctggagtgcaatgtcgtgatcttggctcactgcaacccccgcctccagggttcaagtgattctcctgcctcagcctcctgagtagctgggattacaggcatgtaccaccacacccagctaattttgtatttttagtagagatggggtttctccatgttgatcagactagtcttgaactcccgacctcaggtgatccacctgtcttggcctcccaaagtgctgggattacaggcatgagccaccatgcctagccagcaagcatcatttctattataccttggtgttttgccatctttctaagtttggactagcttccaacatcttatcccttgaattttcaatattgtggaatcactccagaagatcctttcatgtgaagttttttgctggcatttcaacctttgggacatcttcagcccttttattaccactcctctcccatttgtggcagtttgcgtttactacctccctctggctgcctatctgaagttcctgcatcagggtctacattgccacagtcaactatttgtacttctagaattccactcacattcaatttgaacctcacttgcagcattttcacttctcatttcttcactgcactttcatcttggttgcaaaattcctctttcaattattcatttctgtaaaatgtcatatgggctcatcactgggaggcaaggaggcaacccaactataggatttgctgtttgagtaggagagccatagggaccaatcaccaacagactttgaaagacacaacatgactggttactgatcatgacgagcttttattaccatggtgatttgtggactgaagagctagcccagaagtttgtactctatgcaaattacattaaatttactatggcacctaaattttgagacttgtgttgtgggactgatgttacttaactaaactatggtaagagaaatgcatgcatgtcatcaccaaagtgagaactgcctgtatttatctatgttacgcaaatggaatgtcagttatatcgtggggggttgggggtgggggaggattatctgtatcctcagttgccagaactgtgtctgccatataataggctgtcaatttttttaaatgagtgaatacatcattgaggtcattggtttctactaggtgttggatttcaaaagaaaacttctcttcatttgatcacttggcttgtgtgctgtattctcaagctctttctttaaagactactctctcttctttctgtttaaaacattccatcaaaaattcaacatcctctagaaagtaagaaagtgctaacaagaaaaaaaagtcaaccccaaaaccaaaacccacagtgactggagtacatcaaagaggcgcaggaaccaactgaaagagctcccaaaggccaaagctggaacactttcagcaaaaaaataagtaaagtagtaatgagttatagtccaaagtataaaataaatatctgagtccatactgatataaataaatgattgaataaattaatgggaaagaagagaagaatctccagtgcagaagagtcccagataatttatttatacactccactctaaaggaggtggaacataacttccactcctgaagtgtgggctgtgcactgcgacttctttgcaaagagtacagcatggaaaaaaggagaaaaaataactttacagtggaaaaatctgacaaatacagcttcagccaggtgatcaagagttcatcaacagttataaatcaacatcaagaatcataaatcatgtcactaatatgtacctttaatatgatgtgatgaagatgacacttttcctctattaccttccccccaaaactcacaaccccaatctaatcatgaggaaaacatcagacaaatttcaataaggaggcattctgcaacatcgggcccagaactcctcaaaactgtcaaggtcatcaaaatcaaggaaagtctaaaaaactgtcatagccaagagaagcttgaggagatatgacaagtaaatgtaacaggtatcctggatgggatgctggaagagaaaaacgacattaggtaaaaagaaaagatctaaataaactatgaactttgattaatcataatgtatcaatattggttcattgattataataatgtatcatatcaatgtaagatgctaatgatagggctcaatttttctgtaaatctaaagctgtccttaaaaaattaagtctattagaaaaaattaacgtcttgtcctcagctaggttttatttgcctcttgtaccccgtggggaacaatgcaaggaaatgtgcggtagggagactttgttgatattccaaagttttatctcacttcaaaagcctgaggtttcctttcctctcgtccttcctctgtccactaccagagctcaccccagatctaggcactcagatcccagaggaagtggcttctcaatcccccgtgatgctcaccctaaacttttcccattagtaaaatccaggtcagaccaagtgggatcagaaaactttgggttatgtgggtgagctgggatagctttgaggacctgactatgagtgagtgaataatgtcctgagcccaagtcttcacaggaacaagttgttcccatgaattgtgtaatggatgctgagaggcacctggctgtggagatggtcctcagcatcagctctatttgcgattgtctcagctgaagggagtgcccttgcttaggtcgtatctggtaacaaaccacatctcattggactcatcaacctagtcgtataaaggcccagctctcttatcctaactcagagcaactctggaggaatatcctagtaccaggctccatgcaaggtcagctgaggtcttcaatgggacttcattgcagcccagcttcttcttctacccagtcctgcttccatcttctcccgtccacaagtgttgatcctaaaagtactccctgaaagataacctgcttgttcatcttcaccccagagtctgtctcccagggaacccaacctgggacagtgaagctatgctacgtatcagaaaggtggggatcccttcatctctaagggagcaagtcagtcacagaagaaagccttgtttatagtacctccagattaatgagaatccacaaaaatgtttattcaagagagggacataattaaatctatgttgtaaaaagaccagtctggctgaagaaggagaaagagattatagggggcaaataaaaatgggggtaccctagtgagaaggcaattgttcttattcaggcaagagatgatgatagagatggagaaagagattaattcagaagggatttaggaggtaaatccaatagggcctggtaggggcaagataggagtgtgaaactatgcccccaaagagttaaagaaaccagtcactaagaaattcttgagtttacaggatagcagataagaaaaaaaaaaaattgctaaactgccgaaacttcctccacttgtaggataacaaaactgactaaaatctgttggaaccaatatggccaactggagtttgctcagaatgagcttgctgatgtcacagcctgagtttctaccacgtatttcatgatgacgccccagggttttgcacatgggagccgtgaagaggcatagagagataactgtacatgcccaaggactttccagacctcccctttcctttcacaaatcacatactaatcccagaatccaacccctaaacttttgctaataaaactactgccttgaagccagcacatggagctagatttgaggtagacttctgtcttcctgttagtcaacttgcaataaaaagcttttcttttctcaaaagcctggtgtcacagtattggcttctagcacatcaggcagcaaccccctttcacttggtaacaagtggataagtgagggtatagaacatgagtcccttcctggtttgacaaactgcttagatgatggtaccatatacaaaacaggcatggtgtgggagaagataaggtttgtgagtgcagatctgaaactcaaacttgaatatttaaggtatacaaagaggccaggctcagtggctcacacctgaaatcccagcactttgggaggctgaggcaggtggatcatctgaggtcagaagttcgagaccagcctaaccaatatggtgaaaccctgtctctattaaaaatacaaaaattagccaggcgtggtggtgggcgcctgtagtctcagctactcgggaggctgaggcaggagaatcacttgaactcgggaggcagaggttgcagtgagccgaggtcataccattgcactccagcctgggcaacaagagcgaaactctgtctcgaaaaaaaaaatacatatatatatatatatacaaatgaagatgtcaagaaggttgcagaatatacaggtctgtatcatgggcccaagattactcagctcttaggaggtgcgttcaggattctagcctagattatatctgattccaaagctggcactcttggatactgacccgtgagtactgactctccaaggaacttagagtctaatgaaaggtgagaagattcctcagagtaggggaaggggaggatgatggaggctggaggaatgttcctgtctagttccaagcaggggccatggataggaattcctttgtggaattcatcatttcagaacaacgggataggatgatgacatcacaaggggatggggactcttgtcgtctcagagagaacgtgccagcctggctctgctttcttttcctagagggtctaacacctctcccggccctgacatctagctggttcctgaggaggaggcagaagtcatgaggaggcaatggggaaacagccatggcagccagtgcctgcctgtggatgcttggacattaaagggtcaccagctgagtgtgggctgagtgtccctgaacacaacatttgtgcttaggaagaacccattccagagctgagagagaaggatgccaacatgctgcttcctccctctttctgggggcatttcttctgcccctccaatcccatctctgagagctggtcccaggtccagcccaagcaggagaggcagccctcaccttcccaggtgtttgtaggcatgttactctccctcctagagagtgttccccgcagctccgccttccctgcaggcctcctccatcctctaaagcacaaatcatcaccacctgcacaactcgaatgtctttctcagccatgcctgattcctctgcaggaaggaaaaaggaagcagttcctggtagtgtatggagggacccacagaaaagccaagagcccacagcagatattgcttgttttttacctctaactactctggagtgcaagaaagggcatccattgtaaagtccaactcttaccaagtgggtgaggctatagacatcttgtctctttcttcagctgtgcagctcagacaggcccagatgttgagctcatgcaggagctagacccatacctgcgcatcatgtggatgaggcctttgtctagcctatgtgtctgaggctcctagataggcaaaggccatgaagttggggagaacctgtgagatgggatgaaactcaggaaggagtataaggctgtgggtgtcaagccccccagccccagcaaagctaaatacttccagcagcaacttcctagcttgaagcaaccttgtctgttcaattttataatcacaaaggaaaaagtgtcccagtcccctggcctttcctctcatc

SEQ ID NO: 9128 - DNA, 6000 bp, Homo sapiens
tgtgtgtgcagaggccaggcagggagagaggacagagcagctgggaggccccggggggcgtagacccatcctgggactaaacccccatcagatccttctggcacccctgcaaggagaaggtgtggtccccctgactttctccccaggggctcatctcgaaggaggcctcccggctgcacggctcccacaaggccaagaggaggagatctgaaatcggctccactccctcccactgcagaccctatcacctcctccactaggggtgtgagcttttggctggtgggagggcgcccgggagggtctctggaaagatgggaaccgggtgttaaagacctgcttaagcgagttatacccagaggccgtcagttcctgcccgagagcacatggcccacagtcacaggtaaactgaggcctggccctaagccctggggacctccacctgcttcgtgacgctggggacagtgtgtacgttttcctgcagggttcaggtgatggcagacggcagagggcagcagacggcaggctggcactggggggccatggaacccactggcagggacgctgggtgaggaggacctagggaccgggatgagacaagctgagggtgttgggcagacatttcttactttgtattttgatataataatttaaacaaacgtacacaaatgttgcaaaaatagaacaaaggactccctgtgctctatgcggactcaccagtcgctttgttctggcccatttgccggttctgtagaagcctgtagttccaggcaattgagactaagacacgataccccttcacctttcagatacgataccccttcacccttcacccttcaccctttaccccatcacttcaaggtgtgtttcctcagaacgtggaagctgtctgttacaaagtcaggaagctgacgtggatacaataatattactaatactcagcccgtgtgagcgtgttgttggccgtgtgctgtgtgtacgtggaactctctcccgtggtctcacactcagcccgtgtgagcgtgttgttggccgtgtgctgtgtgtacgtggaactctgtcccgtggtctcacactcagcccgtgtgagcgtgttgttggccgtgtgctgtgtgtacgtggaactctgtcccgtggtgtcacactcagcccgtgtgagcgtgttggccgtgtgctgtgtgtacgtggaactctctcccgtggtctcacactcagcccgtgttaggggtcactgtggcctgagcacagctggacgggagccagagagctgtccacggcaacctgcaggttttcaatgctctgtggactcgaggtggcactttttgtttttgttttgagttaagaagacgtgcacagatgtgaaaggtgggcggaaacaggacatctccctcctgtcctggccgcacagtcctgatctgtctcccaggctggagtgcactggcaccatcacagcttactgaggtcttgaactcctgggctcaagtgatcctcccgcctcagcctaccaaattgctgggatcacaggtgtgagccaccgtgcctggccaacctcatttttaatggccttagagtcttccatggcacagggtggagactgcccattacatagaccctgagcgaggggccctgggcattcccggtccattgggtgtagaaggagctgccgggagctgttggtgggcacagatgtccctctgtgcaggagcctctgtggagccacgtggaaggcgcgtgtcctgtgctcccgggcctggctggtttccagagcggtgctgccagtttagactctggccgagtgcctgcaatgtcagaggggtggacgggttgtctggggctggtttgcgtttcccttacgccgaggttgaacacttcactccatttacagcaatttcactttccacgttttgtgaagtattgatttgcatcctttgcctatttttcttttaaattatacatctttttcttaatttataagatctttaaaatattagagagatcagggccaggcgcggtggctcacgcctgtaatctcagcactttgggaggccgaggtgggtggatcacgaggtcaggagatcgagaccatcctagctaacacggtgaaaccccgtctctactaaaaatgcaaaaaattagccaggcgtggtggtgggcgcctgtagtcccagctacttgggagactgaggcaggagaatggcgtgaacccgggaggtggagcttgccgagattgtgccactgcactccagcctgggtgacaagagtgagactccgtctcaagaaaaaaaaatatatatcagagcgatcagacttttcactgtgacataagctgcaattttgttttctgttcatgtttggtttttgactcctttgatggtggtgtttttttccatgtgaaattgttttgtgtcattgaatttatcactgttgtgctggtagatgtttaattcgttctctaagaagaaaaaaacagtgcttcaggagacaggttttgtggatttctggggtgtatgcttgcccctcacggcatgtgtgaagccaccagccctgtccttgagcctggctgggggcgagtggcgcagggctggatttcacctagaaaggcctttcacatcccaagagtcctgagaatcagacactttcagccctggtttctcctagtgcctctgtggttggcttttccttccgtgagagtgtttgattatttcatatggtgtaagatgctacgcagagaccgtccctcccatttttgtttccagatgctgctaatcagttgttctaataatttgtggaatgcatcaatgaattgtttttccctgaggtgtgagagccaagctttcttttcttttcttttctttctttttttttttttttgagacagagtctcgttccgtctcccaggctggagtgcaatggtgtgatctcagcttactgcaacctccgcctcgccccccccgaccccaggttcaagggattctcctgcctcagcctcctgagtagctgggactacaggcacctgccaccacgcccagctattttttttttttttttttgtatttttagaagagatggggtttcactatgttggccaggctggtctcgaactcctgacctcaggtgatctgcccaccttggcctcccaaagtgctgggattacaggcgtgagccagtgcgcctggccgagagccaatctttcatcccaccccagactcctgagtgtgactctatttctggactctctgttctgccttggaactgtgtgtccacaccgggttcagtggctttgcagtgtgttatgtgtttagtaagtcatgccagcacccgctgggaatcctttttagtcatcatcctgggctgggtgttgggattcaagcctgtaatctaatcccggcactcaaggaggccgaggtggggggtttgcttgagcccaggagttcaagagcagcctgggcaacattgagaaaccccatctctgaaaaacatagaaaaaactccaaaatagttaactgtggtggtgtgcacctgtactgtggtggtgtgtgcctgtagtcccagcgactcaggaggctgaggggggaagactgtctgagccagaggtcgaggctgcagtgaactgtgattgcatcactgcactcccgccggggcaatggaaggagactcagtctcaaaaaaaaaaaaagccctgtccagcctttcttggtgatgtgatgcttttccaaatggacttgaaagtcagtgtgtccaccatgcgactgcaggttagtttaggaggaactcacgtctttgtgtggtgttgagcctctccatccaggaacacagcgttccacacaaattctcccagcgttccacgcacatggaccctgctcagcgcccggcccctggggctgctattgtcgagggcctgccctctcccaggagctccaacgtgattggtctgcggagaggctccctggtggttgacggcccacccagccgacctcccgaggtcgctgtgagcccccagcctggccctccccacgaggtgctggccttgggtggcagccttgcttccttgtttcaggggcagcatcactgtccgttatctactgctgcagaacagatcgccccaaagctcaggggcttaaaacaacacagatgtttattttatttatttatttgttttgagatggagtcttgctctgttgcccaggctggagtgcagtggcgcaatcttggcgcactgcaacctccacttccttggttcaagcaatgcttctgcctcagcctcccgagtaactgggactacaggcgcccgcccccacccctggctaatgggacgtttattttaaacatagacatctaacagctgggcgtggtctaggtgggagggttaggcctggggtctccctgagatggcagtaaggctggggctgggactcgagctgcaagtgggctggaggcctcagctcctctatggggcctccccacagggctgctgagggcccagagccagtccagagagccaagagccaggcgtgctgactctgggacccggcggccacttagccattcctgccatatcctggttggtgacagaagggacttggggtcccagcagcaccagggccacgggcaggtcctgcctgtcaggggacccaggcttccaggtcagctgtgcctggatttctccaggggctgatggtggagtcaccagaccatcctgccgtccagggccgggcagggtctcaccccttccgcctggcacatcatcggggcgtctctggtgtgtgaagggctggacggggcgtggggccctggaggggtgcgggaaaggacccccacccccagccgcctccgccttcgacggcgctggcccttcagggaggggcgtcctctgctcgctggcgcttcccgaggttccctcgcagcgggggccgagctgtcgctggaggcggggcagggcggggcggggcggggggcggtgaggtaatttccgcgatcagcgtcagtgcccgggccagaatcgaaactgagagctcctgggcaggctcggcagggcaggcagctccaggagggtgagcgcgggggtcccagggcggaggggcgggggcgcgggggtccaggggcggctccaggagggtgagcgcgggggtcccagggtggcggggccgggggcggaggggggggtccgggagggtgagtgcagccgggggcgcggagtcccgggagccacagacccagcccggggcagtgcagcccgtccaggaccagcaccctccgcagcaagacccagcgctgtggtctctgcacccactggagcgcaggattttggggtctcggctcccgtcctttctggatggcagactcggatgttttctcagaggggtccgcggggagtgccgggttctcatactgaagtctgcctccagtctgttgcttttaaacttactcttcttgtagcatcccagctgcggtggggacccggggacccatctcttcctggcaccctgagctctggtgggcactgtaccctcctctccgtgaggcccctccccaggtgcagatgtggagtcctcttttcctgggggccagtggtcattcaatagaaaaggaggtgctgtgtccttagaagagtcaggagcctgaggccctggggtgcacaggacccctggctggggcagaggggtgcggcctcctgggggcggcactgtgccaagggctctgccccctccagggctccacaagcagtcaccttggctccttctaggtggggcctgagacccttcaggagggagggtctggctgtgtccgggtcagtgagccctgtactccctgacaggacacagctactgccaaggcctccacttgggcgtcagggtggggagagtcccaactccttgcttggtggagaggcctctgcttgggcatcaggataggcagatccccagctccttgcctggtggagaggccgtgcttctgagctgggcctggaccagatgtcctctggcctcagtctcacctgctcct

SEQ ID NO: 9129 - DNA, 6000 bp, Homo sapiens
ggctgaggcaggagacttgcttgaacccgggaggcagaggttgcagtgaaccgagattgcgccactgcacttcagccaggacgacaagagtaaaaaaaaaaaaaaaaaaaaatggtttaaagaaaaaggacaatgttttacacatggatcaaattagacactgcaagactataaatctgcacccttctaatgtgaaaagggcttcactgagctatacttgtatattatgccctcgatattcactcaaggccattacaaggaacaaatgaaaacggcatcagcatttgctattaaccagttgagaacattctccactatttcaactaaataagtatccaggtgagaaacttcttttataatttaaccccagaaattttttttactccaaagaaccagttaacagaatagaaagtgttattgttttggctatcaggaagctcagccatgtttaattctcaatcacatcagctacattaacccataaaccatattatcgtcctcctccttataatctcatctcctatttctatattttattctctatttttaagtactcaaaacatttttaaagggctgaaaaagaatacacttgtggtagacatagcaacgtgccacccagatccccttcaaagaaggacttgttgacccaactattgggagagctgtcagcagaaaatcttcagctgtcagcccctcgaagatcatcttggctgcagagtgccatctggcccaggctaggctcttcccaggacattacaactcctttccaggctagtgccagacaacagagatcctgggagttggctgagactgtcatcaggcctgcatctcagtttagttttccctgtgcccactcctgtttctttccagtacctcccagagtgttgatcccagggccactccccaataaacatactgcacactaacctgtcacagagtccacatccaaagaacccaacctgtgacagcaccaaatcaaaagagactcaggaggctgaggcaggactgcttgaactcgggaggcggagattgcagtgagccaagattgtgccattgcacgccagcctgggcgacgagagagaaactctgtctcaaaaaaaaaaaaaaaaaaagagagaaaacatatcaggtaggggtattttacaaaggagagaggatatacaataaagtgttcatacatacatgggaagcaaaacagcactgactctggggccagactacctgggtttgaatcctgccttttagctctgtgcctcagttttttcatctggaaaatggggataataagagcacttatagggctgtaatgaggaagaaatgagacaatgtggataaagcagttccatagtgtttactatatgtcaaccactgttctaagtggtcatttaataaacagctgtgaggccaaacccacaggtcccgaggggcagttgggctgggactctccccagactctgggcatgggcacaggtacagtgtaggccagggcatgctgaagcatgcatgttcacagaaataggcctgagcagggctagcatgggtgacgtcacaggcgtgtgcttgtgtgggtgctgggctgctcctcccagacagcgcagctgcacgtattgccattcacacccacgcacccatatatatgctgagctgggggaagcccacacagaccacaccctctgcatgccctgtttttcctgcacctcctttggtggaaggaggcacctgaggcctgggatgctggcccagaagtcccaggaggaaatgggtcctgttccctgattacaggcctggcaacgggctgaaaactcaagctcttgttggcagggatttcttgagcccctagaggtccagacccagaggcaaaagtaaaagcaaggaagccttaccctgcatgttaggaagctcccaaaaaaatggagaaacggatgtaaaaagtgcatcagagcccacaggctgccggagtcagcacagtaagctcaatgagggctgcagcacttaagagggtgcctcctgtacaaaacaggatcagacagccagagaggggccccattcagcccccgtctgccttcctggtctcatcactccctgtcccctcctcagtcaggaaactctagctttgtaaccctaaattcaacaacctcttcctggcctcagggcctttgtacatgctgttacctctacttggaatgtacttttctccaacccacctttaataattcacctcgccatcgactcacttcctttagacctctgctgaggtctgaagagatctcgacccaatgtttttccttctagccctcatcataattgtctttatgtaacagagtgtttatttaatgtctgaactcccagagagctggcgctgtgtctctcttgtgctcctcatgttgtcaatgcccaacacagagaagagcagggtccacagaacttcaagcctaagccagttcaagccacactctgtgagcactcacgttctgctggattccctgtgcccaaggccagcggtgagcatgcctcccctcacccatgctgattaaccagatagcctccatgcccactgactactgaccaccaggacttacctaagccagtggatctcctgtgaggcagaaaactcatggagtcaggccgacttgggttctagttcccacctagtcatgttatgtggctttggggcaaattgtagaacttctctgaatctctgtttcctcatcagtaaattgtggaccatcattcctgattagaagataattatgaggatcaggtgtgaccacaggtgcacaccttcagcacagggtctacgctagctccgtcccgcccacgtaaagacctgccactaggtggcagtccatctcagctaccccaccgctccttactccacagaggctggctaggacaaagggtctcaatgtcatgctgaattctgagcttcttaggggacgcacttgaggaaatcaacgttaacacacaagtttccactacagcaagacaaagtcagaagcagcagccccaggtcactatccagctgagtgggttgcctgagcacacgctcttacaaactctagtctagtcctactatctcacaattcccaggaagcctggctctttctctggcatcagctggaagctctgttgggcttctcacctctgaaatgcagtaagttgtcctgctgtgcctggcagccgacccactgcctggctcaacatgtcagacaggctccaccgcgaccgtgggtgtcctcaattttggcggtgctgacaagggtagatagattgcaggggtgagtttcaagaatggcttcagaaagacaaagagtatgaattatattccataaccagaaaaaggccttgtggctggagaatggagagtgaaggatcacttgtgagagatgaaactggtgagatgggcaggtcatatagaacctgctaggccaagcagggagtgtggattttaggtgcaatgggaattcacggagggttttagcctggatgtaggggatcatgatttaatttcattttaaagatttaaagcatgataaatccaggcaaaaccaaactgatagatccaggcaaaaccaaacaaggtgagtagtctgggtgacaggagatggggccttcagcttgtgggctgagtgacaaggtcttgatggattggaggtgaggcaaagggaggaatcaaagttagctgcaaggtttttgaccttccaacttagagaagtttagcgccgcgttctgagaaagtgaagactgtggaaggaatcgtttggggagggaaggcgagctgtctaagggggggggatgtggaacatgcagtgggatgctggggcctggaacgtaggggagatgcaggtttggagtcaccggtgcctgtgttgttgggcaaagccaggggaaaggtcaggtcgccttgggatctggcctagcactgagtgcagaggaagagaagcttctgagatcgagaggcagcggctacaggaggaggaagaaagcaaggcggggaaaaccaaagttcaggagagcatttgcaggagggcgctgcggggtagggtctgagtcggagccccgaatcggactcgagtcctgtcgcgtggggacggagcgtgcagaggcccatgcgagggacagacacaaaggccctgggagctgcaggtcagaccactggacagcgcggccgcggacctaacgcccctgtaaggggtgctcacgcttggggggaactctccgaaagagaggaccactgaaagccaccctggcagcaggggcggaacagacagacgtgggtctggccgtcgccagaactgcctgcggaccagccccgcgctgccgggggggcgggacatgtcggctgtccatcagtgcccgcgaccaatccgcaggcagccccgcccccgcccctcccgggagagggcgcgcggaggacccgccgccgccggtgtgaggcggcccgtcctggctcccttgtccgggaagcccgcccaggtaactgagtttggccgggcattcccggaggacgcgccatcccctcacgtcccgtcccggtcgctgcatgggcggtgttcgggacgcgggggctgcgtctgtgcgggaccgcggggtagcggccgcccgtgcgagtacgcctgactgacgcgccggccgccgggcctgcggcctgtgggcggggctgccgtgcgtgacagggccgctcgtggccgccgggctgtgtccggggccgcgtgagaaagctctgcgggactgagggctgggtgggtcgaccgggaacggcgcgcgctcccgccgccatcgcgcctccgtccccgcctgcggcctgtctgggggtcgcggggcgcaggcgcggcgggccgacgggcgggggtcctccccacgggtgcgcgggcgcctttgttcccggcgccgaagcggggtggggcctcagggcagccccgccccgccgcgctgaggccccgccccgtgtccgcctgcaggagccgccgccgggtcccgctcgtctgccgcctcagcctcagccccaacctcagccgccgccgttgcgcttgctcccgggcggtcctggcctgtgccgccgccgcccccagcgtcggagccatggcgggcgccgcgtccccttgcgccaacggctgcgggcccggcgcgccctcggacgccgaggtgctgcacctctgccgcagcctcgaggtgggcaccgtcatgactttgttctactccaagaagtcgcagcgacccgagcggaagaccttccaggtcaagctggagacgcgccagatcacgtggagccggggcgccgacaagatcgagggggccagtaagtgcgcccacttcctgcctgggcccgccccgcgcgggggtcgtgggagcccggcccgactgcttgcaccccggccggccgccccagcgacttgggcaaactttcgggccctcccagactccctccgggccccgcccccgcttcgtctcgggtggtcactgggggcggggggcatccgggtcctcggtcacctgacaggacaccccccctcccccagctggggggagtgttccaggcgctttgccctgaggcctaaaaatcctcgcgggctggagacctgcggtgcaggcatcgggccccccagaccctgggagtggtggcggcgtcggcgaggggagctaaggcagtggcccccaccctgcacgggaacctggggcctgaccagacggtccccgcccactctttatccagaaagagcagtctgtgaaactctccgggcccccaggctgggctcttatttgcaaaggaatctttgggttccctaagtagaacttaggcagatgttgggtagggctggtcttggagcagagctgggcctactcatctccctctgggggagagggaggaaggtggtcttgtttggtttggagaagcctgagagaagccagtggctggaatttttttttttttttttctgctacttttgtcccaaagctgggttttggaggcctatgtgggtgggcagacactcaatgcca

SEQ ID NO: 9130 - DNA, 6000 bp, Homo sapiens
ttagaccttattataatgtaaaagagaaacaatgtggttcgtagtggcagctcccttaccaccgtccacagcagaggcacaagctccctacacatgcctccccaactgcaggttgcccagggcaatcccttcccgtctcaactgggtctctctgtgggctctgaggtcctctgctatcccctggaatctgctgcctcttgagctggggcccgacagcaagtgagcagaggtaaagaacagctgctaaattgatggcattgaggctagtgcttgttcatggctgggtgtgtggtacctggagctgtcctgagcaggggtcctgattccaactgattatgtggccagtgtgtcatgcaatcaatgaccaatgacagtgattgctactattgtactgtatgcctacacgtggtcatttaatgcttgaaccatccctacaaagaaggtatcaacccaatttttctgatgcttaaactaaggctgagaaaagtagaagttgaggtcacagagtttggtacattggcactgcctggattttaacctagatctatctgacccacaaggtctgtggtttattcccctaaagagaggtcaggggaagagaggctaagaagcttatctactctctcatttaatcttcacgacaaacgacaagttagaccccttgtacagaaggagtaaccaaggcttcgaaataaaaacttgccttgtgcagacagctggccctgggcttggaatataaatagtcactggtatacaggcaccagagaccaatacccacaggctaacacccactcagtccacagaaagaagcttaatattttttataagcatagaaataaaaaccaaaccaatactgtgacatttgctctgtgacttcctgtatttattatgtgctcatatgaaagcacctaagcattgtcaggataatgttcttcctcactggagggcgttatgaagttgctttcttttttccactagttaaaaaaaaaatcccttggaggaagggaatgaaactttttataattgatacataataattgtacatatatatggagcacatgtattttgatacatgcataccatgcaaagtatttaggatatccatcacctcaaacatttatcatttctttgtgttgggtacatttcagatcttctcttctggctattttgaaatataaagtaaatgattgttaactataatcgctctactgtgctataagaactagatcttattccttctatctcacttatttttgtacccatgaaccaacgtctcttcatcccctgaagaaaacattctttttttttttttagacagagtcttgctctgtcacccaggtgcagtggaacaatctcggctcactgcagcttccacctcccaggttcaagtgattctcctgcctcagcctcccaagtagcctggactgcaggggcatgccaccatgcctagctaatttttgatttttgtatttttagtagagacagggtttctccatgttggccaggctggtcttgaactcctgacctcaggtgatctgcctgcctcggcctcccaagatgctaggattacaggtgtgagcccctgtgcctggcctgaaactttcaaggtctcaagacactgtacatttaaagtaccccaatgttttccttttccacctcccgttctttctccttatctaacatgaagaacattgtattaaatctgatttttaaggagtttttgtctgttatgtgttaagggtttgtttggtaccccaatgaaaacattctgcattgcagaccaaagtgtgcttatttcaggggcatgggatcattgcgttcttagccattgtcacaaaatacatggagtcatatttaaaatgtaaagttgtaacatacatatgtttaaaatggaaatacaaagcaaaaagatggatgtacaatgtcatgtgtattcagttctctgtacttagtaaatgtaacaaactttctgtctattactgaactataggtgcaaggacacgtctccagttactttgcatctgtaatccacaaagattctgggcagctgtattatcatagcttggtttaaataaactatgtagtaacaatgaacaacaagaacaaaagaaataatagcttgcctgaggtcacagagccagcagatcttataggtggtgcgtcatttatatgaggaatgtgtatctaggagatactgtttggcgttggctaagggtggaatgaatcatgtatgtaatagattatgcaatttacagtgatgagtggatagatttacttatggggtaggttataatgtggtgggatgtgaatctagaatgtgcctcctaggcagtcatgcagattgtgcatttggtaagtcaggtatgtcatgattcatgtatctaatagctcttcatttgcagtgtccacctagtagctcttggatataacgggtcatggctgtggcatggtgtggttgatcttggttgatcgtagaccttatttaattgaatctaagatgtcatctatggaaaaatgcattgttatttttgttgccaatgaaattctgacatgacattgatcacattccccgttaagcaatgtggaactgtgcctcagagtggaagaggccatgtattcctggattgtgtggggagtagctgtgcctgtggcctgccataggtgccaggcaggtggcagaggcctgggctcagcccttggaggctcctcccggagctgccctccacatctcttctgtgtttaccccttggtcggatcttctgtttcttcccacctctgcactgcccccaaggccggtggagccaggtcagatactcctgaggtaggcatgggaggaacccgccggtatttggtctctttcagccccttatcaagtctcatagtgtgggttgcagggggctgcctcttgctccctccctcagagtcttgtcctggctaacagaaaactgagccaggatcatctttctattttacagagggagaaattgaagccctgagaagagacgatgtaaataaagttatcggaatagtgactgagctagttcctaaccccaggtctcctgacatcaaatctagcctctcttgtcctccacaacagttgctccctctcccctttccctacaggcaatagcactccccagtcatctcagcttcagaggtcagatcaagtggacagaataaagctaagcagggcagagaaagggcttctagcagtggaaagaacatgaagatgcctcctcataccactcgaacacacatgccctgactcccgatttgctcactcattaatccacccacacattcactcattcactcactcattaattcacccacccattcactcattaattcacccacccatttgctcacttactcagtaatttaccctcattcgttcattcactcactcattcatgcattcactcaactcactcattaattctccctgtctctaattcactcactcctaattcacccactcatcaattcccccacacactcactcattaattggtgctcccactaattcgcccactcttgctcacaggtgtcaccgaggccctccaacctgcccttccagccagcagtggaggacaggctcccaggcctcccaagtctcaggcttttcttcctctgccctcactctctgccttctacatcaagactttacttccccagattgattggcagcccttgaaaatgtctgcacagaaggcaatgagggctggagggagtgagaagaacagagtgcaccatgagcttcagacagccaggaccagctgtgtaattttcagggccccgtccaaaacaaaaatgcacaatcccttgttcaaaagtcatgatgaattttaggacaaccacagcagagcactgaaccaggaaccaggactttctaagggttgggttgcctgtgactgcactggcgatacccccacaaagcccactctgaaggtaggagacgggtggagagaaacagggggatggcaagggggatacgaaacagggagagggaggagggggaagaggatggacgtctaccaggccccacttggtgcttgatttatgccatctcatttccttctcaaaccaccctttgaagttgattgtacattttacagaaaaggaaactgaggctcggagaggagaatcatttacccaaggtcccagttagtagacggtaggtgcctgaatgtaaatccaggtctctgcctgctccgggagggggtgggggtgagggaaacaggagaatgtgatgggaaaatccgagatggagccagcctgggccagaaacactgggagctgtgggagacggagaggggcagggtgggatcacagggagcaggagcggggaattggaggtgaatctggccctcccaaacttccagtccattctgctcccaggggaaccgggaaactgcgggggaactggaagggagctcccagaacaaggatccagaagattggcatctggggcctgggatttaggtttctaaatcgtgggccatggggcagccttatctctgcaaaagcattgagggtagaagtcaatgatttgggaagttattgaattaggggatctcggaggtaggctgtcagtgcctgatagtatcagttagaatgcctgacttggggtgacaatggcttggaggggtgggtgagtcaagggtcaaatgagtgcccgtgagtcatgatgcctgccttgtacaattgataactgaacatcggtgagttagggccccagcagttgtaattagcaccccgggtgtcagccagaaaccaacaaacagccaaatccctgcagccccgcccagcctatccaccggcgggggaccgattaaccattaacccccacccctccccggcagagcctccaccccttcacagaggctaggccaagactcccagcagatcttcccagaggacggtttgaaaggaaggcagagagggcactgggaggaggcagtgggagggcggagggcgggggccttcggggtgggcgcccagggtagggcaggtggccgcggcgtggaggcagggagaatgcgactctccaaaaccctcgtcgacatggacatggccgactacagtgctgcactggacccagcctacaccaccctggaatttgagaatgtgcaggtgttgacgatgggcaatggtaggtgggggcagatgtgcccaggtgtgccagtgggggcaggtgtgcctgggtccaggagcagatctttggcactcaactttggggtgggaggagaatgatacaaaatggtaggttggtcctacaggccagcacaggtgttgccaagtgaagcccatgtgcccaggcacagtgatcacaggcattctgggtgaagggaggcctgcaagggccaatttccagcaaaagtcgatcccggctattcctcccaggcccttccagtcctcactgcctcacagtggctctgcttggcgcttggcacagtgacgtgatggtgagctcccccttggtgcccagctccagcgattcagcccagcacggccccttcgtgaaccccttgggcctaggttcagagagacggcaagggatgttgtatccctggagatggtggttggagacataaccgcatttctcggtgtctttgggactttcctagggaaatgaaattggcacttagggaaaatggagctctcagggaagttttgctaactacgaagccaactcagcactgtgtgtgttgtgtgtgcgttcgtgtgtgatagtgagtttccatgtaggttgtatgggtggggtgatgccttcaggaacccatttgcatatgtgtgttcatttgtctctgtgtgtgagttctgggtctattttcctttgtattcattgagtgggtctgtgtttgtgtcttaggagttgcccgtgttgatcttgcttatgtatgtaagtgtgtatgtgtgtgtacttgtgtctgtggatgtttgtacatgtgtgctgtgtgtgcgggtcatagagcacatgcgtttgtgcatgcggac

SEQ ID NO: 9131 - DNA, 6000 bp, Homo sapiens
gtttcgttcaggatcaatatttgtggcaaggtttcactctctgccactgtagtagattgagtggaggcctccaaaaagatatgtccaagtccccatacctgtaaatgtgacctatttggaaaaagggtctttgcacatgtaataaatttaagaatcttgagatgggattgccaaatcgttctggataggatgagccctgaatccaaagagaggcatccttgtaggaacagggcagagggaaatggggcaggcagaacaggagatacagagaagaaagtctgccaagacagaggcagggatcagagtgaggcagccacaagccaagtaatgactggagctaccagaagctggagaatgcaaaggaggaccctcccctggagccttcagagggagcacggcactgtcaacaccttgattttggactttgggcctcaagaactgtgagagaataaatttctgttacttgaagccaccaaatttgtggtaatttgttacagcagccactggaaacaagtacagcctctaaacagcccaaacttggaccctgcttgaggctgcctccaactcccctctcccccaccaagaccctgtgtatagcttcggccccattcaaaggctactccaggctgggtgcagtggctcatacctgtaatcccagcacttcgggaggccgaggcgcgcggatcacctgaggtcaggagttcgagatcagcctggccaacatggcaaaaccccatctctactaaaagtacaaaaatcagctgggcgtggtggcgcacacctgtaacctcagctactaagaaggctgaggcaggagaatcgcttgaatccgggaggtggaagttgcagtgagccaagatcacgccattgcactccagcatgggtgacagaacaagactctaactcaaacaaaacaaaacaaaacaaaacaaaacaaaacaaaacaaaacaggctactccagtcactgggcagcaccccctgcaggcgtgagggccacttgggcttgggatgggcatttatttacttacttagcttgacatacagggacaggaatgaaccagccctgtttttgttccaggatgctctcaggattgtgagttccagacaaaccagaacccaaaaagtataagggtttaagggcgggaggagcacaggagtctggacagtcacttaaaggaactaagacttcaattaggtagcttccaagtgtggcagctcccacagttttcactggaatgggcatttttgttaatttttcccctatggaatgctcactttctaaagacactgctgatcaagctaattgcatgtattcaataacatttcatttatctcctttatttgctattatttaaagatatgtagtaatgacagttaatatttattgagccactcagtatactaagagcatgatatgtactcatccaaccttcacatcagccctatgaggtgggcacttttattatctctgttttacaaaggagagcagagactaatgaaaatttgcccaagtttgcaccactagtatttattcagctggaacctggacccacgaagcctggctccaaagcaggctctggaaaccaggctagaatgcaggtttccataccaatgtgcaatgctactctggacaagtaattttgtctctctgtgcttcagtttcctcatccattttttttttttaagacagagtcttgctctgtcacccaggcccgagtgcagtggtgtgatcttggctcactgcaacctctgcctcccaggttcaagcaattctcctgtctcagcctcccgagtagctgggtctacaatcacacgccaccatggctggctaatttttttgtatttttagtagagatggggtttcaccatattgatcaggctggtgtcgaactcctgacctcaggcgatcacccgccttagcctcccaaagtgctgcgattacaggcatgagtcaccgcacccggtccccccctcatctaattttttatttttattttaatttaatttattgtatttatttatttattttttgagatggcatctttctcccgtcgcacaggctggagtgcagtggttcaatctcggctcactgcaacctccacttcccaggttcaagccattctccttcctcagcctcccaattagctgggattacaggtgtgcaccaccacacccatctattttctgtgtttttagtagagacaggctttcaccatgttggccaggctggtcttgaactcctgaccttaggtgatccacctgcctcagcctcccaaagtgctaggattacaggtgtgagccaccaggcctggcctatttttatttatttattttttttgagacagtgtctcactctatcgtccaggctggagtgcagtgacatgatcatggctcactgcagcctcaatctcccaggctcaagtgattctcccatctcagcctcctgagtacctgggactacaggtgcacgccaccacagccggctaatttttttttttttttttgagacaggatcttgctctgttgcccaggctggagtgcagtggtgcaatctcagctcactgcagcctctgcctcccaggttgaagtgattcttgtgcctcagcctgccgagtagctgggattacaggcatgcaccaccacaccctgctaatttttgtatttttagtagagttgaggtttcaccatgcttgtcaggctggtctcgaattcctgacctcaagtgatgcacccaccacggcctcccaaagtggtgggattacaggcgtgagccaccacagccagtcagttttctcgtttataaaatgggaataatagcacctgtattgaagggttgttgtggagattgaatgggaatgtgtacttagaattccaggcatagtgcctgccacaagcactcaaggaatgagctggagttcagctgataataccaggcagtgtctctgggcaacacggaatgaagacaattctctcttccaggttttcaaacctcctggaattcacaacgtccacatgacatgccaggcccagagggggatggtttaaactggagcctgcaggaaggcaacctgaccaacctgctcatgggtgctttaaggatcataggtacgagaatcagctggagttgttggtgaaaatgcagattccgggtctcatccctagaccaaagatatctgaatcatttggcgatgggtccaggaacctgcattattcaacacacttcccaggtgaccgtaaatgtcaaaagacaaaattacaacaaacttaaacatcttaattggcttcattcatgattctagaatcgggcaagacttcattcctcaaaatagcacaagtgtcccaatgagctgagcagaggaggttggttttatagacagaaaagggctgaaaaaagcagaaacaaagaacaaaaagcagattggtcatttcaaagttactttccttgtaaggcaggaacagggaaacagaacaagagagaaataactgattggtcgcatcgggttacttcaggttactttttgttgtaaggattaaagcaaagggaacttcattatgttgattaaaacggtctgcttgggaaatcagggtgtgtatctctcttctgattttgtgaaaggttatcagtctgatgatgtagaactttagcatgagtgactccattttgatttttagtctagtctgttgagaccctaatgccagaactttttttgtttgtttgtttcgctcttgttgcccaggctggagtgcagtggagctatcttggctcactgcaacctctgcctccagggttcaagcgattctcctgcctcagcctcccaagtagctgggattacaggcatgcgccaccacgcccggctaatttttttttttttttttttttttagcagaaaccgagtttcaccatgttggtcaggctggtctcggactcttgacctcaggtgatccacctgcgtcggtctcccaaagtgctgggattacaggtgtgagccaccacacccagcccttttttttcaagacagggtctctctctgccacccaaggtggagtgcagtggcgccaaaacagctcactgcagcttccacctcctgggctcaggtgatcttcctgcctcagcctccccagcagctgggccccaccacaccggctaattttttaacttttagtagtgacgaggtctgattctgttacccaggctggtctggaactcctggcctcaagacatccgcctgcctctgcctcccaaagtgctgggattacagatgtaagccaccgcgcctgggctcctatgatttttatttaacataatgcaccatggaatttgtgctctgcttagttcagtctgagcaggagttccttgatacttcgggaaacactgaaaatcattccatccccatccattcattcctgcagcacccaagtggaaattctgcgtttcagacagggacactacccttagagagcagtgggcttccccagcagcgtagtgaaacatgatactcctgagtttcatgaaaaaagggcagacatctggccagagctgggaggcaggaaatagagcacggtgccctcctcccatactccagcttggattactgaggctggggcccaggccctgcaggaaaggaggtgcatgactactttaaggccactcactctgtgactcaacgggccgggtcggggctggaactcaatgccctcccgggcctggagagcccacgcgccgtgggcggggctcccggggtcgcctaggcaacaggcgcgcgccgcgcccgagcccagagccccaaagcggaggagggaacgcgcgctattagatatctcgcggtgctggggccacttcccctagcaccgcccccggctcctccccgcggaagtgcttgtcgaaattctcgatcgctgattggtccttctgcttcaggggcggagcccctggcaggcgtgatgcgtagttccggctgccggttgacatgaagaagcagcagcggctagggcggcggtagctgcaggggtcggggattgcagcgggcctcggggctaagagcgcgacgcggcctagagcggcagacggcgcagtgggccgagaaggaggcgcagcagccgccctggcccgtcatggagatggaaaaggagttcgagcagatcgacaagtccgggagctgggcggccatttaccaggtgcgggagcgccccggagcgtggcgggcccttcgcttaggccgcttgaacatcccctcagacctccaggccccagactccctctgggtcttgccctctgcctcgctcctactgcttgaggattcgatgggacagcgacgcactgcgtccccccaccctttgtccccggggcgggcgtgtttctcgccgcagcgtcggagcccccttcgatcccccacctcccttctgttctccagctcgggtgatctctcaagccgggggaccgccggtctgtgctctcaacgcgaatccctcgcaccccgaccccgccccctgcctgtccactctttgtcccctggggtgatttagcacccccactatttccttttctggagtggaccacctcagactctcttcctttgtctccctgggggaaaaggttactccccccgtccctccttcacatttcctttcccctagtctcagtgtgcgtcgagtcccagagatgacagtcccctttcccctttctgttcattcatttattggataggagttggcaagcttattctgtgctaggcaccgcttaggcattggaggtggtgtttgctaatcaggacaggcaagatcctagccttagtggggcctagagtcgaatagggcaatcaaacacaaaagcaaataatttcagatagtgacaggtgctgtgaagagaacgacttcctaacggggtacagggtgactgcatagaaggccggctgtcttagagaaggggatcagggaaggcctgtcaaaggaggagacatttgctttgtgagctgaaccaagaggagcagaaagccgtgaga

SEQ ID NO: 9132 - DNA, 6000 bp, Homo sapiens
ttagccaggatggtgtcgatctcctagtgatcgcccgcctaggcctcccaaagcgctgggattacaggcgtgagccaccgcgccggcctagtgcaagacttaaggaagcactcactctcagggtcatgccaatgaaggctcagcactcacgaagccctgacagcaagtgcctccttaaattttatgccctaggtgcctcacccccactaccctagtcccagccctggggagtgtgctctctacaagccaaataagataggctccaataaataaaacagaacgtaaaatggctcatgccacttgaaagtccaagaggtagttctagcttcaggcatggttctatctctagatctgtctctggttcttctttcttcactttattctcagccagtctctcattttggaggcaagatggtcagggctagctgaaagctgttaggagtagggccctcatgttttcatctgtttactgtagggaagactttgattggctcttctaggtcacatgctcatccctgtgccaatgccaggtgaggcacgcagaatgcccagccttgatcagctgtccagcctgtggtgagagtgactggggctgcactcagcactcacgccacgagaatcactcattgttgggactggtgtagcaattcccaaacaacagaggtggatcagttggctgcggttgcttttacttctgttggtccatagcgttatggaaatgccacagaaaattttggaattttctcaagtcatctgagccttacacatgtatctgtacccaatttagttgcgattctttgggcttcaagtcacagtatggtgccttaggctggactcctttagtggtaagtgacagaatatcttagtttgggctggtttaagcgaaaatgggaattttttagcttgtgcaattaaatagtctaggagtggcactggtgaggtagagcgtgctaatggacctgcccattatggattcattttgttctttcagtaacagaccatgcccagatgaaaacttcattctccattttcctgtggagccagctgtggccatgtgacaaaacactggtccacgcgatgcaagaaaaagagatgtttgacacatctggatcatatttttattagaaggttattttccctccatgttttcttcccacttcctgggaaatgagagggtgttgctttgttttcatgctactaataaagacatacctgagactggataatttataaaggaaagaggtttaatagactcacagttccacatgtctggggaggcctcacagtcatggcagaagacaaaggagaaactaagttatgtcttacatggcagcaggcaagagagcttgtgtaggggaactcctgcctttacaaaaccatcagatctcatgaaacttacttgctaccacaagaatagaatgggggaaaccactgccacgattcaattatctccaccttgccccacccttgacacgtggggattattataattcaaggtgagatttgggtagggacacagaaaaactgtatcagacaatgactagactcaaggatgaaaaaccgtgtcctgaggtgccagagttgaaccacaagcttggatccctgggcatccttataggactaagtgtcctacttgcccaggataaactgttacatgaaaaataaataaacttttatgcatcttaaatcattatattttggggtctaattgttacaaaatcttcaaatctacttaaataacttcctggggtgctggaagaggggttcaaatcagatcgtcgggatctggtttgcttctctttatgtcttggttctgctcctttagcgtggccttcactcttcgataagccctcccctggggtttcaccatttgtgccagcagctcctgggcctcttccatccagattccatttcagctggagtgtgagtcttcctcccagtattcagtaaaagtaacccaattcattattaattggccagcttaggtcatgtgcccatatctgaaccaatcaccaaccactagttgtccaaagaaaggccatggacagggctgcacacgtgagctggaaacaggggtgagtacactcagtgaaaatggtgactactatgggaagaacaaactctggatgctgaggaaacaaacagaaatgcatactacaaataagaagctctaaatattcaaaaattgagttcaaaacacggaacgaaatagtattttttcttgtcagacatttccagtaaaactaaatcatgtgtgatagtatatttgttcggcagcatatggttaggcaagttgtgcactgtagaactctataagcaccccttacattgcctacctctgtgaatggttcttttccatttctttttctttttttaatgttttttttttttttttttttttttgagacagagtttcgatcttgttgcccaggctgaagtgcaatggtgcaatcttggctcacctccacctcccaggttcaagtgattctcctgcttcagccttccaggtagctgggattacaggcacgcaccaccacacatagctaattttgtatttttggtagaaacggggtttctccatgttggtcaggctggtctcgaactcccaacctcaggtgatccacccacctcggcctcccaaaaaattacagggattacaggcgtaagccactgtgcccagtctctttgctcttgctgccagggcttgtattgcacaatttggacaagtgtaaatgtcctatgaatagtatatcacagtctgtacgttttgcatgtatgtcaattggatttcaccaaacaaaaccatatattggattcagtcttgcaatttaaaaaagaaatcatttgttccttcacgtctagtttgatattttctggtttgattctagtttcctcagctccagttaaattatctatggatgttgattatagtcagcattaactatcaagggatggatttctcgccttcagtttttgtcagtaattatttccgttattgtgggcccttcatttcaagctccttatgccttaatttcttcattttttgtttctataatactgtggacttggtctataaatgatgtgttagataaatgccttccatgaacacctctattttacagcaaccatgggcagcatttttttttttaagttccaatccttcaaaaggagctctccaaatgattttaccatttcatctcttttggtgagagatttaaaattaaaacatcattttccatagaatggcaacatgaagacagatggtttactatgtagcaaaaatagttctccctgccagaatatctcctttttgattgtccccatttagtctcggttctcctatgacacattcttggaggtttctgttctttaactgaaactcatcaagccaaggtgactaaaagctaatgttcccagtgagaatgggaagattcatatcgtcttagagttgaaagacctgtggatgtcatcaggtcaaacaatccactactaactgaatcctcttctcaatggctctgagcagtgatctctagctttagctttgtcgcttcccagtgagtaagaatttttgtctaatttctgatgattatctttgcctttgtgaatagtgcaaatgattagaaagatcttccttggaaatcaactagtaacctctctttctgtgagatcctctcttcagaagaggaataggagaatgtttaggagcagagctgggcactacacacacctcccttcaatcctagctctgatagtggccagctgtgagaccttagcaagtctgtaaaatgtggatgctggtgcctaattcattattcccttaacaagattagcacaatgcccagcacactggtgctcaatgtgtgttagcaattatcaatcaagtatgctttagggaggtaatgcagtcaggggcaggtgagtgtgaaattcagtccccttcttcatcttattgtataggcagtatctcataatggcaatgagagctctattgccaggctaaggaggcttaattaaatatgggcctggtgtatacattaacagggcacctacctcaaaaagtgcaggggagtttgaatgagtcaatccatgcaaaaggcttggagagtgcctggcacctaggtggccatcttgataaccacaaggatttactgagcacttgctctggggtcaggctttggggacagacagtgatgaggccaagtctcagccccctgggaaacacattccggcgggaaagaggctgaaacagggaaactgtggcaaatgataccagcgagggctaggtccctgacacaaggaaacccaaggaagcatttggcttaagcggtgacaatatccctctcctcagatgccaaggtcaaggcgagccgcggcaacaccatctccccagacacacacgcaaaatcggcccttctcggggaaagggcaggggctgaagggggaggcggggtgggcggcggctggaaaaaagtgaaatttcctctcctcctaaaataagtcattggagcgaggagagcgagcgctatctcagtaggctgtgggcgaggtgcgggggtggcgggggcacgctccgggtccgccaggaggggagggatcggaaggggaagcggggagggaaaggtgggtgggaggcgcggggagcgttccagggcggctgctcacgggtggccgcagcccagtgctgggactcgcgcggctcctcctcttagccccccaccccttcctcctctttcctcctcctccttcctcctcctcctcctccttcttctcctccttctcggccgggaggaggcagggctggatccctcagccgccgccgctcctcctcctggcaggccggccgcggagtcagctgacgccggcgctccagcctcgcctccccgcgccgcgctctgcgctccccgaaagtggctgcaagccggccgcccactgtcagggttggggggacagagaaagtgatgtgcgccttctaaagcctcgcccagcgccgccgaagcagcttcacctctccaactttctcccaccgactgcttgtcttgaccctgccctccaccctccccagagccacttcgggtgcgcgctcttgggtaaagggggggtcaccggctgtctgggatggcttccaattttaatgacatagtgaagcaagggtacgtgaggatccggagcagacgcctcggggtgagtatcgatcctctccgtgttgctgttcgccggttcgattgtctctctcttgagccagcatccctggagggtggacggagagtccccggccgcgcgccggagaattgcgcggtggctttctcagccgaaacccgcgtctccggggctgtcactgtaaggccagcgtctaggtatgtaatggatctatctttatctcttggatgacttggctttctgatggtggccgcgtgttgggcttcagtagcccctggagcccatctactcgaaataaatatttctcggtagccatggaagttggagctgagaagcccgggcgggggtgcctgccggatgcccccggttcccctcttttcccactcgccgccaacttaacttttccgggggatggatcggctggttgagaaagaggacacgcatactcggtgtgaacgaggtcacgaaccctctgaccccagggagagatttctgccaagcgtaaggtgtctttggatccccccacctctgtcccaggtgtcgtgtcaaaggcggtgcgggctggcctctggtcggggccaacttgggtagatacttgaatctggattttccgtggttcgaagccggggtggtggatttctgttgctggaatacaccctggaggtccacggaagggttatttacgtggaacctgatacctggcatagcgcaagtgctccctacatatgtcctgaaaggaagaatgaatgaatcttagggcacttgggacagatgttgacacaggctagctccttccttaaaactccctctctttcgcccctttctctcttggctcttcgctgg

SEQ ID NO: 9133 - DNA, 6000 bp, Homo sapiens; identical to SEQ ID NO: 3708

SEQ ID NO: 9134 - DNA, 6000 bp, Homo sapiens
tgcagacaaccgactcttaacagtagtgactagatatagtacttatacacttaaccactcaacaggaggagatggactttcctgatgcaaaggcttttgctggccaattggcagagatgccaggaatatgtgtggggatgggaaataggcctggtgagctcagccacctgaccctccttgctacacagaagcggtcacgtcctgtcaagtaacctgaattatgtttcttaaaattgagaggactcagatgtcttttttcactctagctatgttgtttccagtctccagttagctttgttgtcccactcagtggcagagcggtgcaagactaccctcttgagtttggatccctctttgcttttgtctgggctgttagccactaagaaaaatgtaggaatgaaatgttgggcttctgtgcccacgtggcccatttctcatgccctcttttggtcctgcagacactctcgaaagcgatgggaacgctttgtccacagtgaaaatcagcaccttgtcagccctgaggccttggatttcctggacaaactgctgcgatatgaccaccagtcacggcttactgcaagagaggcaatggagcacccctatttctgtgagtccagatatctagcccacagagtttgtgcaggcgcagagtcctatagaacagagtcgtaatcccagctcctgtcagcttgctgcaaagttaattcacccacactgagcctcagattcttccagtggggatagtgatggcaactacattgcagaattactggaagaattcttctgtaacagaatacatgacacaagagcattcctaaataaactcttttcatactgtgaggatgacacttctcagtgcctcagtctggaatggttgaattagaatacacagccctgtatctttcctgtccctagtaatcattcgttggaaagagctaatgaggcttacaaatcttaaaattgtatgaacaccttgacttagatttgtgagtatagccacctgtgccatcctaagtgaaaataccactgagacccaccccatctgcactgtgatgttagctgcaacatgacatttttccttcggtgtgatggttttgtactgaatcatttatacttttgcccaatacctgaagcagatagataggctgattgggatagagaatgtggtcatagccctaagctacatggacctatagctttggcctacttggtactgggctgtggacacactggtaatatattaccgtctttgccgagttacagtgtcttgtctccattaaacctcaacaggaccagggcttcattaaattcgctctgctataaataattacctcatctttctaccatttgattgaaaggttagcttttaccacagtttgataggaaagctatttctgctttttaccacttgtctaattcatggtgaaggcaattgccaccttaagttctttggggaataatgtagagtatatataaattgcaaagaatgaagctggctgctttcaggcttccagaccattagtttaatctttcaagcaaaacagaacctagcctttttgtctcttttctagacactgttgtgaaggaccaggctcgaatgggttcatctagcatgccagggggcagtacgcccgtcagcagcgccaatatgatgtcaggtcagttcattggtaaattttctttaaaaaaatgtggaagtcaattactgttcttagctttgtggtctgatttcttgtataccttctcttctccgtactggtggccttgtgacttttttttaaccaggtttcagcatgcttgacatttggtatactttagtgatactgtcttgagtagggtatccccttctaggctagaatctcagcattcctggctgaaaatttttggcataggggcttgaaagtgccaagccatgaaaaggaaaaatacaccatttcatcttatagtttgaaatgacagtagttacatggcccttagaaacaatgttaagaaatggggtatagaggtggggtttatacataggtgtgtatgtgtacaaggacagttccgtgacatgtgccagagcaactatagagtgcctatcagttgtaaaaacataagtaaaatggttttccattattggatcattgtgacgcacagtgaatttttatagagtacccagttattccaaaggaactacaggcacatagcataagaattatacatataggcaacatccaagtgggtgcatatctggtagtgaaggcatttacttacatatcctcaaataattgctgttgccctcctcttttttaagaaaagaactaactgccttctagaatttaccccttgagtatcctacctctgtacagagtaatgtatatccaaacttacttgtagccttatttgtaataacaaaacattgagaatagctatcagtaggaaactggttaaatcagttatggtatatccatttaatggaatgtggtgcagccagtagaataagagtttcatgttctgttagatctccaactccaatataataatgtgaaatttaaaacgcaagatgcagggccaggtgcagtggctcatgcctgtaatcccagcactttgggaggctgaggcgggtgggtcacttgaggtcaggagttcgagaccagcctggccagcatggcgaaaccctgtctctactggaaatacaaaaaattagctgggcgtggcggcggcgcctttaatcccagctacttggaggctaaggcaagataatcgcttgaacttgggaggcagaggttgcagtgagccgagatcgcaccgttgccctccagcctgggtgagagtgagactctgtctcaaaagaaaaagtgagatgcagagccatgtctaagaggagtggagaagaatgtataataatgttctcatatatatatatatatatatatatatattttttttttttttttttttttttttttttttttttttttttttggagacaaggtcttgctctgtggccaaggctggagtgcagtggcacaatctcagctgctgcagcctccgcctcccgggttcaagcgattctcccacctcaacctcccaggtagctgggactacaggcgcccgccatgacgcccagctaatttttgtatttttagtagagatggggtttcaccatgttggccaggctggtcttgaactcctgacctcaggtgatccgcccaacttggcctcccaaagtgctggcattacaggcgtgagacactgcacctggcctttgtatacttttttgaaccttttgtattttgaaccatgtgaatgtattacctgtgtgtacacacacacacacacacacacacacacacaaaaacatgattagagaggtggaagaaatcaaatggaaataaattccaaaacacaattttatcttagaaaatgctctttccccattcaaattgactttcagtaattttgaaagctgccagctatcaagacagcatggtgtaagagcacatgagctttgactgcagtcatgtgctgttcagtatggtagtgactagccacgtgaggctatttaattacaattgaataaaatttaaaatgtagttcctcagttgcactagccatatttcaagtgctcagcagccacatgtggttggctactggtcaccagggtggacatctctgccctagacaggcctgggttagaatccaaccatggttgccacttgcttaatcgtgtactttggacaaactccttaaattgtccaagcctagatttctttacctgtctcttaaattgattaggacttgccactttaacttgaatttgtgagggtcagacttgaagtatatgtaaaaatccagctaagaggaagtcttcagtaaagaattattgtgttccttttgcagtgagtgctatgagaaactggtaagattgccatggttggtgtctttggctcactgacagctcttttctttcagggatttcttcagtgccaaccccttcaccccttggacctctggcaggctcaccagtgattgctgctgccaacccccttgggatgcctgttccagctgccgctggcgctcagcagtaacggccctatctgtctcctgatgcctgagcagaggtgggggagtccaccctctccttgatgcagcttgcgcctggcggggaggggtgaaacacttcagaagcaccgtgtctgaaccgttgcttgtggatttatagtagttcagtcataaaaaaaaaattataataggctgattttcttttttctttttttttttaactcgaacttttcataactcaggggattccctgaaaaattacctgcaggtggaatatttcatggacaaatttttttttctcccctcccaaatttagttcctcatcacaaaagaacaaagataaaccagcctcaatcccggctgctgcatttaggtggagacttcttcccattcccaccattgttcctccaccgtcccacactttagggggttggtatctcgtgctcttctccagagattacaaaaatgtagcttctcaggggaggcaggaagaaaggaaggaaggaaagaaggaagggaggacccaatctataggagcagtggactgcttgctggtcgcttacatcactttactccataagcgcttcagtggggttatcctagtggctcttgtggaagtgtgtcttagttacatcaagatgttgaaaatctacccaaaatgcagacagatactaaaaacttctgttcagtaagaatcatgtcttactgatctaaccctaaatccaactcatttatacttttatttttagttcagtttaaaatgttgataccttccctcccaggctccttaccttggtcttttccctgttcatctcccaacatgctgtgctccatagctggtaggagagggaaggcaaaatctttcttagttttctttgtcttggccattttgaattcatttagttactgggcataacttactgctttttacaaaagaaacaaacattgtctgtacaggtttcatgctagagctaatgggagatgtggccacactgacttccattttaagctttctaccttcttttcctccgaccgtccccttccctcacatgccatccagtgagaagacctgctcctcagtcttgtaaatgtatcttgagaggtaggagcagagccactatctccattgaagctgaaatggtagacctgtaattgtgggaaaactataaactctcttgttacagccccgccaccccttgctgtgtgtatatatataatactttgtccttcatatgtgaaagatccagtgttggaattctttggtgtaaataaacgtttggttttatttatcaaggttagatttaagttccctgtgtaaaggtcttgctgggtgggtgtctcatgttcacatctgaggggcctgcagccctgtaccgtggaggcttcccaaggcccccattttatacacccctcgttcgacccatggtaccgggcagagcagagaggccttaaaaaaaaagcaccacaagccaaagcgtctctggggattaaggatcctttgccataaaactcattttgtgtctcagcagtgcagggattggggatggaaaaagtcgccagtttttgtgtgtttgtgtgtgtgtgtaaagtggactttccactgtaatccaaccacctaagtttatcaggtgcttcactgaggaagcctagttttttaagcacaatagcaaaaccatcagctctgtattttctcctgttatttcattacagtagctgcttgtgggaactaggaaaaattcttccaacatattttaaggcctaaaatcttagttccccattctcctaccttatagattcacaggcctttctcgcctaggcatcatagataaacgtaattgtttggggagttgaatttaatgaacttatctaactttgtaacccatcttggctttagtaactttatcaaggtggtggctttagtgaatataatggtaaactttagaggacgctaaa

SEQ ID NO: 9135 - DNA, 6000 bp, Homo sapiens
ctggttactgatcatgacgagcttttattaccatggtgatttgtggactgaagagctagcccagaagtttgtactctatgcaaattacattaaatttactatggcacctaaattttgagacttgtgttgtgggactgatgttacttaactaaactatggtaagagaaatgcatgcatgtcatcaccaaagtgagaactgcctgtatttatctatgttacgcaaatggaatgtcagttatatcgtggggggttgggggtgggggaggattatctgtatcctcagttgccagaactgtgtctgccatataataggctgtcaatttttttaaatgagtgaatacatcattgaggtcattggtttctactaggtgttggatttcaaaagaaaacttctcttcatttgatcacttggcttgtgtgctgtattctcaagctctttctttaaagactactctctcttctttctgtttaaaacattccatcaaaaattcaacatcctctagaaagtaagaaagtgctaacaagaaaaaaaagtcaaccccaaaaccaaaacccacagtgactggagtacatcaaagaggcgcaggaaccaactgaaagagctcccaaaggccaaagctggaacactttcagcaaaaaaataagtaaagtagtaatgagttatagtccaaagtataaaataaatatctgagtccatactgatataaataaatgattgaataaattaatgggaaagaagagaagaatctccagtgcagaagagtcccagataatttatttatacactccactctaaaggaggtggaacataacttccactcctgaagtgtgggctgtgcactgcgacttctttgcaaagagtacagcatggaaaaaaggagaaaaaataactttacagtggaaaaatctgacaaatacagcttcagccaggtgatcaagagttcatcaacagttataaatcaacatcaagaatcataaatcatgtcactaatatgtacctttaatatgatgtgatgaagatgacacttttcctctattaccttccccccaaaactcacaaccccaatctaatcatgaggaaaacatcagacaaatttcaataaggaggcattctgcaacatcgggcccagaactcctcaaaactgtcaaggtcatcaaaatcaaggaaagtctaaaaaactgtcatagccaagagaagcttgaggagatatgacaagtaaatgtaacaggtatcctggatgggatgctggaagagaaaaacgacattaggtaaaaagaaaagatctaaataaactatgaactttgattaatcataatgtatcaatattggttcattgattataataatgtatcatatcaatgtaagatgctaatgatagggctcaatttttctgtaaatctaaagctgtccttaaaaaattaagtctattagaaaaaattaacgtcttgtcctcagctaggttttatttgcctcttgtaccccgtggggaacaatgcaaggaaatgtgcggtagggagactttgttgatattccaaagttttatctcacttcaaaagcctgaggtttcctttcctctcgtccttcctctgtccactaccagagctcaccccagatctaggcactcagatcccagaggaagtggcttctcaatcccccgtgatgctcaccctaaacttttcccattagtaaaatccaggtcagaccaagtgggatcagaaaactttgggttatgtgggtgagctgggatagctttgaggacctgactatgagtgagtgaataatgtcctgagcccaagtcttcacaggaacaagttgttcccatgaattgtgtaatggatgctgagaggcacctggctgtggagatggtcctcagcatcagctctatttgcgattgtctcagctgaagggagtgcccttgcttaggtcgtatctggtaacaaaccacatctcattggactcatcaacctagtcgtataaaggcccagctctcttatcctaactcagagcaactctggaggaatatcctagtaccaggctccatgcaaggtcagctgaggtcttcaatgggacttcattgcagcccagcttcttcttctacccagtcctgcttccatcttctcccgtccacaagtgttgatcctaaaagtactccctgaaagataacctgcttgttcatcttcaccccagagtctgtctcccagggaacccaacctgggacagtgaagctatgctacgtatcagaaaggtggggatcccttcatctctaagggagcaagtcagtcacagaagaaagccttgtttatagtacctccagattaatgagaatccacaaaaatgtttattcaagagagggacataattaaatctatgttgtaaaaagaccagtctggctgaagaaggagaaagagattatagggggcaaataaaaatgggggtaccctagtgagaaggcaattgttcttattcaggcaagagatgatgatagagatggagaaagagattaattcagaagggatttaggaggtaaatccaatagggcctggtaggggcaagataggagtgtgaaactatgcccccaaagagttaaagaaaccagtcactaagaaattcttgagtttacaggatagcagataagaaaaaaaaaaaattgctaaactgccgaaacttcctccacttgtaggataacaaaactgactaaaatctgttggaaccaatatggccaactggagtttgctcagaatgagcttgctgatgtcacagcctgagtttctaccacgtatttcatgatgacgccccagggttttgcacatgggagccgtgaagaggcatagagagataactgtacatgcccaaggactttccagacctcccctttcctttcacaaatcacatactaatcccagaatccaacccctaaacttttgctaataaaactactgccttgaagccagcacatggagctagatttgaggtagacttctgtcttcctgttagtcaacttgcaataaaaagcttttcttttctcaaaagcctggtgtcacagtattggcttctagcacatcaggcagcaaccccctttcacttggtaacaagtggataagtgagggtatagaacatgagtcccttcctggtttgacaaactgcttagatgatggtaccatatacaaaacaggcatggtgtgggagaagataaggtttgtgagtgcagatctgaaactcaaacttgaatatttaaggtatacaaagaggccaggctcagtggctcacacctgaaatcccagcactttgggaggctgaggcaggtggatcatctgaggtcagaagttcgagaccagcctaaccaatatggtgaaaccctgtctctattaaaaatacaaaaattagccaggcgtggtggtgggcgcctgtagtctcagctactcgggaggctgaggcaggagaatcacttgaactcgggaggcagaggttgcagtgagccgaggtcataccattgcactccagcctgggcaacaagagcgaaactctgtctcgaaaaaaaaaatacatatatatatatatatacaaatgaagatgtcaagaaggttgcagaatatacaggtctgtatcatgggcccaagattactcagctcttaggaggtgcgttcaggattctagcctagattatatctgattccaaagctggcactcttggatactgacccgtgagtactgactctccaaggaacttagagtctaatgaaaggtgagaagattcctcagagtaggggaaggggaggatgatggaggctggaggaatgttcctgtctagttccaagcaggggccatggataggaattcctttgtggaattcatcatttcagaacaacgggataggatgatgacatcacaaggggatggggactcttgtcgtctcagagagaacgtgccagcctggctctgctttcttttcctagagggtctaacacctctcccggccctgacatctagctggttcctgaggaggaggcagaagtcatgaggaggcaatggggaaacagccatggcagccagtgcctgcctgtggatgcttggacattaaagggtcaccagctgagtgtgggctgagtgtccctgaacacaacatttgtgcttaggaagaacccattccagagctgagagagaaggatgccaacatgctgcttcctccctctttctgggggcatttcttctgcccctccaatcccatctctgagagctggtcccaggtccagcccaagcaggagaggcagccctcaccttcccaggtgtttgtaggcatgttactctccctcctagagagtgttccccgcagctccgccttccctgcaggcctcctccatcctctaaagcacaaatcatcaccacctgcacaactcgaatgtctttctcagccatgcctgattcctctgcaggaaggaaaaaggaagcagttcctggtagtgtatggagggacccacagaaaagccaagagcccacagcagatattgcttgttttttacctctaactactctggagtgcaagaaagggcatccattgtaaagtccaactcttaccaagtgggtgaggctatagacatcttgtctctttcttcagctgtgcagctcagacaggcccagatgttgagctcatgcaggagctagacccatacctgcgcatcatgtggatgaggcctttgtctagcctatgtgtctgaggctcctagataggcaaaggccatgaagttggggagaacctgtgagatgggatgaaactcaggaaggagtataaggctgtgggtgtcaagccccccagccccagcaaagctaaatacttccagcagcaacttcctagcttgaagcaaccttgtctgttcaattttataatcacaaaggaaaaagtgtcccagtcccctggcctttcctctcatcacaatccccttcctctgacatcacagaggcaagaactgtcttctctgctcggagcactgagtcgagggcatctccaggacaggcattcaggcagagcaagctccaggtttcaccacaatgcccatccctgcctccccactccacccacctctgccttccttactgctgtatctgctgcttgaactggcaggtgagtggggcctcagtgtatgtgtgtggtgggttctcccctctgcctgtttagtgaactctccctcacctgttcccatagaatttcttttgggagggttttctccatcttatcccagaacaggcagaactcagaagactacactgggatggtccccaattctgacaaagtctcccggtggccatgtctgttgcaaatctctttgctcaggtaaacgactcacacctatggtcacagggcggggcacagcatccatcacagctctcaccctccagcctctggagggtgtaatttattttattttatttttacctttacttatttttttgagacagggtctcactctgtcacctaggctggagtgcagtggtgcgatcttggctcactacaacttccacctcctgggctcaagtgattctcgtgcctccaactcccaagtagctgggactacaagcacgcgccaccatgcccagctaatttttgtcttttttgtagagatggggtttcaccatgttgcccaggctggtctcaaacttatgagctcaagagttccacctgcctcggcctcccaaagtgctcgcattataggcgtgagccaccacacctggcccctggcagattttacacttctttctgtgaaattcagttttttatttctctgttgccactgcatttggctgctcttaaaaagtactgcaaactgggtggtttaaattacagaaattaattttctcacaggtctggagactagatattcaaaatcgaagtgtgggcagggttggttctttctgaggactgtgaggttgaatctgttccatgtctgtctctgagcttctagcagtggtagcctcaaacatttgttggatggcaggtggcaccaccc

SEQ ID NO: 9136 - DNA, 6000 bp, Homo sapiens
gggtcccactatgggggccaatcagcagagatacaccaaggtcaatggagacagcagtccctgggagcagccgagccaggtgtgattttgccttgagagagaacacgaggctcttgagggacagataacacaacccaggtgaggaggaaagcaggtggacatgacctaagaagtgtgaggcctgatgactaagttggagccacagatagatttgggggccaggggtcaggagcctaaacagcaggttgtgggtggagttcaaggtgcactgaggttagttcttagcaagtagtactggctgtgtgctgaggtgcaggctggctcacaaacccagaggaggggctgttcagatgtctaacacgagaaactgagtaaaaattaaagaatggtttaggccaggtgcagtggctcacgcctgtaatccctgcactttgggaggctgcagtgggtggatcccctgaggtcaggagttcgagaccaacctggccatcatgatgaaacccccgtctctactaaaaatacaaacaattagctgggcatggtggcacgcgcctgtaatcccagctactcaggaggctgaggcaggagacttgcttgaacccgggaggcagaggttgcagtgaaccgagattgcgccactgcacttcagccaggacgacaagagtaaaaaaaaaaaaaaaaaaaaatggtttaaagaaaaaggacaatgttttacacatggatcaaattagacactgcaagactataaatctgcacccttctaatgtgaaaagggcttcactgagctatacttgtatattatgccctcgatattcactcaaggccattacaaggaacaaatgaaaacggcatcagcatttgctattaaccagttgagaacattctccactatttcaactaaataagtatccaggtgagaaacttcttttataatttaaccccagaaattttttttactccaaagaaccagttaacagaatagaaagtgttattgttttggctatcaggaagctcagccatgtttaattctcaatcacatcagctacattaacccataaaccatattatcgtcctcctccttataatctcatctcctatttctatattttattctctatttttaagtactcaaaacatttttaaagggctgaaaaagaatacacttgtggtagacatagcaacgtgccacccagatccccttcaaagaaggacttgttgacccaactattgggagagctgtcagcagaaaatcttcagctgtcagcccctcgaagatcatcttggctgcagagtgccatctggcccaggctaggctcttcccaggacattacaactcctttccaggctagtgccagacaacagagatcctgggagttggctgagactgtcatcaggcctgcatctcagtttagttttccctgtgcccactcctgtttctttccagtacctcccagagtgttgatcccagggccactccccaataaacatactgcacactaacctgtcacagagtccacatccaaagaacccaacctgtgacagcaccaaatcaaaagagactcaggaggctgaggcaggactgcttgaactcgggaggcggagattgcagtgagccaagattgtgccattgcacgccagcctgggcgacgagagagaaactctgtctcaaaaaaaaaaaaaaaaaaagagagaaaacatatcaggtaggggtattttacaaaggagagaggatatacaataaagtgttcatacatacatgggaagcaaaacagcactgactctggggccagactacctgggtttgaatcctgccttttagctctgtgcctcagttttttcatctggaaaatggggataataagagcacttatagggctgtaatgaggaagaaatgagacaatgtggataaagcagttccatagtgtttactatatgtcaaccactgttctaagtggtcatttaataaacagctgtgaggccaaacccacaggtcccgaggggcagttgggctgggactctccccagactctgggcatgggcacaggtacagtgtaggccagggcatgctgaagcatgcatgttcacagaaataggcctgagcagggctagcatgggtgacgtcacaggcgtgtgcttgtgtgggtgctgggctgctcctcccagacagcgcagctgcacgtattgccattcacacccacgcacccatatatatgctgagctgggggaagcccacacagaccacaccctctgcatgccctgtttttcctgcacctcctttggtggaaggaggcacctgaggcctgggatgctggcccagaagtcccaggaggaaatgggtcctgttccctgattacaggcctggcaacgggctgaaaactcaagctcttgttggcagggatttcttgagcccctagaggtccagacccagaggcaaaagtaaaagcaaggaagccttaccctgcatgttaggaagctcccaaaaaaatggagaaacggatgtaaaaagtgcatcagagcccacaggctgccggagtcagcacagtaagctcaatgagggctgcagcacttaagagggtgcctcctgtacaaaacaggatcagacagccagagaggggccccattcagcccccgtctgccttcctggtctcatcactccctgtcccctcctcagtcaggaaactctagctttgtaaccctaaattcaacaacctcttcctggcctcagggcctttgtacatgctgttacctctacttggaatgtacttttctccaacccacctttaataattcacctcgccatcgactcacttcctttagacctctgctgaggtctgaagagatctcgacccaatgtttttccttctagccctcatcataattgtctttatgtaacagagtgtttatttaatgtctgaactcccagagagctggcgctgtgtctctcttgtgctcctcatgttgtcaatgcccaacacagagaagagcagggtccacagaacttcaagcctaagccagttcaagccacactctgtgagcactcacgttctgctggattccctgtgcccaaggccagcggtgagcatgcctcccctcacccatgctgattaaccagatagcctccatgcccactgactactgaccaccaggacttacctaagccagtggatctcctgtgaggcagaaaactcatggagtcaggccgacttgggttctagttcccacctagtcatgttatgtggctttggggcaaattgtagaacttctctgaatctctgtttcctcatcagtaaattgtggaccatcattcctgattagaagataattatgaggatcaggtgtgaccacaggtgcacaccttcagcacagggtctacgctagctccgtcccgcccacgtaaagacctgccactaggtggcagtccatctcagctaccccaccgctccttactccacagaggctggctaggacaaagggtctcaatgtcatgctgaattctgagcttcttaggggacgcacttgaggaaatcaacgttaacacacaagtttccactacagcaagacaaagtcagaagcagcagccccaggtcactatccagctgagtgggttgcctgagcacacgctcttacaaactctagtctagtcctactatctcacaattcccaggaagcctggctctttctctggcatcagctggaagctctgttgggcttctcacctctgaaatgcagtaagttgtcctgctgtgcctggcagccgacccactgcctggctcaacatgtcagacaggctccaccgcgaccgtgggtgtcctcaattttggcggtgctgacaagggtagatagattgcaggggtgagtttcaagaatggcttcagaaagacaaagagtatgaattatattccataaccagaaaaaggccttgtggctggagaatggagagtgaaggatcacttgtgagagatgaaactggtgagatgggcaggtcatatagaacctgctaggccaagcagggagtgtggattttaggtgcaatgggaattcacggagggttttagcctggatgtaggggatcatgatttaatttcattttaaagatttaaagcatgataaatccaggcaaaaccaaactgatagatccaggcaaaaccaaacaaggtgagtagtctgggtgacaggagatggggccttcagcttgtgggctgagtgacaaggtcttgatggattggaggtgaggcaaagggaggaatcaaagttagctgcaaggtttttgaccttccaacttagagaagtttagcgccgcgttctgagaaagtgaagactgtggaaggaatcgtttggggagggaaggcgagctgtctaagggggggggatgtggaacatgcagtgggatgctggggcctggaacgtaggggagatgcaggtttggagtcaccggtgcctgtgttgttgggcaaagccaggggaaaggtcaggtcgccttgggatctggcctagcactgagtgcagaggaagagaagcttctgagatcgagaggcagcggctacaggaggaggaagaaagcaaggcggggaaaaccaaagttcaggagagcatttgcaggagggcgctgcggggtagggtctgagtcggagccccgaatcggactcgagtcctgtcgcgtggggacggagcgtgcagaggcccatgcgagggacagacacaaaggccctgggagctgcaggtcagaccactggacagcgcggccgcggacctaacgcccctgtaaggggtgctcacgcttggggggaactctccgaaagagaggaccactgaaagccaccctggcagcaggggcggaacagacagacgtgggtctggccgtcgccagaactgcctgcggaccagccccgcgctgccgggggggcgggacatgtcggctgtccatcagtgcccgcgaccaatccgcaggcagccccgcccccgcccctcccgggagagggcgcgcggaggacccgccgccgccggtgtgaggcggcccgtcctggctcccttgtccgggaagcccgcccaggtaactgagtttggccgggcattcccggaggacgcgccatcccctcacgtcccgtcccggtcgctgcatgggcggtgttcgggacgcgggggctgcgtctgtgcgggaccgcggggtagcggccgcccgtgcgagtacgcctgactgacgcgccggccgccgggcctgcggcctgtgggcggggctgccgtgcgtgacagggccgctcgtggccgccgggctgtgtccggggccgcgtgagaaagctctgcgggactgagggctgggtgggtcgaccgggaacggcgcgcgctcccgccgccatcgcgcctccgtccccgcctgcggcctgtctgggggtcgcggggcgcaggcgcggcgggccgacgggcgggggtcctccccacgggtgcgcgggcgcctttgttcccggcgccgaagcggggtggggcctcagggcagccccgccccgccgcgctgaggccccgccccgtgtccgcctgcaggagccgccgccgggtcccgctcgtctgccgcctcagcctcagccccaacctcagccgccgccgttgcgcttgctcccgggcggtcctggcctgtgccgccgccgcccccagcgtcggagccatggcgggcgccgcgtccccttgcgccaacggctgcgggcccggcgcgccctcggacgccgaggtgctgcacctctgccgcagcctcgaggtgggcaccgtcatgactttgttctactccaagaagtcgcagcgacccgagcggaagaccttccaggtcaagctggagacgcgccagatcacgtggagccggggcgccgacaagatcgagggggccagtaagtgcgcccacttcctgcctgggcccgccccgcgcgggggtcgtgggagcccggcccgactgcttgcaccccggccggccgccccagcgacttgggcaaactttcgggccctcccagactccct

SEQ ID NO: 9137 - DNA, 6000 bp, Homo sapiens
tgggctttggtgcgcctccagctgggcctgaccctccatgtcctgccctcaaaaaactgggtggagaaataattgtttctttaaaggatatgagttagaatcaccccctgttgaattttccctcctagatccccttcttaaatgtccaacatgggtcaaaagaaaatgacctccttgccttccttctttcctagttgcatctttcttttcttgggcctctgggaaagagccctgcatctttcattaattcggttctcagagaaccaaggctggaaggcatagaactggcaccttgggaccaggcataatggctcacacctataatcccagtattttgggaggctgaggtgggagaatcacttgagtcctggagttggagaacagcctggaaagcctggcgataccccatctctatttagaaacaaacaaacaaacaaataaaaaacctggcacctcggttttgtaactctcaggctttgtcaaacccaaatgactttgtccatccaatgaaaggaattccactgggtgcggcggctcacaccggtaatcccagcactttgggaggctgaggcaggtggatcacctgaggtcaacagttcgagaccagcctggccaacatggtgaaactctgtctctactaaaaatacaaaaattagccaggagtggtggctcgcgcctataatcgcagctactcgggaggctgaggcaggagaatcgcttgaacctaggaggcggaggttgcagtgaacagagatccagcgactgcattccagcctgaggacagagtgagactctgtctctaaaaaaaaaaaaaaaaagaaagaaagaaaggaaacccgctttcattcgtctcataacagtcaaccagtttctgggcagtctttgaggactcgtgattcgctccctgagttgggcacatttcaggcccatgattttgaaaaacattgaaattggcttgtggacatccgcccccccacccccactgcatggtactggagccacgacagagtccaggcccccctttttacagatgggtacactgaggctcagagcagggtgtaacttacccagagctgcacagcttgtctttgatggccaaggttagagctcagtctctcacagctccttcctgcttcctcggctctcagaactgagaagtgaaaaccaaagttggcctgaggggactctctctgggcctttttttctctatctctgcctcggtctctctctcttttgtctactgtccgttctatctctgcctgtttttgttttggtctctgcatctctgattctttttctcccatataatcttactctcattccaataaaccatttcccctctccccccaccatcccacccagggatcatagcacacaaaagtccttttgtctccagagatagtaaaatctcctccctcagaccttgccctgcagctggggcccactccctgcctggctggagagcttttcctttgaagacccgggatggaaaacaggcccttttccatggagtccctacgttgtcctggatggaatgaattttctcatcctgtgcatgtcaccccctcccattccacccccaataaagtcttttgagatccagtgtagtggctctttctggtccctccctctcttggctcccaagagggtcaaaacacaaggaatgggaactgggtgggggaagatgggtgagaggaaaaccagctcaactggaagaccaggggaaggaactaacagcgctttgggccccgctctgcagaaggctagatcaatgcacaagtgcatgcacgtatactattgctccactttacagatgagataaatgaggcatggggtgagtactagcttccaaatgctggaaatgagtgaaataagagaattaagaggttgggcgtggtggctcatgcctgtaatcccagcactttgggaggccaaggcggcagatagcttgaggccaggagttcaagaccagtctgggcaacacagtgaaaccctgtctctactaaaattacaaaaattagccaagcatggtggggcacgcctgtaatcccagctactcaggaggctgagacaccagaattgcttgaacccaggaagtgaaggttgcggtgagccaagactgcaccactgcactccagcctgggtgacacagcaagtctgtgtctcaaaaaaaaaaaaaaaaagagagagagaattaaggacactgttgtgagttcattgttcttagactatatctttcctactttattttttggaatgggctctcgaaggcagtatcagaaatggaaaaccgaagagatcacgtggaattcccaccttacagtggcacttttggcttgtctcttccctggcacagtggctcatacctgtaatcccagcactttgggaggccaaggaaggtggatcacctgagttcaggagttccagaccagcctgaccaacatggtgaaaccccgtctctactaaaaatacaaaattagccaggcgtggtgctgtgtgcctgtaatcccagctacttgggaggctgaggaaggagaatcgcttgaacccaggaggcggaggttaaagtgagccgagatggcgccattgcactccagcctggacaacaagagcaaaactctgtctcagaaaaaaaaaaaaaaaaaaaagaacagatttaatgaaacttcttgaatcccagtttttacatctgtaaaatgggaatattgacagtgacaattcaatgacgttaagaatatacaatgctgacaaactaaagagttcataaatgccagtggttgtcatcctcattatcctggtgctcaggaaggcaatgtgagacctgttgaaatagcacgggctttggggtcagatgatgctgaattccagttctgtgttggctccttcgtagttatgtgacctcatgacgccacttcatgcagggggttacgtaccacttaaatctccagaacattttgggaaattgacatagggttagcaaacctcccccacccccatataaaaatattaatactttttttttttctgagatggagtctggctctgtcgccaaggctgcagtgcagtagtgcaatcttggctcactgcaacatttgcctcctaggttgaaacgattctcctccttcagcctcccgagtagctgagattacaggtgctcgctgccacacccagctaatttttgtatttttagtagagatgggattacaccgtgttggccagcctggtctcaaactcctgacctcaagtgatccacctgcctcagcctcccaaactgctgggattacaggcatgagccactacacccgaccaagaatattaatacttttttttaaaaaatatcgaagttatttatttatttatttatttatttatttatttatttattttgagatggagtctctctctgttgcccaggctggagtgcagtggcacgatcttggctcactgcaacctctgtccccctggttcaaacgattctcttgcctcagcctcccgtttgccaccatgcccggctaatttttttatttttggtagagacggggtttcaccatgttggtcaggctggcctcaaactcctgacctcgtgatcggtgcgcctcggcctcccaaaatgctggggttacaggcgtgagccactgcacccggccccaaaatctaacgtttgttatcactgttgttttagaaaagaaaggacattttaatgcaacccatgcccatctgtaggggctgaaggtccctctgaggtgattgataaagctgaaaaaagagactatgggaagagaagaggaatattatcaattagctattttagaagcagggcaaactatgagctaggtattcctataaggaaatgaaataatttactaaaaaacatacagcaagaaaataatagagctggagttttctgatttttctgagtccagaatttgtttcactgttctcatttcagctctctctaacaggatgaatgaccttgatttcagaatccccaagcaggtggtgagatccaaaactgagacaaaagaaacggggctgttccaaaaaaaaagctaggtggcaggtgtctaacatgccagggagctaaaacagagtgtgtgagtttcagcagcaggttgaatttagaatggggaaggagaccagaggagacgccagacaggatgactttgtcccattggcctggaggcagccccatgtttctccacccctcatatcactcaccagtttgtaatagtatctttgaatgacgatctgattaaggtccgtctcctccattagtccacaagtttcgggggtacatctactttgctcatttccatatccccagagtctagcacaaggcctggtacatagtaggtgctcaataaatatgttagatgaaaggaagataacacctctatgtactagcagtgagactccaggcatgcaatttctctctgtccttcagtcccttcatctcaaggtttaatttaaatatggtaacgcctgtatgcaactcccagcatccagtaggcactcactaaacacagttctccaccctccttttttcctctgcccctccctcggttttcccactacttcctgcatggtgacacacccatagtttggagccataaaacccaacccaggttggactctcacctctccagccccttctgctccggccctgtcctcaaattggggggctgatgtccccatacacctggctctgggttcccctaaccccagagtgcaggactaggacccgagtggacctcaggtctggccaggtcgccattgccatggagacagcaacagtccccagccgcgggttccctaagtgactggttactctttaacgtatccacccaccttgggtgattagaagaatcaataagataaccgggcggtggcagctggccgcactcaccgccttcctggtggacgggctcctggtggctgtgctgctgctgtgagcgggcccctgctcctccatgcccccagctctccggctgggtgggcttggccatggtcagcgtgaacgcgcccctcggggctccagtggagagttcttacggtaagtggggctgggggaagactggacagggcgggactgcggtcagctttgggaggccatgggacacctccccgtgtgtttcttacgggcccaaagctcctcctggagctcctctggaagggcaggaagccccacggaggcaatgtgaccgcttccctaagctctcaagccggggcatggcctgcttggtgcgagaagtgctgggaggggccgagaagccctggggcagaggcttggctcattttgtctgtccagaggccttcctgggaatgcatctcaggggtctttccaaaaccccacagagggtggggcttggaagcaccgtcctgtttcgatgcggggcaaattgaggtccaccaggagaggcttgctgggcctaggtcacgttgctggtgcattatcaagctgggcgtgggaccgggcagctcggtcgctccgcacctccgttggctctggataatggggaggaggtagaaagcgccgcgcagggtggagcgttggaaaatgagaatatcttgtgcggacgtgtgaaactcagatgcagggctagaaagcatgtgttactgagagtgaaaggctcaggctcactccttagggtgacccccacattggaagcaacccaatgtccctcagcagagggaagacgggtaaataaagcgtgagacgtctttacagtggaatgctatcccattgttcaaggaaacaacgcacatctgtgtgtgacagggaagaacctctcagttaaattaagtgaaaacggtacactgaagaactgtgtagttgctgatagcgaaacggatatagatgtatatatgtacacacgcgtatacgtgtacattccacgcatagaaaattcgtggaatgacacaataaaattggtgacaggtttgtttctgaggagggaaattcaagagaatgttttatcttttggggacacattttggatt

SEQ ID NO: 9138 - DNA, 6000 bp, Homo sapiens; identical to SEQ ID NO: 3705

SEQ ID NO: 9139 - DNA, 6000 bp, Homo sapiens
atgaaggttccagcctgtaaagataggtttctgcttattagctttcactaaggagctaggggatagtaattacttaatacaaatttacatgcatttcatgtttctaagccctttctggaagatcatctcacttcatcttcccttcagtctgcaagcacagttagacaggttttataagtgatgaaccaaagctgggaaaagcccaacagagagatcacttttaagcataggaaaagggctttgagatccacagacgaaggctgtcttacacgtataaaatgttaaccagaagagtaaagtggctgtaaaggttatgtagagaaagatactgtttcctgtcagaggagaggctgagaatttaaaagtttagtatattaaaagtaataaatttctggggacagcatttctgttgggttcatgctgctgtttctactattttggccatattcacacctacacctttctctacggttttcctagtgtctttcattgctgtcaaggcaggcatagtagtcacagagtcaccaatcctacaacatagatgaccttatttctttgggaagaagaaaaattacaagaaaacatctggtttttgcatgtttgatgtgtttgtgtgtgtgtgcgtttacagttttaactgatattaagtgaagatagattaatgtcacccaggttttacaaaatcaaagaaatagaaataattttaaagacttttggtacttgaattactttgttgttttctggtcatttagtacatttatggaacctcagaaggtttgagttgaacagaggcaagttacagcagttttttgggtgggagaattcataagtcagcatgtgaatcttttgatctcatatatttggagtggaatgtcattaattgtgtttgtcacggttaaggaatagagaattaatctccatcccagtcttgctattcttctgaaagcctttagctgccgacaccatgggcataaggaggtatctcttctggcttctctttgggtgtggtagctaagttacagcttaccttggaaagatgagcagcttgtaagcaacaaaaaaacagtatagttaacaaatgcatcgtcaacaaacaaaacaacccaatcaaaaaatggacaacagctttgaatagacattctccaaaacaaatatacaaatggccaataagcatgtaaaaagatgctcaacatcattaatcattagggaaatgcaaattaaaatcacagtcaatgagatacaacttcatactcattaggagggctgttactgaaaaaaaaaaaagaagaagaagaaaagaaaaccaaaaaataggccaggcacagtctattttgagagcactttgggaggccgaggtgggaggatcccttgaggccaggagctcaagaccagcctgggcataagcaagacccctgtctctataaaaacaagcaaaaaacagaaaataacaagtgttagtaaggatgtagagaagttgtagcctttgcactgttcctgggagtgtaaaatgatacagttgctgtataggagtgagccaccgtgcccagcttgttgaaacaatatgctggttcttcaaaaaattaacatagaattactacatggttcagcagttccacttctggatatatacataaaagatttgaaagcgaggtctcaaacagatgtttgtacacctatgttcatagcagcattatttacaatagccaagctgtggaagcaactcaagtgtccatcagcagataaatggataagcaaaatgtggtgtgtgtgtgtgtgtgtgtgtgtgtgtatatatatacacagtgcaatatcattcagcctttaaaaggattggaattctaacacatgctacaacatggatcagccttgaagacattatgctaaattaaataaacaaaacaaaggacaaatattgtctgattccacttatatgaggttcctagaatagccagctcaggcagaaaatagaatagtggttgcaaagagttgggggagggaaaattagtgtttagtggatacatagttttcatttgggatggtaaaaatttgtagaaatggatgatctggtgattactgcacaagaatgtgaatatacttaatgcaactgagctttaggtttaaatgtggataaaatggcagtttttattttttttagatgaggtctctctcctgtcacccaggctggagtgcagtggtgcaatcacagctcactgtagcctcgacttcctggtctctggtgattctcctgcctcagcctcccaagtagctgggactgcaggcagacaccatcacacctggctaattttttgtattttcagtagagatggggttttaccatgttgcccagactggttgcgaactcctgggttcaagcgatccaccctcttaagcctcccaaagtgagccactgtgcctggccataaagtttatgttatgtatattttaccacaatttaaaaaagtgtttcaacaagctgggtatggtggatcactcctataatcacagtactttgggaggctgtggtgggagcatcacttgaacccaggagtttgagaccagcctgggcaacatagggaaaccccatctttacaaaaaaaaaatttatttaattagccagctgtggtagcccacgcctgtggtcccaactacttgggaggcagaggtgggaggattgattgagcctgggaggtcaaggctgcagtgagctgtgatcagaccactgtactctagcctggcctacagagggagaccttgtttcaaataagaagatttcaacaaaaagtaaataaaaatagtacaaagggcatctctattccctttacgcacgtttacctattgtaatattttacccagcttgttttatcatttgtgagtgtgcagtcatgtgtgctatatatatacacatgtaaacgtgtgggcacatttttttcctgaatcattttagggtagattatatgcatcatggctgtttacttctaattacttcaggaaaatttcttaacaatagacatattcttgggctgggcgaggtggctcacgcctgtaatcctagcactttgggaggccgaggagggcggatcacctgaggtcgggagtttgagaccagcctgaccaacatagagaaaccctatctctactaaaaatacaaaattagccaggcatggtggcgcatgcctgtaatcccagctactcgggaggctgaggcaggagaatcacatgaacctgggaggcggcagaggttgtggtgagccaagatcacgccattgcactccagcctgagcaacaagagcgaaactccatctcaaaaaaaaaaaaaaaagaataggtatattctcttaactattgtgattatgtaccaacttcacaaatttacattgatacaataatttaataccctctgaattccagttctgtcgatattgttttttatagcatccccctccacctcctgcagtatgggatacagtctagagtattgcatttatgcaatgtctctttagcctccatttgtcttttatgctgtggacatgttttagaagtatagtaccccttccccctttttaaatagacacttcctctttttctgaatgtttcctggtaattgaattgaagttatggctgggtgcggtggctcacatctgtgatctcagcactttgggaggctgaggtgggaggattgcttgagcctgggagttcaagaccagcctgggcaacatggtgaaacaccgtctctactgaaaatacagaaaattagctgagggtggtggtgcgtgcctgtagtctcagctacctgggaggctgaggtgaaagaatcaccggagtccaggaagttgaggcttcagtgagccatgatcacaccactgcattccagtctgggcagtggaataagaccctgtcttaaaacacatacacacatacaaattgaagttatgctgtctcagccaggagacttgcatacgtgttatatccttctcacgttatcacaatctggagactcaatacaatttcatctaaatgcataatgaggggaatcagcacatgctgtaggagatagggaagacatcattggaaaggaacctgatttgatagcatatttctaacatcttacttattttcccccggtgtcaaattttgcattagctcagctaatctgtattactgttttataccagtttttaagctcctgtattaaatataaagagaatattactgatttctgtttttaaatttaatgaaaccaagtgtgtctttcaaatggtgatcaaggttctactgattattaccttaaggttcccccaaaagatttggattggtataagatgacatggagctttgatgtatgagaacaagcctttattctcttcctggtttcatcaaatatgagtcagaatggcaagttgtactcttagctttgccgccattctagaaccttttagcacccctacttaagttacagaaagctgctgaaaagaaagtatttttcttgccaataccttttgtagaatatataactagtggtaatgctgatgtatctatcctcaatgccatttttctcttccaggctgtcttacaaaaatcattcaaattttgcctgcagaggtaacaggatatttggcaaaatatgattaaagcaaatatcagtttactgtatttcttgggatttttcttctcatgttataggaagcactggttaacacagttgagctatatttattggctgtaggtaggagagccagaggtatatttcaggccattattatttgtaagattatttccttcccatataccttctgtaaatgattccttggactttgtgcattttgtttctgcagtttgaagaaaacaggtctgaaacaaggtcttacccccagctgcttctgaacacagtgactgccagatctccaaacatcaagtccagctttgtccgccaacctgtctgacatgtcgggacccgtgccaagcagggccagagtttacacagatgttaatacacacagacctcgagaatactgggattacgagtcacatgtggtggaatgggggtaattgtttttgttgacttcattatactcactcaaagggctgaatcttgtggatctgttgagtagtttttgtcagaaaacctccgtgactctgtatgtgtatacctcaggatcaaagcccaatttgtgttttcttttgagctgaaaatttggttttgcagtgaggaagcagagttgctttggcaagtgaacaattttaatgggcttaccatttaaaaatcattttagtttcttatccttttctatgatgtatatgcagtcgtgcaccacataacaaagtttgaattaatgacagaccacatgtaggacagtggttccataagattataagagagctgaaaaatgtctgtggcctagtgatgtcatcgtaacatcaacagtgcattcattaccttttctacgtttagatacacaaataccattgtgttacaattgcctaaagtatttattacggtacacatttgtatcctaggagccgtaggccataccctaggtatgtaatatgccataccatgtaggtttgtgtaaacactctgatgtttaacacatttctcagaatgtcattaaataacgcatgacggtattctgtatgggcacctggcaacaaaaagttacctatcagcttgcttatcaagccaagggcattgcagatcagtgagaagtgatacttgagagactttgaaaacaccaaagtcttatataaagtatttttgaggtagagaatgttgtttcgtgttaatacaggaggacgaaacagttctccaaagaggtaacttctttctgatgagaaacaattaaattcttaaacatttgcccttatcctgagactaggcatgtcttagcatggaattcagcccaaattctatcttgaacagttgtagtctgcctgaacagctgtgtttgccctcctaattctctgtgcagactcatttggatgtttgcatttcctgtcccaatg

SEQ ID NO: 9140 - DNA, 6000 bp, Homo sapiens
acaaacccagaggaggggctgttcagatgtctaacacgagaaactgagtaaaaattaaagaatggtttaggccaggtgcagtggctcacgcctgtaatccctgcactttgggaggctgcagtgggtggatcccctgaggtcaggagttcgagaccaacctggccatcatgatgaaacccccgtctctactaaaaatacaaacaattagctgggcatggtggcacgcgcctgtaatcccagctactcaggaggctgaggcaggagacttgcttgaacccgggaggcagaggttgcagtgaaccgagattgcgccactgcacttcagccaggacgacaagagtaaaaaaaaaaaaaaaaaaaaatggtttaaagaaaaaggacaatgttttacacatggatcaaattagacactgcaagactataaatctgcacccttctaatgtgaaaagggcttcactgagctatacttgtatattatgccctcgatattcactcaaggccattacaaggaacaaatgaaaacggcatcagcatttgctattaaccagttgagaacattctccactatttcaactaaataagtatccaggtgagaaacttcttttataatttaaccccagaaattttttttactccaaagaaccagttaacagaatagaaagtgttattgttttggctatcaggaagctcagccatgtttaattctcaatcacatcagctacattaacccataaaccatattatcgtcctcctccttataatctcatctcctatttctatattttattctctatttttaagtactcaaaacatttttaaagggctgaaaaagaatacacttgtggtagacatagcaacgtgccacccagatccccttcaaagaaggacttgttgacccaactattgggagagctgtcagcagaaaatcttcagctgtcagcccctcgaagatcatcttggctgcagagtgccatctggcccaggctaggctcttcccaggacattacaactcctttccaggctagtgccagacaacagagatcctgggagttggctgagactgtcatcaggcctgcatctcagtttagttttccctgtgcccactcctgtttctttccagtacctcccagagtgttgatcccagggccactccccaataaacatactgcacactaacctgtcacagagtccacatccaaagaacccaacctgtgacagcaccaaatcaaaagagactcaggaggctgaggcaggactgcttgaactcgggaggcggagattgcagtgagccaagattgtgccattgcacgccagcctgggcgacgagagagaaactctgtctcaaaaaaaaaaaaaaaaaaagagagaaaacatatcaggtaggggtattttacaaaggagagaggatatacaataaagtgttcatacatacatgggaagcaaaacagcactgactctggggccagactacctgggtttgaatcctgccttttagctctgtgcctcagttttttcatctggaaaatggggataataagagcacttatagggctgtaatgaggaagaaatgagacaatgtggataaagcagttccatagtgtttactatatgtcaaccactgttctaagtggtcatttaataaacagctgtgaggccaaacccacaggtcccgaggggcagttgggctgggactctccccagactctgggcatgggcacaggtacagtgtaggccagggcatgctgaagcatgcatgttcacagaaataggcctgagcagggctagcatgggtgacgtcacaggcgtgtgcttgtgtgggtgctgggctgctcctcccagacagcgcagctgcacgtattgccattcacacccacgcacccatatatatgctgagctgggggaagcccacacagaccacaccctctgcatgccctgtttttcctgcacctcctttggtggaaggaggcacctgaggcctgggatgctggcccagaagtcccaggaggaaatgggtcctgttccctgattacaggcctggcaacgggctgaaaactcaagctcttgttggcagggatttcttgagcccctagaggtccagacccagaggcaaaagtaaaagcaaggaagccttaccctgcatgttaggaagctcccaaaaaaatggagaaacggatgtaaaaagtgcatcagagcccacaggctgccggagtcagcacagtaagctcaatgagggctgcagcacttaagagggtgcctcctgtacaaaacaggatcagacagccagagaggggccccattcagcccccgtctgccttcctggtctcatcactccctgtcccctcctcagtcaggaaactctagctttgtaaccctaaattcaacaacctcttcctggcctcagggcctttgtacatgctgttacctctacttggaatgtacttttctccaacccacctttaataattcacctcgccatcgactcacttcctttagacctctgctgaggtctgaagagatctcgacccaatgtttttccttctagccctcatcataattgtctttatgtaacagagtgtttatttaatgtctgaactcccagagagctggcgctgtgtctctcttgtgctcctcatgttgtcaatgcccaacacagagaagagcagggtccacagaacttcaagcctaagccagttcaagccacactctgtgagcactcacgttctgctggattccctgtgcccaaggccagcggtgagcatgcctcccctcacccatgctgattaaccagatagcctccatgcccactgactactgaccaccaggacttacctaagccagtggatctcctgtgaggcagaaaactcatggagtcaggccgacttgggttctagttcccacctagtcatgttatgtggctttggggcaaattgtagaacttctctgaatctctgtttcctcatcagtaaattgtggaccatcattcctgattagaagataattatgaggatcaggtgtgaccacaggtgcacaccttcagcacagggtctacgctagctccgtcccgcccacgtaaagacctgccactaggtggcagtccatctcagctaccccaccgctccttactccacagaggctggctaggacaaagggtctcaatgtcatgctgaattctgagcttcttaggggacgcacttgaggaaatcaacgttaacacacaagtttccactacagcaagacaaagtcagaagcagcagccccaggtcactatccagctgagtgggttgcctgagcacacgctcttacaaactctagtctagtcctactatctcacaattcccaggaagcctggctctttctctggcatcagctggaagctctgttgggcttctcacctctgaaatgcagtaagttgtcctgctgtgcctggcagccgacccactgcctggctcaacatgtcagacaggctccaccgcgaccgtgggtgtcctcaattttggcggtgctgacaagggtagatagattgcaggggtgagtttcaagaatggcttcagaaagacaaagagtatgaattatattccataaccagaaaaaggccttgtggctggagaatggagagtgaaggatcacttgtgagagatgaaactggtgagatgggcaggtcatatagaacctgctaggccaagcagggagtgtggattttaggtgcaatgggaattcacggagggttttagcctggatgtaggggatcatgatttaatttcattttaaagatttaaagcatgataaatccaggcaaaaccaaactgatagatccaggcaaaaccaaacaaggtgagtagtctgggtgacaggagatggggccttcagcttgtgggctgagtgacaaggtcttgatggattggaggtgaggcaaagggaggaatcaaagttagctgcaaggtttttgaccttccaacttagagaagtttagcgccgcgttctgagaaagtgaagactgtggaaggaatcgtttggggagggaaggcgagctgtctaagggggggggatgtggaacatgcagtgggatgctggggcctggaacgtaggggagatgcaggtttggagtcaccggtgcctgtgttgttgggcaaagccaggggaaaggtcaggtcgccttgggatctggcctagcactgagtgcagaggaagagaagcttctgagatcgagaggcagcggctacaggaggaggaagaaagcaaggcggggaaaaccaaagttcaggagagcatttgcaggagggcgctgcggggtagggtctgagtcggagccccgaatcggactcgagtcctgtcgcgtggggacggagcgtgcagaggcccatgcgagggacagacacaaaggccctgggagctgcaggtcagaccactggacagcgcggccgcggacctaacgcccctgtaaggggtgctcacgcttggggggaactctccgaaagagaggaccactgaaagccaccctggcagcaggggcggaacagacagacgtgggtctggccgtcgccagaactgcctgcggaccagccccgcgctgccgggggggcgggacatgtcggctgtccatcagtgcccgcgaccaatccgcaggcagccccgcccccgcccctcccgggagagggcgcgcggaggacccgccgccgccggtgtgaggcggcccgtcctggctcccttgtccgggaagcccgcccaggtaactgagtttggccgggcattcccggaggacgcgccatcccctcacgtcccgtcccggtcgctgcatgggcggtgttcgggacgcgggggctgcgtctgtgcgggaccgcggggtagcggccgcccgtgcgagtacgcctgactgacgcgccggccgccgggcctgcggcctgtgggcggggctgccgtgcgtgacagggccgctcgtggccgccgggctgtgtccggggccgcgtgagaaagctctgcgggactgagggctgggtgggtcgaccgggaacggcgcgcgctcccgccgccatcgcgcctccgtccccgcctgcggcctgtctgggggtcgcggggcgcaggcgcggcgggccgacgggcgggggtcctccccacgggtgcgcgggcgcctttgttcccggcgccgaagcggggtggggcctcagggcagccccgccccgccgcgctgaggccccgccccgtgtccgcctgcaggagccgccgccgggtcccgctcgtctgccgcctcagcctcagccccaacctcagccgccgccgttgcgcttgctcccgggcggtcctggcctgtgccgccgccgcccccagcgtcggagccatggcgggcgccgcgtccccttgcgccaacggctgcgggcccggcgcgccctcggacgccgaggtgctgcacctctgccgcagcctcgaggtgggcaccgtcatgactttgttctactccaagaagtcgcagcgacccgagcggaagaccttccaggtcaagctggagacgcgccagatcacgtggagccggggcgccgacaagatcgagggggccagtaagtgcgcccacttcctgcctgggcccgccccgcgcgggggtcgtgggagcccggcccgactgcttgcaccccggccggccgccccagcgacttgggcaaactttcgggccctcccagactccctccgggccccgcccccgcttcgtctcgggtggtcactgggggcggggggcatccgggtcctcggtcacctgacaggacaccccccctcccccagctggggggagtgttccaggcgctttgccctgaggcctaaaaatcctcgcgggctggagacctgcggtgcaggcatcgggccccccagaccctgggagtggtggcggcgtcggcgaggggagctaaggcagtggcccccaccctgcacgggaacctggggcctgaccagacggtccccgcccactctttatccagaaagagcagtctgtgaaactctccgggcccccaggct

SEQ ID NO: 9141 - DNA, 6000 bp, Homo sapiens; identical to SEQ ID NO: 3706

SEQ ID NO: 9142 - DNA, 6000 bp, Homo sapiens; identical to SEQ ID NO: 3707

SEQ ID NO: 9143 - DNA, 6000 bp, Homo sapiens
ctcgtggtgcgccgtttcttaagccggtctgaaaagcgcaatattcgggtgggagtgacccgattttccaggtgcgtccgtcacccctttctttgactcggaaagggaactccctgaccccttgtgcttcccaggtgaggcaatgcctcgccctgcttcggctcgcgcacggtgcgcacacacactggcctgcgcccactgtctggcactccctagtgagatgaacccggtacctcagatggaaatgcagaaatcacccgtcttctgcgtcgctcacgctgggagctgtagaccggagctgttcctattcggccatcttggctcctcccctgattgtgcattttagcctgggcaacagagcgacaccctgtctcaaaaaaaaaaaaaaaaaaaaaaaaaagaagaagaagaagaagagcacttactaatgacaataatatatattttctcataagcatttattttaacttaatttaccattttttgttttctgtaacagatatttgcgtatatttaattttaccttttctaactttttggtctgaattttatagagtaattttttaaggaaaggttaaataagattaataaagttacatttggggaaacttgtaacagttttcacagggtgtgaaatgtcaccccacacacataacacacaaacacttaaactgatgttgtttcaaaaagttttttagagattaacaaaagctgtttaattatttctctgaaatgtgccattcaaatgttcttgggttttgttagtctatgagaaaaatgaaaagaatcactgtaaatagaacaattaaattctgtccttagaattgcacaacctcatccacacagatggaagatttattttcattaatgcattcctttaacgattttgggtgaagagcctcctgaaatggacttcttccttccctgccttctgaagcagaacactctgctttagatggtttgaccttgtccgatgactctgagccacgcttagcatttcaggcagaacgaaggctgagatgtcatcagagaaggccactgcagacctgggcagggaccgttgggccatgccatgcagggccatgtgagctgaaggctgtcccccaacgccagcgtaggggctccagcttcccaactttgtcaatgcaaccagagtggaccagggtgagcacggactccctctaacctagctgtcgtggtgtgaaaacatctgcaaatcctcagaggccctcccatcaggagatgtcgtctcatttccctcccctttaatgtgggtgagccttcttgctttgcttcagtgaagcagcagtgatgtcccataattttccatactggatctttgcctggtgctttctccccttctgtgaacacacacagatggctacaccctttccccatatcgattctgttcttttctgactctggctttcttagtattggggttctcaagtagcttcagccctgtcttgatggatcatctttcggggtatgtgctgattcagtctgagtgtccaggtgtccacctccatcttctcacagggaaaagccagcagtactgttggctctgccttgttcaggctacgctcctttcctgctctgccttctcagaaactccctgaagcctttttcttcttttcttacaagtgtccagaacttctgaaaagcaaagcacatagaggctagtgccatccactaggacttgtggaatgataaaattgttctctgtctgtgcagtccatatagtagtgtaggggggcatctcaggctcctggtggagtctgaaaattaaacttacataagacaagttaatagcaggaaagcacacaggtgtatttgatacaagttttacatggcatgggaggcctcataaggaaatgaaaacccaaagaggcagttagagtgtgttacttatttactgaattggacaaagaatagtaaactgaaaatgtgatgaggcagaggggcttgggctagggtagttaattggatagaaaagtgactaagaagataagggttagtttaatagggtttgtacagaattctcttagcctcaacttcctgtctttgatgataagaatgttgctttagttctagtataagagggacatctttcatatgggaatttcatctcttgcctttaaataaacaagaggttggggccaggcgcggtggctcacgcctgtaatcccagcactttgggaggccgaggctggtggatcacgaggtcaggagatcgagaccatgctggctaacacagtgaaaccccgtctctactaaaaatccaaaaaattagccgggtgtggtggtgggtgcctgtagtcccagctacttgggaggctgaggcaggagaatggcgtgaacctgggaggcggaacttgcagtgagccactgcactctggcctgggcaacagagtgaaactctgtctcaaaaaaaaaaaaaaaagaaagaaagaaacaagaggtcaaagtgtccagtgtgtattctgtatgcaaaaaagaaaagaaaaagtcaaaataatcttcttgcacctgtcgttttttgggtgtctaacttttttttttttttttgagcagagtctcactcactctgtcgcccaggctggagtgtaatggtgcaatctcggctcactgcaacctctgttccacctctcaggttcaagtgattctcctgcctcagcctcctgagtagctgggattacaggcatgcaccacgacacctaactaatttttgtattttttgtaaattttgtatttttggtagagatggggttttactgtgttggccaggttggtcttgaactactcacctcaagtgatccgcttgccttggcctcccaaagtgctgggattacaggcgtgagccaccgccctcaagtatctaacttagtcaatccaccaggtgtctaacttagtcaatccaccaggatgctatatttataactctttcagtagccactggctatgtgtggctattgagcacttgaaatacggctagtacagccaagaaatggaactttacattttatttaatattatttaacttgaatgtaaatagccaccagtggtgagtggctccatcctgggcagcgcaggtgtgggcagtgggtcctttggctcttctccaagatgacttctattcttctcctgatccacaccaggggtgcttctcctttccttttccttcttgtttcaaggattcctcagctgtctctctagtcaggccttattctgtgaggttcatctctctgccctgcctcctttcctcccccagcctttgggagaataaaacactagctctacccagtaattaaggtttgaaggttttctcccactttggtgtggactggcagaacggtgggagtgcccacaaatttcctgtgacaaagaagagaatgaaggaaattactagaaaccaccaaaaatgtctctcttaattgcaagtgctagcttcggggaggcagtctgttccagctccttttcaactgactacagatatgagaatctagaactgtgtgctttaggatagggatggagagttcttttcaaaatgtgcattttctagaccccagctgcaagagaccttgataccaaaacccagtggcctaggaatcagtatttcttaaatatccattagagcttctgcatcgaaccacgttagggaacaactgatttaatcaacacactgatttacttaggagcttttgacttagcctcactccattaagcccccatagactgctctgctttccaaatgcttatgttcactttttacagtttttctctggtctcccctgcatttacggtcacctccaatttcccgcctccttctctctccaaaaacacacagctcagcttttcaaagttagaataatgcatgtagtaatcgtaaataaactgcacgaagagctgagatttctttctatctctacggagtcctgaaatgtatgaactctgtgacatgtgctttagtcaactttctttctaggagtttggcccctcttgccttgccctctacagacagtcttcattttctaaaattttgcatgccagtgcccagagtgtatttattaacagtttgaaactgtcataaatctcacttggcagtgattttcttattagtttcagcatctctgccttagcactgccaagcttgaatggtctagacattgtcttcaaaaataactccctctgggacaggcctgaaagtctctggcacaggatcccatctatctatggatacttctcctaggagattagaagtcttcctggcaggcaaacattttgtccctggagatccatccactatggccagtattatgtaaaggataagagttcaatggttcacatccattgaatataattcagtcaacaaaagagtggattatgcatatattgcatatatgcaactcatttataaccaaggaagagaggaccaacagaaagttacagtttggggagatttaaaaataactgaacttatattggggacgtcttgctcttggagataaaaatggctcttattgccagctgttgctcgttttttggtgggcggtatcaagcatgtgatgctttggtggctacaccagattctcttttgcagaacttgcatgaagggtgtgggttccatccaatctgttatcccctgttccttcatccatcccattgccatgcgagtcttactgaggaggtgatctttactagaggccacggatcatttttccatttctgcatacatacaaaattaaagttcaccttggcccaggacccctttgggggggtcacgccccctgcgccgacgtcctgggagctagcggtgcgcaagctcggctcacacacaccccgccccggggcctcctgggaactgtagtaggcggctcgcgaatccccgccgccatgacaggacccggactacagctcccgaaaggcctcgcgcgtcgcgcctgcgcctgcgtccctgcggccgccagagggagggttaaggcgcctgggcgcacagcgagccggctgagggggctgtggcggccgcggcgggcgacatggacaacgcggggaaggagcgtgaggcagtacagctgatggcggaggccgagaagcgagtcaaggcctcccactccttcctccgagggctgtttgggtgagcgccagaccgtgcgtgccctggggggggggggtctccgtacttggcccccttcctttcaggctgaccccccgagtcccccacgcaacctctggggccctcagaccacgtctaggggccctcagcctgcaggcgccctccagaaatcctgtagggtcccccagcgccccctggagcccccaggacgcccaggggccctcagtccgcacgcgccctccagagaccccacaggcccccccagggtccctggaaaccccgcatcctcccaggggctctcagcccccacgcgcactttagagaccccctagggccggcagaactccccagggttcctcagcccccacacgctctccggatcccctaacacgcccccttagaatccccagagtctcacagggaccctcagcccccacgcgcctttcagagaacccctaggacccccagagctccccaagcgccccacgaagcccctagaacactctggggggggggctgtcagcctcacgcgccctctggagaccccagatcgcccccctcgccctggcccgggttggtgcgggggtcccacgacctagaaggtcagcggctccctgaggcccgcgggcgcggtagctcggggcgcgcgtggggcccccttctcagtgcgtagcgagtcgtattggtgcatttcgccacgctgaagcccgtatcgctcctgagaccggtccgggtgaggcgcgccggggtggagccggaggggtgggtgcgggggccgcccccggcgcctggaacgcgcacctgggggcgtcccgcctgcaggtgggccccgccggggagggggcggtccggcgagggatccagagctggtgtgcttgttggcctct

SEQ ID NO: 9144 - DNA, 6000 bp, Homo sapiens
agagctctcaggagagctgacaaggacttacagggagctggagagctcaggataccttaaccacctgtgttagggtctaccagggcaagaggcagaggacagacagggacagaaggaggcaagccattgctcagagccttggggccaatgttgtcgacttcctatctaagccctcactcatttaatgcctcttctctttggcagccctctctgggagatggttcaggatggcattgacctcaagagcatcaagtggacccaacactagaagaatagggccctgactttgtgctggtctggcccctcctgcctcaccaacccgtgcacaaccagacaccttgttacacctagtggatgctctagattggtatagaccagttgacttcagcatcagtccacctctatgacagaaacacaagaaaactgtctttccctagcttcagttccttgggtgtggagcactccccatttcttctcgggtcttaaagtgtgtggacattttcatcccgaagccatagagacatttgctgtcatattgctgctgggcacatctgtgctcttggtgaggagagcaagaggaaccagaagaagtctctttggtcagggaccatgatgctctacatggacatttgagtcttcgtcttctgctgctgctcggctggaccagcttctttaacagcaagcataatccacttcaatgtaatattttctgtagctccaaaggctatctcttcatattgactgcagacagactgaatggacagtttcttagagggcttgtctcctttctacccttgtcctctttcctttcctttgacctaatggagctagaaatatgtctgtgactccaccagttattctaataatttgttttcttgaaaattgttaatttcaagactggagaaataaactcaccttctatttactctgtgactttatgagaggttgagggaaaagtggaagctgtacttgggaattgtggagaagaccgccactccatctgatttgcataaatgactcagtgggcttttgtatctcttcatttaagaattatttgaatgcctgccaggagccagatttgttctgggtattaggaatacactggttaacaggaccaaaaaagaccctgccctcactgagttttaaattttagtggagagatggaaaataattaaacaaataaacaatgttatagattgtgataagtgctatgaaagaattaagtggtaagaggacatagcagggaaaacctaccatgctgggtgtttgaggaaagtttttctgaggaggtagtgcttataaatatgaagagctcgctaatctagaaatgagaggtgagaaggaatggcaagagctaagggcctgaagtgtgataaagcacaaagtattatactttagaaaccaagagaaggccattgtaactagagcttttcatttgtgggtctgaacccataggtgggtagttaccagtacttaaaaaaggagatagtatgttagagtacatttatgcatattttaagaatatattttgatgatatatttgaatttgtataccaggttataaatgtatttcttattgtggataatggtcaaaaaagtttaattgcttttcatacttgccagtagcagggggacaggaaagtttgaaagccactgggctaaagtttggtaaatgtagatggacagtggaaggaggagatgaaattatagaatttttcttgttgaaaaatatcttttttacttagaataattttagatttactgaaaagttgcaaagatagtagagttgtagatctattaccagttttcctctaattaaaaagtcttacataaaactatgctaatttggctgggtgtggtgggtcacacctgtaatcccagtactttgggaggcgaaggtggatggattgcttgagctcaggaattcaagactagcctgggcaacatggcaaaacctttactctacaaaaaaatacaaaaattatctaggcgtggtggtgcccacctgtagtccaagctatttgggaggctgaggtgggaggatcgcttcagcccgtgagatcaaggttgcagtgagccttgatcgcaccactgtattcaagcctgagcgacagagtgagaccctgtctcaaaaacaacaataggctgggtgctgtggctcatgcctgtaatcccagaactttgggaggctgaggtaggcagatcacgtgaggtcaggagtttgagaccagcctggccaacatggcgaaaccctgtctctactaaaaatacaaaaattagctgggcatggtggtgggtgcctgtaatcccagccacttgggaggctgaggcacaagaatagcttgaaccctggaggcagaagtagcagtgagccgaggtggcagtgagccgggatggtgccaccacactccagcctaagcaacagagcaagactccgtctcaaaaaacaaggccaggcgcggtggctcatgcctgtaatcccagcactttgggaggcggagggaggtggatcacgaggtcaggagatggaaaccatcctggctaacacggtgaaacccccgtctctactaaaaatacaaaaaattagccgggcgtggtgtcacgcacctgtagtcccagctacttgggaggctgaggcaggagaattgcttgaacctggaggtggaggttgcagttagctgagattgtgccactgcactccagcctagatgacagagtgagactctgtctcaaaaaaaaaaaaaaaaaacaacaaaagaaaactatggtacatttgtcaaaacttagaggttaacattggtatattagtattaatgaaacgtgattttctaaaattattaaagatttttttatagagactgggcctgtgttgctcaggctggtcttgaagcaatcctcttgcctcttggcctcccaaaatgctgggattacaggtgtgaggcactatgcccggcctaaacttcagattttattcagctttcaccagttttcctgtcttttttctgttccaggatccaaccctggatgctacattgcatttagtaggttttgtttttaatggactatgttttacctacacagagcaaacctataaaaacctataaagcataggtttagtttaacagtgtggcctggttttccaacttgctgtttttggcatactgggctagcaccagtccagtctgccatagaaatcccgaaaggttgttggaattgtgataatttcaaccttttttttcttttttttaagtgatagggtcttgctcttgttacctgagctaaagtgcagtgatgcaatcatagctcactgcagcctcggactcctgggctcaagggatcctcctgcctctaactcccgagtagctaggactacagacttaagccaccacatccagcttttaattagcaggggcatgaagttcggggggctaggcccaaagcggcttgagaacagctttctttttttttttttttgagatgtagtctcgctctcctgatggtctccatcccctgacctcgtgatcctcccacctcggcttcccaaagtgctgggattacaggcgtaagccaccacgcccagccagagaatagctttttctataataaaataatactatagtgaagccgtggaggggtcacgatggatttaattttttttttttttttgagacggaatcttgctctgtcgcctaggctggagtgctatggcgttatcttggctcactgtaaccgccacctcccggattcaggcgattctcctgcctcagccaccctggtagctgggaccacaggcgccagccagcacgcccagctaatgtttgtatttttagtagagacgaggtttcgccatgttggccatgctggtcttgaacccctgacctcaggtaatccgcccgcctcggcttcccaaaatgctgggattacaggcgtgagccactgcgccctgccctagattaaaactctttttttgtttttttttctgagacgaagtttcgcttttgtcatccagggtggagtgcaatggcgccatctgggctcactgcaacctccacctcccgggttcaagcgattctcctgcctcagcctcccaagtagctgggaccacaagcaccgccaccacacccagctagtttttgtatttttagtagaggctgggttttgccttgttggccagaccggtctcgaactcctgacctcatgatccgcccttctcggactcccaaagtgctgggattataggcgtgagccaccgcgctcggcctgtataaactttttttttttttttttttttttttgagatggagtcttgctctttcgcccaggccggagtgcagtggcgcaatctcggctcactgcaagctccgcctcccaggttcacgctattctcctgcctcagcctcccgagtagctgggactacaggtgcccgccaccacgcccggctaattttttgtattttttagaagagacggggtttcaccgtgttagccaggatggtctcgatctcccgacctcgtgatccgcccgcctcggcctcccaaagtgctgggattacaggcgtgagccaccgcgcccggcccccggcctgtataaactcttaaatgggaaaaaagaatcaggttttggctgttttgtcaggatataataactagccaccacgttgtggtccatttaatcctcaaaaaacttagaggtaagcacaattcgctccttccgcggaaactggaagacgtgaagcaatttgcacagtcttgcagtgaagggccaagctagacactcatacccagcccacccgccagggccactagcccaaggtcggtcctgtgcgccaacagtcgcaagcagggactgaatatccccctcttagcacaaaacccagtaacttccgggagatcgcccgagaccgtcagcgcgcttgcgcggccccttgacgtcaaccacgccgttcctcccccttctggaacgcggagccgctgagcgggccgacggccattttgtgaagcggcgaaggaggtggtggctgcgttgggctccgggaagccgttcgggctggggctgtcggccgcggggcggaggcactcgcgcggggggtaattcggggtctgggttctggtgccgcgcagctttccccggtaagactcccgcagcccctgaacgggtggggctgtgcggggctcgtggtgccccttggtggcccggggcggggccttcggaggccttcgagcccgcggcaactagcgccccacacaaagggtcgaggcagggctgcagggggagtgggatgccacttaggcctctgagatctgagaggatgcaaggaggacgcaagaggatgagcctgcgtaccgaagtggggacgaggccatagcgaggactcccccgtggtctgagagggggcaggccagagctggctggctcagcggcctgcgagctaacggggactgcagtaaaaacacgcctacatcccgagtacggaggatttcttgtctcccccagtgaagcagaggttataactacatctctgtgcctggaggtggggagataatcgtagtgaggacactccttcaacccgaaatggaaaggaggcctttgtggcctaccagcaaaaggggacccaggtcacacctgtggggaggaagctgtagtcggtacactcctgtgagttcagaaaggaagtgtcacaaccggccgccttcgtggcctgaaggtggaggggtttgcagtgaaatgcctccgaggtccattgctggggaggggctttactcgagggtgtagcagttttgagaagccggcgtctgaagctaggaggtgagggggtggggtgagtacgcctcctgaggctctgagaattgtagtaagatgccaggcctttggtcccccagtagggaaggggctgctgtgagcagcacatttacggctccctcgggagaggatcctgtggcatttcaggaggacgagatccagtgggctgcggagggtgggtgcttttgatggagagttaa

SEQ ID NO: 9145 - DNA, 6000 bp, Homo sapiens
ctctatccccatccctgccataggccctcctcccaaccctgtctgcccaagaaccatacggagaaaccaccctacatatctggtgctatttcatccatctacaagcaggagccaggaggctggccccttttagatctcactaggggcatcttcccagaggctgtgtgggcatgtgcctgctcccaccgcgccccctccacagcaccctctggctccggatgggccatcatgaaagcttgagcggcccagatcaggtcctcttcccgaactcctgggacgggcacggtggggatgccagcgatcatcatggcgagggtgaggatgcagatatcaggctgggagctggcctccttccccactgcctcagagggtaccggtagaacccgtggtgacagcccacacagcatcaggggcctaggcctgctggggccacccaggtcaggggctctgcttctggagtagccattgtcccagcccaagctctccagctgcctcacatgcgggaatttgtggcagtttcggctgtattccttccgtagtgtctcccagctagtccccccagggcagcccctggcttgtggcattgccagggctgggccccaggcctgggcagcaggtgccacctgctcagctttctggctcagtgggcctgttccaccagaggccaccaccactggctctacaggactacagaggccaagggacaagcctggagaagcagccccacctgcagagacaggaatgaaatggaacgttattctcagttctttgaggagggggccctgaggggcagggcatgggagcagagcttgggggcgtaactaagaccagccccagcggactgtctagaggttgggaactaggtgttactcatatccacactcccagtccccaacacggagtaggtgatggagaagcgtttgttgaattaatgaatagtgagcaagcgggtagttattgattggcaaggatgtttggaatggcttttcttctaaaagaattgattctagggccagcccccaaatgcccagcagaaccgccacctccccagagccagaaagcaacttctcaggggaagctgccgcactccctccaattgcaggtgccccccgctcaccttggccggaaggcagaggacctggatgagtttgtggagtcctgaagtaggacatggcttccccaaagccccggtttgtgagggaatagtgatctgccgcctgtcctcccttcttcacccttctagaatgtcacctcatagaccctccccttcacacttggaatccactttacagcgttgacctattcattctagaacctggacatgacaataggatgaggttaaaagagcaccagaccaggagctgggtgttctaggttcttgccctaaccttgaacgagtcacccagatagttttgttccttgatatccttatctgtaaagtgtgtctgatgactgcccactacctcattaggagttttgaggatgaaatgagatcatttgtatggaagcagatgaccagagatggaaacacaggagccaagtgcttcgtgccttgtagagtaagacttcgggtcagacccagtattggtatttttctttttctttttttgagacagagtctcactttgtcgccatgactggaaggctggagtgcaggagcaagacctcagctcactgcaacctctgcctcctgggttcatgcaattctcctgcctcagcctcccgagtagctgggactacaggaacctgccaccacacctggctaacttttgtatttttagtagagacagggtttcaccatgttggccaggctggtctcaaactcctgacctcaagtgatctgcccacctcggcctcccaaagtgctgggattacaggccaggtattggtatttttcaaaattcctcaagtgattataatatatgacaaagttggaaccttttttctagggacatacttctcaaccctggctgtacatgagaatctcttgagaagcttttacaaaacacaatgtctaggcctaatttcccaacaaatcaaatacgaatccctagggatgggatgtgggacaccagcactctttacatatcctaagatgactctaacaagcagccagcctagggacccctgctcttttgctccgacctgctgacctgcagtgattctaaacgaagtgactctcataggctgtaggggcaaggagaccttccagtgatcaagatgtcagcatcggctgtttatttctggtcttggctggcagcaatgtggccaacttcggaccagccagccacaggtctggggctccaggatgcagctgtgctctggtgcactgtgggtcttcactcatacttgcagaaatccttaagttctttgggcaggtggagcccatcaatggccagccggtgcaccatgctcctttgtatcactaggcggcacagagtctgcagggatggcactgtgggaagaagactgtgaaaggcaaactgaactggagggtgggtctgaggccaagatccagaaggtctaggtcatggtccccactttgtcattaaatgtgggcaagtccttactgctctctgggcccagcctgcttcatggggctgagagaagcacctcttcctgagagctgccacaaagctgcagccctgtttatatcataacacttagcacaatcccttccccattcacttagcagcttctgggggcaggggtagtgtctgatttgcctgtgcaactgaagcctccagcacaggcctggcacaaagagggttctggtgcattgagttcatgaaatgtgatgagaggtataactgcaatgcttaccagggctataatgaatcatactcagcattaagaagctctcagtctggggtttgttatgcctcgaagccaatagccaatatgcccaagtctatgagcatgtttctttcttttctttctttttttttttttatttaaagagagagggtcttgctctgtcacccaggctgaagtgcagtgctcagtgaactgcagccttcaattcttgggctcaagcgatcctcctgccttagcctcccaaatagctgggactacaggcatgcaccaccatgcccagataattatttaattttttgtacagatggggtctcactttgttgcccaggcttgagctagctagcttgcttgcttgcttgctttctctctcttcctctctctctctctttcttttttttttcagagtcttgctctgttgcctaggctggagtgcactggtgagatctcggctcattgcaacctccacctctcgggttcaagtgactctcctgcctcagccttctgaatagctgggattattggcacatgccaccacacccagctactttttgtatttttagtagagacaggctttcaccatgttggccaggctggtctcgaactcctggcctcaagtgatctgcctgcctccccctcccaaagtgctgggattacaggtgtgagccactgtgcccggccaagcatgtttctaagaaaagggcaaacaattctcaaagaggcccctaatatctaaaattggtttagaatccctgccctaggtgaatacaggaaacactatcaaaactaaaagggaacttgtagggcatcttaatcaatcaaccaagataggtaccaaggcccaaaaccatgtagaggcttgtgcaagatcacaagcagaggtgcaatttgaagctagattctcccactcttaaactagtgccggacagacgaaggcctagcacatgggctacggagccctagtagattccagtccccacactgagccaggaggggtcgctgcccagggatacctacagccatactcgagctggacaaggcgcacgctctttgtggaagcaaacacgtccaccaccgcgtagaggggctgcgcagctggcagtccccgggcgctcgggcccatgtcctcgccgttgatgatgatgtgcatgtcggccgtgccatcggggcgcgggcaaaagaggacacccaggcggctacggcgcgcggtcggaggcagcacgttcagctcatagagctggtccaagagatggctgtagagccctggccggctgcggcccaccaggcggtcccggggaatgcgaaactgctcaatgcgcagatatggttccacgaggagggttggaggtcggctgggggccgctgcctccgcctccgggcggccctcccggggcacgcggttgtggtggcgcgtgatggcgaagacccaggtgtggcccaggttgaccagatcgggcagagaaaactcgggaacgggggccagactggcggggtccagcgcggtcagaccgagacgcagatgtccgcaccagcccagctctttctcctcgatctcgaccaggaagacctggcccggggccagcggctcgcggctgaagcacacgccgtgggcgaagctctccacgcgtgtggcccgcgtcccagaggggtccacgcggatgttggcaccgtgcacccgatggaagcgggtgggagggggctccgggcgctcgagtccccagagtgcacccgaatccacgggctcggaggcagcagccatctctcggccatagggcaggccagctggcgccgggggctattttgggcggcgggcaatgatggtgaccgcaaggcgaccttgtaaggcatttcccccctgactcccttccccgagcctctgcccgggggtcctagcgccgctttctcagccatcccgcctacaacttagccgtccacaacaggatcatctgatcgcgtgcgcccgggctacgatctgcgaggcccgcggaccttgacccggcattgaccgccaccgccccccaggtccgtagggaccaaagaaggggcgggaggaagactgtcacgtggcgccggagttcacgtgactcgtacacatgacttccagtccccgggcgcctcctggagagcaaggacgcgggggagcagaggtgagctggcaccggaggctggaggggatccccgagcccgggatcggtgcgcggcagaggaggctcgcgggtgggagctggcgctggggccggggcttccctcgcggaggcgccgccagcaactccccgggggctgctgcacggaagcgctgaggagcgagtcaacagcccctctgctgcctcccgtagatgatccgagccgcgccgccgccgctgttcctgctgctgctgctgctgctgctgctagtgtcctgggcgtcccgaggcgaggcagcccccgaccaggacgagatccagcgcctccccgggctggccaagcagccgtctttccgccagtactccggctacctcaaaggctccggctccaagcacctccactactggtctgccgccctgccttctgggcgggattgggagaagagatgacggatgagggatggggggtagttctgcagacccctgaggatgcctgggagccgggagggctggaaagggcccctccaactgcgccaaccctgccctgacccccctcccaggtttgtggagtcccagaaggatcccgagaacagccctgtggtgctttggctcaatgggggtcccggctgcagctcactagatgggctcctcacagagcatggccccttcctggtgagtggacagcagggggaaagcacagttcccaaagtaaaaggctggggaaagcgagagaggggctttgtgattttccaaaaagtttccttccttctaagcctcgggattttcctctatgccattggctttgctgcctgtacctctcagaggttttacccacatgtaaagtgcctctcatggtggccctttccctccacccagctggcccttgggacttactcagccatctctttcctcctcaggtccagccagatggtgtcaccctggagtacaacccctattcttggaatctggtatagctggagctgtgggtgtgtctgggcacttggatggggtggcatttagctaatttttccctcccctctagattgccaatgtgttatacctg

SEQ ID NO: 9146 - DNA, 6000 bp, Homo sapiens
ctgttctcaaaagttacctgatagtttatagccataccaccctgaacacacccaatctcgtctgatctcagaagctaagcagtgtagagcctggtacttgaatggggggcactgcctgggaatatttagtgctataggcttaaatatatgtatatgttcactggtagccaccatttttttttcagtagttttgctttaaagaaattaagggggccaggcgtggtggctcacatctgtaaacccagcattttgggaggccaagtggggtggagcacctgaggtcaggagtttgagaccagcctggtcaaaatggtgaaaccccgtttctactaaaaatataaaaaaattagctgggtgtggtggcgggtgcctgtaagtccagctacttgagaggctgaggcaggagaatcacttgaacctgtgaggcagaggttgcagtgagctgagatcgcaccactgcactccagcctgggtgacagagtaagagtccgtctcaaaaaaaaaaaagaaagaaattaaggaactaagggaggagacaataagagtaggataatatccatttaaaaaacaaccaaaacaacaggcaagctcagaaatggtgttggagtgaggactgggaagaagttgaaaagcacagtgagcactgggagccaagaggcaaaaagacaggcagccttggcatggccagtgtctggagttggaagagcagaactaaagccagtaagagaaactgttctttctgtcagcttcgagcaggaagctaaatgtaatttatttggaatctggactgtattaagaacgtctccatttaatggatggatacagatacctggtctgtgagtgtttaagaattcattttcatttacaatgtcttctcagcagcagcctaactcagaaaaaagtagtttagaaattattctttattgaaatggaaaattcagaatagaaagattttctatgttgattctgcttttgagtttaactacatactttttcaacacttaataggatataggtagatcttatttgaagctgatagaatgttgaaagctttgtttgtttagtaagtctgaaattgatgagtggtttttctctctcagcttgctcttgagaaatatgaggaaatgtttccagcatttactgattcaagagaatgtaaattattgaaagtaagtaatattagaactttgaagaaaaatgcttttgttctgttaggtgacaacacctaagtgggattgggtatgaagtgaagttttaatctataaagtctgctaactgaggggccctggtactttcctgctttcgtattataggtgttcaaatgcaattaaggtcagaaacatgtagttgtgttctgaaataggcacctgagaaatgttactacagaagctagatccctaacttggctcttgacttgtatatgagtatttcctcagttttgtgcaatatttggcaacattggtattatacttaaagtatatatttagaaatgggacttcatcttacagaactgttttttaaaatatttttatgctaccagaaactcctagaagctcatgaagaacagaacagtgaagcttacactgaagcagtaagttatgcttttgggacatggtacattatttgaagatttaagttaaagaaacttcttttccttttcattatgtgaattctaaacatttatttgaacatgactccagcataccttaagttgtattttccaaacgtcaccttttatatatcacacaaattaaacagttccattagccatgctgagattcgacttacactcaaaactaatttagctgtgagactagttcaggagcaaatattccatttatattcttataatttgctgttttaattttttcttttgaaaataatctgacccataaataagtataaagtaaaattagttaaggccaggcacggcgtctcacacctgtaatcctggcactttcggaggccgaggcaggcagatcatgagtcaggaaattgagaccatcctcgccaacatggtgaaaccccgtctctactaaaaatataaaaattagccaggcatgctggcacacgcctgtagtcccagctactcgggaggctgaggcaggagaatcgcttgaacccgggaggcagaggttgcagtgagctgagattgcaccactgcactccagcctggtgacagagcgagactctgtctcaaaaaaaaaaagaaaaaaaaaattaaatataatttaaaatataaaaactaagtagtgagaatttgctgtatttgtggcatgaaataaatggaaggtggccaggcacggtggctcacacctataatcctagcactttgggaggccaaggcgggtggatcacctgagatcaggagtttgagaccagcttggccaacatggcaaaacaccatctttactaaaaatacaaaaattagccaggcatggtggagtgtgcctgtaataccagctactcgggaggctgaggcaggagaatctcttgaacccaggaggtggaggttgcagtgagccaagatcacgccattgcattccagcctgggcaacaagagtgaaactccatctcaaaaataaataaataaataataaatatatatatatattaaaaatatgagggtttttttctttatactttttgtttttccatcttttgccatctcatgtttagaatcaagcaaaaaaaaatgtttttatatattttgaaacagatcctcactctgtcactcaggctggagtgctgtggtgtgatcacggctcactgcaccctcaacctcctgggttcaggtgatcctcccacctgagactcctaagtacctgggactacaggtgcacaccaccacccccagctaatttttttttttttttttgcattttttgttgagacaaggtttcaccatgttgcccaggctggtctcttaactcctgggcttaagctatccacctgccttggcctcccagacttcaaggattacaggcatgagccactacatccagcctcaagcaaatttctcagtagcctcctgtaacatgttcatcacagctcaggagtgatagaggaaaggaatgttttcctgtctgacttttgcctaccacatcattttcatcctattgtaattttatttttgggtaatgcattgaaatgtgttaattccgcttccatacatattctaactctgtaattaatgttttcccatgttcagtgagtattaattttccatattcctttcaaatttttatacaatatccagttacttttgccacaataattatgactgttaatgaatttttttcttacacgtttgaaaacagagaaatgtcaagcccaggaacttgtcactagtatcaaaatagtaacaggataatgaaaaaataaacaattttttaatgaagaaagttataaactggaatgattaatttcaaatgatgaagaaagttagtagattatggctgtaaaggtataaacagcttggggtactattattttgtgtttttaatgtatttacatggggtaattcctgttcctctttccttatactaggtgaaggaatttgactcaatatctcgcttggatcagtggctgaccaccatgttgcttcgcatcaaaaagtccatccaaggggatggagaaggagatggagacctaaaatgaaatgtttttgtctttgtggcatgcagctaactcctctttagttttgtcttagggtcaagtgatctttatgggatgcctatttaatggcttaattttgttgcatatgagccagacggcctgtgtattgtttaagctcgccaagtctgtgttgctgtgaaatgaatgaaggagaggctcctgttcatcttgtggtaatgatgggttgtttcatgcttatcagaacccccagcgttttctgagaagtacttcagaatctcattcctcatatttcattggtatttgtggagcctatgtttaatgttgccacgtgtttttatgtcctttttgttggacttgagtactcagcccagttgttctcatagatgctttgcattttctctgtgctttggcatctgaatatgttctttaaatgtgtgtttagtttaggacagttactaggaatgagtttataacttcattagaaatcatttctatttttgttatcctgtgattattttgatggtgctagtgactagtttctttgctttttgtgttgttccgtatgctaacatgtgcatggcaaaaatttagaatagccagggtctgtaggcatcacattgtgaggaagggagctttctggaagtacttgcttcatgtatggatgagtgtcaaagtgaatttgatttgtacttagacacacgcgtttacacacacacacatatcacaagatctgttagaaatggaatttttctctttttctggagatagttttcacttttagttggagtggaaatccctttatatttacattgaagtattttaattggcatagcctgctcattattttcatgtttatacactttcccacgttgaggtggtgtgttctgtgctgtgactatagaaatcttggtcagggctggatagattatctaagtcaagcttgagaatgaatgtatgtaattttcctgtttattgtacatgatgggttaggtggggtgaatgtggtacaggaatgtcctgtatgcccaagtgggcaagaaccccaacttgtttctcaggggacttgattgttctcttagctggtggaatatgttggcttatgtgtttgaactctgtcgtgtttaattggtttatataatatatgtatgctatcttgattcatgaacttgatcctattaatttatatgctgatattgtactttagacatacgcttgtctcctgaatgtcctctgaatatttatagttaaatgatttatatttgaaatgtgttgccagacttaacccagcagacactctgacatcacggagcttcactgatgacaggtaacgaaacttcctatgttatgtcaggtagtagtaagtagtattggaatgatgttttcatttttggtggctctcaactggaattggtagtgtttccaggccaagggtcgactgcaggttgtttgagaaatgatgagtaggtcagtctaggaagaaagagaaagtagcaggaaaggaagtgggaagggccagccaaggacagactgtagaggatccacatcaggtggccacgaggacttgcaggctatagttatggtggtgacatgcatgaggtgggctggtagagcaggaagctctgtgatgtcagagcatctactgggactacaggtgcactgtagtccccactactgggggtggcaatgaagacactctgtctgttgggccctagaatttaatgtggatttcctccttccttccaagttctgagattcttaaatgagagctggctgtcttctagaggtaagacctggaatggagtccagttggtactttttcactccctcttagaatctcttatgaaaaaatgatcagagagaaaagtggggttttgtttccccacctaataatatatcctacaaccagccaaatgcacttttgtgaaaatggggtgtgaggagtggttctgcagcttgagtcctctggttttaagtagtttgtttctacttgtttaaagaatcttctggtctgaccacttaaagtaaaaactacatgatttattttcgggcaattatgtttagctttcatcattatactccaacagacccgtctgaaggggtatttttttttaacaataatgtttgtaacattttgttgtgtcaattagagggtcacttgtttgtattgcaataaacactgggaccagttccggggttaagaattaatttttgtttttaatatttcacatgaaaagaatcaaagtaattgtaatggctagaagagacctgccagaagattaaaaaaaagaatgagagaaaagcccagttagtggtgtgcaaacttacttcctttaaatgtcccatggatgtaggacagtgcca

SEQ ID NO: 9147 - DNA, 6000 bp, Homo sapiens
cctgccttagcctcccaaagtgctgggattacaggcatgagccgccacccaggccggtgtggttttttacaagtttatctgagggataggggtggggtagatgggtgctttgaacagttgttcctttgggggtcaatttcatttatatggatctatttatcttgtgattttcctgataggcagtaagttttattccttagtagcattttagactaattacaaatacagatgcttgttattgatatgtttatttatatttcctaagagtttaagtatagataatgggtcacatgttttagagtacaaattttagactttaaatggaaccttagcaagtggaatctaaccctcttgtttaagtaactaagataggcccaagttaggttgaaatgacttagctgtcaaacagttacttagtaacagaaaagcagatacttttttaaatttttttttaaatttttatttgttttatttatttatttctttttgagacagagtttcgctcttgttgcccaggctggagtgcagtggcgtgatctctgcctcccgggttcaagtgattcttctgcctcagcctccctagtagctgggattacaggcacctgccaccatgcccagctaattttttgtgtttttagtagagacggggtttcaccttgttggccaggctggtcttgaactcctgacctcgggtgatccacccacctcatcctcccaaagtgctggggttacaggtgtgagccaccgcacctggctgcggatattatttcatattttttggaagctagaaacaatttttctcatcagatggctttatgaataaatcttgtattccactttggtttaatattcagccctttccagctggtaatctgaggcagattttcaatagcatattctcatgtgtaccttgtacaaactttcagtaaatccctgctcttaacagaaaatggcttgaagacttaactgtgtatgtcactttagccctgtgtttaatttttgtgttcttgggactatatcaagtttctgtttgattgtcccagtgcaaactagtctctctctctctctcaagttgttttgagtacctggattgcccatgatgtttcccctatacaaagtgattaaccgttttttgaagttgaacaggaaatgctatcacattttgcatacagccacatattctagattgagcaaggaatgtgaatttgatttaatgacttggaaactgcttgatgaacctccttataggctgctaaatagtaaatgagaaaagagactgttggtgtgatgttttttagcgttaatttttcttgttgactcttgaagtttgtaaatgaaaagcttccccacacttcccaaatttctagtgctttataatggcctcacaaaaagcattttctgtttgctagtccatttttctggattaaatttgaaggtggctttttatttttgtgtatgtgtctgtgagaaaactgtcaaagccaagcagtttgtttcttgtttgtatacggcagttgtaatattgagatataattacagattttgttgcattagtatttatataatatttgacaatgaagttacagaattcttagagcttatagtagaaaatcttgccccttctaatattcttgagaagtgataaaaccaaatctcttcattaatttataacctttctgagggtcatgagctgattttatgggcttatatttaaaagttgacttttcaggtggggcgcagtggctcacgcctgtaatcccagcactttggaagactgaggagggtggatcacctgaggtcaggtgaaatcccatctctcctaaatacaaacacttagccaggcatggtggcgcatgcctgtaatcccagctacttgggaggctgaggcaggagaattacttgaacctgggaggtggaggttgccgtgaaccgagatcgtgccgttgcactgcagcctgggctacaagagtgaaactctgtctcaaaataaataaataaataaaagttgacttttcagatgggttggaaaacaccctatgttattgaccaccttaatttcaaagtagtatgtttcccaggcccaataattcggtttgtgtcactttccaaagggctgcccttgaatttgctcttagaagcctttggaactgaaatactgaaatttgaggggaacatttcttttttgattatgtcaaaacaggcatgatctaaggagatcacagagatcctgtaggagttgtgtaggtccaagactgtaacaaccactgagtaattcacactctggttctaaaacaaaaacaaaaaatatttttattgtcagccctctcctaggggaaaataatactttaaaaaattttattaaatagaggatttggttatgagtcattggacctgagttttaattaaaatagtcacagtgaatgggactataaccaggttctacttttgggggtaatgaatcaaggtaactcagattttagctgtcctattcagtagttcttttggcttcttagtatgtcttaaccttgtttataataaataattccatatgtagttttttgtaatgtacaaggcagattgaaaagttttaggatgaataaaataatggaaccagttctcatttaagacttgaatctacttttagtcttaagtattatttacaattcattagtattctagttttttgcttctgttggatggattttgagactgagctctataaaatcacactcttgataattctatgaaattatcaagtatatagggaagatgctaagccagttttaaatactaacttctatatattctttgcatgttttttccctatagattgttaaactttgtttcctgatttgacttagacatttcttttaaatcttactgaatgattagtggtctgaatgatgtatatgtattttactgtcctacagttgttttttcttgaactttttgagtcttgggactgaactgtttccaaaattaatgccttctggaagttgaaattgtctacgttttacattgtaaatggcacgtaatgttcagtttttagaatatctaaattaaagacattgcctgtgatagcttgagggaatatttgagggcctaatatggtagctggtcattcttgtagctaaaaacttggtgtgataaacaggagtctgacctggccgttgccttttctcatctgcaggtgtgtgtggtttcagcgcagcatggctgtggtcatccgtttgcaaggtctcccaattgtggcggggaccatggacattcgccacttcttctctggattgaccattcctgatgggggcgtgcatattgtagggggtgaactgggtgaggctttcatcgtttttgccactgatgaagatgcaaggcttggtatgatgcgcacaggtggtacaattaaagggtcaaaagtaacactattgttgagtagtaagacggaaatgcagaatatgattgaactgagtcgtaggcgttttgaaactgccaacttagatataccaccagcaaatgccagtagatcaggaccaccacctagctcaggaatgagtagcagggtaaacttgcccacaacagtatccaactttaataatccatcacccagtgtagttactgccaccacttctgttcatgaaagcaacaaaaacatacagacattttccacagccagcgtaggaacagctcctccaaatatgggggcttcctttgggagcccaacgtttagctcaactgttccaagcacagcctctccaatgaacacagtcccgccgccaccaattcctccaattccagcgatgccatctctgccaccaatgccatccattcccccaattccagttcctcctccagtacctacattgcctcctgtgcctcctgtgcccccgattcccccagttccttctgtgccacccatgaccccactgccacccatgtcgggcatgccgcccttgaatccgccacctgtggcacctctacctgctggaatgaatggctctggagcacctatgaatttgaacaataatctgaatcctatgtttcttggtccgttgaatcctgttaaccctatccagatgaactctcagagcagtgtgaagccactccccatcaaccctgatgatctgtatgtcagtgtgcatggaatgcccttttctgcaatggaaaatgatgtcagagatttttttcatgggctccgtgttgatgcagtgcatttgttgaaagatcatgtaggtcgaaataatgggaatggattggttaagtttctctcccctcaagatacatttgaagctttgaaacgaaacagaatgctgatgattcaacgctatgtggaagttagccctgccacagaaagacagtgggtagctgctggaggccatatcacttttaagcaaaatatgggaccttctggacaaactcatccccctcctcagacacttcccaggtcaaaatcgcccagtgggcagaaaagatcaaggtcaagatcaccacatgaggctggtttttgtgtttacttgaaagggctaccatttgaagcagaaaacaaacatgtcattgatttttttaaaaagctggatattgtggaagatagtatttatatagcttatggacccaatgggaaagcaactggcgaaggctttgtagagttcagaaatgaggctgactataaggctgctctgtgtcgtcataaacagtacatgggcaatcgctttattcaagttcatccaattactaagaaaggtatgctagaaaagatagatatgattcgaaaaagactgcagaacttcagctatgaccagagggaaatgatactaaatccagagggggatgtcaactctgccaaagtctgtgcccacataacaaatattccattcagcattacaaagatggatgttcttcagttcctagaaggaatcccagtggatgaaaatgctgtacatgttcttgttgataacaatgggcaaggtctaggacaggcattggttcagtttaaaaatgaagatgatgcacgtaagtctgaacgcttacaccgtaaaaaacttaatgggagagaagcttttgttcatgtagttaccctagaagatatgagagagattgagaaaaatccccctgcccaaggaaaaaagggattaaagatgcctgtgccaggtaatcctgcagttccaggaatgcccaatgcgggactgcccggtgtgggactgcccagtgcaggacttcccggtgcaggcctgcccagcacaggactgcctggttcagcaataaccagtgcaggactgcctggtgcgggaatgcccagtgcaggaatacctagtgcaggaggtgaagagcatgccttcctgactgtaggatcaaaggaagccaataatgggcctccatttaactttcctggtaattttggtggatcaaatgcctttgggccaccaatccctcctccaggattaggaggcggggcctttggtgatgctaggcctggtatgccttcagttggaaacagtggtttgcctggtctaggactggatgttccgggttttggaggtggaccaaacaatttaagtgggccatcgggatttggagggggccctcagaattttggaaatggccctggtagcttaggcggtcccccggggtttggaagtggccctcctggtcttggaagtgcccctgggcatttgggtgggccaccagcttttgggcctggccccggccccggccccggccctggcccaatccatattggtggtccccctggctttgcatctagttctggaaaaccaggaccgacagtaattaaagtgcaaaacatgccctttactgtgtctattgatgagattttagatttcttttatggctatcaagtaatcccaggctcagtgtgtttaaaatacaatgaaaaaggtatgcccacaggtgaagccatggtggcctttgagtctcgggatgaagccacagctgctgtcattgacttaaatgacaggcctataggttcaagaaaagtaaaacttg

SEQ ID NO: 9148 - DNA, 6000 bp, Homo sapiens
cagtttagggtatatcatggagagaatagactttagagtgttatacaacatgtgaatcctggttggttccttccctgcttgatttttgtgcctggttctgccttttactagctatgagacttattaggataagttacccctctaaacctcaacctgattatctgtaaaaatggggatctccacagggtatgttcacagagcaggcatacctagtgggtgctcaattaagtattaattttccttccttgcctatggtcctatgacctgccttcaacatgctgggaaatttaaggcaagaggagaattcaaatacctaggacttaatataagaaattctggccaggcatggtggctcacacctgtaatcccagcactttgggaggccgaggcaggcggatcacctgaggtcgggagtttgagaccagcctgaccaacatggtgaaaccgtgtctctactaaaaatacaaaaattagccgggcgtagtggcaggcacctgtaatcccagctattcgggaagctgaggcaggagaatcacttgaacctgggagacggaggttgcagtgagccaagatcatgccattgcactccagcctaggtgacagagcaagactctgtctaaaagataaaaattaaaaaaaaaaaattctgggtaggccaggtacggcgtctcacgcctctaatcccaacaccttgggaggccaaaacaggcagattggagcagcctgggcaacatggcaaaaccccttctgtacaaaaaatacaaaaattagctggatgtagcacgtgcctgtagtcccagctactcaggaaggctgaggtaggaagatcacttgagcccaggaggttgaggctgcagtgagctgtgattgtgccactgcactccagcattggtgacacagtgagaccctatctcaaaaaaaaaaaaaattctgatcaagtcttcaaaacaacataaaagcagccttaactctccaagcaggggcccctacctcagataatttccattgtatctacctgacaaaacctatctcctgtcttagtggtatctggagaaactttagggtctggaagtccctgatgaaggactggaatttgtcagaatggctcaaccaccagctctatccccatccctgccataggccctcctcccaaccctgtctgcccaagaaccatacggagaaaccaccctacatatctggtgctatttcatccatctacaagcaggagccaggaggctggccccttttagatctcactaggggcatcttcccagaggctgtgtgggcatgtgcctgctcccaccgcgccccctccacagcaccctctggctccggatgggccatcatgaaagcttgagcggcccagatcaggtcctcttcccgaactcctgggacgggcacggtggggatgccagcgatcatcatggcgagggtgaggatgcagatatcaggctgggagctggcctccttccccactgcctcagagggtaccggtagaacccgtggtgacagcccacacagcatcaggggcctaggcctgctggggccacccaggtcaggggctctgcttctggagtagccattgtcccagcccaagctctccagctgcctcacatgcgggaatttgtggcagtttcggctgtattccttccgtagtgtctcccagctagtccccccagggcagcccctggcttgtggcattgccagggctgggccccaggcctgggcagcaggtgccacctgctcagctttctggctcagtgggcctgttccaccagaggccaccaccactggctctacaggactacagaggccaagggacaagcctggagaagcagccccacctgcagagacaggaatgaaatggaacgttattctcagttctttgaggagggggccctgaggggcagggcatgggagcagagcttgggggcgtaactaagaccagccccagcggactgtctagaggttgggaactaggtgttactcatatccacactcccagtccccaacacggagtaggtgatggagaagcgtttgttgaattaatgaatagtgagcaagcgggtagttattgattggcaaggatgtttggaatggcttttcttctaaaagaattgattctagggccagcccccaaatgcccagcagaaccgccacctccccagagccagaaagcaacttctcaggggaagctgccgcactccctccaattgcaggtgccccccgctcaccttggccggaaggcagaggacctggatgagtttgtggagtcctgaagtaggacatggcttccccaaagccccggtttgtgagggaatagtgatctgccgcctgtcctcccttcttcacccttctagaatgtcacctcatagaccctccccttcacacttggaatccactttacagcgttgacctattcattctagaacctggacatgacaataggatgaggttaaaagagcaccagaccaggagctgggtgttctaggttcttgccctaaccttgaacgagtcacccagatagttttgttccttgatatccttatctgtaaagtgtgtctgatgactgcccactacctcattaggagttttgaggatgaaatgagatcatttgtatggaagcagatgaccagagatggaaacacaggagccaagtgcttcgtgccttgtagagtaagacttcgggtcagacccagtattggtatttttctttttctttttttgagacagagtctcactttgtcgccatgactggaaggctggagtgcaggagcaagacctcagctcactgcaacctctgcctcctgggttcatgcaattctcctgcctcagcctcccgagtagctgggactacaggaacctgccaccacacctggctaacttttgtatttttagtagagacagggtttcaccatgttggccaggctggtctcaaactcctgacctcaagtgatctgcccacctcggcctcccaaagtgctgggattacaggccaggtattggtatttttcaaaattcctcaagtgattataatatatgacaaagttggaaccttttttctagggacatacttctcaaccctggctgtacatgagaatctcttgagaagcttttacaaaacacaatgtctaggcctaatttcccaacaaatcaaatacgaatccctagggatgggatgtgggacaccagcactctttacatatcctaagatgactctaacaagcagccagcctagggacccctgctcttttgctccgacctgctgacctgcagtgattctaaacgaagtgactctcataggctgtaggggcaaggagaccttccagtgatcaagatgtcagcatcggctgtttatttctggtcttggctggcagcaatgtggccaacttcggaccagccagccacaggtctggggctccaggatgcagctgtgctctggtgcactgtgggtcttcactcatacttgcagaaatccttaagttctttgggcaggtggagcccatcaatggccagccggtgcaccatgctcctttgtatcactaggcggcacagagtctgcagggatggcactgtgggaagaagactgtgaaaggcaaactgaactggagggtgggtctgaggccaagatccagaaggtctaggtcatggtccccactttgtcattaaatgtgggcaagtccttactgctctctgggcccagcctgcttcatggggctgagagaagcacctcttcctgagagctgccacaaagctgcagccctgtttatatcataacacttagcacaatcccttccccattcacttagcagcttctgggggcaggggtagtgtctgatttgcctgtgcaactgaagcctccagcacaggcctggcacaaagagggttctggtgcattgagttcatgaaatgtgatgagaggtataactgcaatgcttaccagggctataatgaatcatactcagcattaagaagctctcagtctggggtttgttatgcctcgaagccaatagccaatatgcccaagtctatgagcatgtttctttcttttctttctttttttttttttatttaaagagagagggtcttgctctgtcacccaggctgaagtgcagtgctcagtgaactgcagccttcaattcttgggctcaagcgatcctcctgccttagcctcccaaatagctgggactacaggcatgcaccaccatgcccagataattatttaattttttgtacagatggggtctcactttgttgcccaggcttgagctagctagcttgcttgcttgcttgctttctctctcttcctctctctctctctttcttttttttttcagagtcttgctctgttgcctaggctggagtgcactggtgagatctcggctcattgcaacctccacctctcgggttcaagtgactctcctgcctcagccttctgaatagctgggattattggcacatgccaccacacccagctactttttgtatttttagtagagacaggctttcaccatgttggccaggctggtctcgaactcctggcctcaagtgatctgcctgcctccccctcccaaagtgctgggattacaggtgtgagccactgtgcccggccaagcatgtttctaagaaaagggcaaacaattctcaaagaggcccctaatatctaaaattggtttagaatccctgccctaggtgaatacaggaaacactatcaaaactaaaagggaacttgtagggcatcttaatcaatcaaccaagataggtaccaaggcccaaaaccatgtagaggcttgtgcaagatcacaagcagaggtgcaatttgaagctagattctcccactcttaaactagtgccggacagacgaaggcctagcacatgggctacggagccctagtagattccagtccccacactgagccaggaggggtcgctgcccagggatacctacagccatactcgagctggacaaggcgcacgctctttgtggaagcaaacacgtccaccaccgcgtagaggggctgcgcagctggcagtccccgggcgctcgggcccatgtcctcgccgttgatgatgatgtgcatgtcggccgtgccatcggggcgcgggcaaaagaggacacccaggcggctacggcgcgcggtcggaggcagcacgttcagctcatagagctggtccaagagatggctgtagagccctggccggctgcggcccaccaggcggtcccggggaatgcgaaactgctcaatgcgcagatatggttccacgaggagggttggaggtcggctgggggccgctgcctccgcctccgggcggccctcccggggcacgcggttgtggtggcgcgtgatggcgaagacccaggtgtggcccaggttgaccagatcgggcagagaaaactcgggaacgggggccagactggcggggtccagcgcggtcagaccgagacgcagatgtccgcaccagcccagctctttctcctcgatctcgaccaggaagacctggcccggggccagcggctcgcggctgaagcacacgccgtgggcgaagctctccacgcgtgtggcccgcgtcccagaggggtccacgcggatgttggcaccgtgcacccgatggaagcgggtgggagggggctccgggcgctcgagtccccagagtgcacccgaatccacgggctcggaggcagcagccatctctcggccatagggcaggccagctggcgccgggggctattttgggcggcgggcaatgatggtgaccgcaaggcgaccttgtaaggcatttcccccctgactcccttccccgagcctctgcccgggggtcctagcgccgctttctcagccatcccgcctacaacttagccgtccacaacaggatcatctgatcgcgtgcgcccgggctacgatctgcgaggcccgcggaccttgacccggcattgaccgccaccgccccccaggtccgtagggaccaaagaaggggcgggaggaagactgtcacgtggcg

SEQ ID NO: 9149 - DNA, 6000 bp, Homo sapiens
ttagttgtattttggtcttggaagatactaatttaagatgagcatcatttggaaaagtagtcgtaggtaatcttaatactgaacagtggcaaatttcttctctctccgaattaaaacatgacctttgaaaaaaaataaaaagcaaaaaatgacctttgaatatagttgtctagacatttggtcatatatgcttgtgacttgttaataacctcaccagtttggaagaaatgacagtgaaagatgagtgacctgtttttattttgggatatactcttaatatgtcaggcatttttagggtgtttttaaattttattttattttatttatttaaattttacaagtttttgagaactgttgtgatgtcagaggaaaaaacactttcccttaatattttgttaatattttgagctccagtggaattagtccttatagcaagaactcatacttcatttgttttgtgatgttggatgctattttgtgcaaaataaaatatattgaaagaataattgcagtaatttccatgagtacccttgaattgctatcttaagttgtccaagaattgttattgtgcgaacttgtgccttttcatcacaaatttggtgagaacctggggaaatagacttgtgttacggagttttctggactggtttaattataaagtgatcaaagcaattagctgtgaagctgagctttatgactgttttaattttcagtggattcgttattgggctaagttaatgacactcttgtaaatatataattattttgagatactcaaatttgaaagcaataccaactaaaaagcatgtgtgggattttgttacggtgtctttctttttttttttttttttgatatgcattctaatgaagtactctggtggtttcagactcgccttcgtaatgtacagtgtggcctgtgcgtgttgttttgtgtttcctgcattgatttttgcctccgtttattctctattgcagtctaaaagttggttttaattggttgcccacaggattgacttggcctctacttcttgttaaggaaattcatctcttgttttatcaggtaagagattttgaatagagagttcgtttttatacaaaataaaatgagatagcttattaagaaatatgaaaatatatgtagcaactatattgtgtgtgtgtgtgtgtgtgtgtgtgtgtgtgtgtgtttttgtttgcttgttttttgttttgagacggagtcttgctcagttgcccaggctagactctgttgcccaggctggagtgcagtggtgccatctcggctcactgcaacctccgcctcccgggttcaagcacttctctgcctcagcctcccgaatagctgggattacaggcgcctgccaccatacccggctaatttttttgtatttttagtagagatggggttttatcctcttggccaggctggtcttgaactcctgaccttgtgatccacctgccttagcctcccaaagtgctgggattacaggcatgagccgccacccaggccggtgtggttttttacaagtttatctgagggataggggtggggtagatgggtgctttgaacagttgttcctttgggggtcaatttcatttatatggatctatttatcttgtgattttcctgataggcagtaagttttattccttagtagcattttagactaattacaaatacagatgcttgttattgatatgtttatttatatttcctaagagtttaagtatagataatgggtcacatgttttagagtacaaattttagactttaaatggaaccttagcaagtggaatctaaccctcttgtttaagtaactaagataggcccaagttaggttgaaatgacttagctgtcaaacagttacttagtaacagaaaagcagatacttttttaaatttttttttaaatttttatttgttttatttatttatttctttttgagacagagtttcgctcttgttgcccaggctggagtgcagtggcgtgatctctgcctcccgggttcaagtgattcttctgcctcagcctccctagtagctgggattacaggcacctgccaccatgcccagctaattttttgtgtttttagtagagacggggtttcaccttgttggccaggctggtcttgaactcctgacctcgggtgatccacccacctcatcctcccaaagtgctggggttacaggtgtgagccaccgcacctggctgcggatattatttcatattttttggaagctagaaacaatttttctcatcagatggctttatgaataaatcttgtattccactttggtttaatattcagccctttccagctggtaatctgaggcagattttcaatagcatattctcatgtgtaccttgtacaaactttcagtaaatccctgctcttaacagaaaatggcttgaagacttaactgtgtatgtcactttagccctgtgtttaatttttgtgttcttgggactatatcaagtttctgtttgattgtcccagtgcaaactagtctctctctctctctcaagttgttttgagtacctggattgcccatgatgtttcccctatacaaagtgattaaccgttttttgaagttgaacaggaaatgctatcacattttgcatacagccacatattctagattgagcaaggaatgtgaatttgatttaatgacttggaaactgcttgatgaacctccttataggctgctaaatagtaaatgagaaaagagactgttggtgtgatgttttttagcgttaatttttcttgttgactcttgaagtttgtaaatgaaaagcttccccacacttcccaaatttctagtgctttataatggcctcacaaaaagcattttctgtttgctagtccatttttctggattaaatttgaaggtggctttttatttttgtgtatgtgtctgtgagaaaactgtcaaagccaagcagtttgtttcttgtttgtatacggcagttgtaatattgagatataattacagattttgttgcattagtatttatataatatttgacaatgaagttacagaattcttagagcttatagtagaaaatcttgccccttctaatattcttgagaagtgataaaaccaaatctcttcattaatttataacctttctgagggtcatgagctgattttatgggcttatatttaaaagttgacttttcaggtggggcgcagtggctcacgcctgtaatcccagcactttggaagactgaggagggtggatcacctgaggtcaggtgaaatcccatctctcctaaatacaaacacttagccaggcatggtggcgcatgcctgtaatcccagctacttgggaggctgaggcaggagaattacttgaacctgggaggtggaggttgccgtgaaccgagatcgtgccgttgcactgcagcctgggctacaagagtgaaactctgtctcaaaataaataaataaataaaagttgacttttcagatgggttggaaaacaccctatgttattgaccaccttaatttcaaagtagtatgtttcccaggcccaataattcggtttgtgtcactttccaaagggctgcccttgaatttgctcttagaagcctttggaactgaaatactgaaatttgaggggaacatttcttttttgattatgtcaaaacaggcatgatctaaggagatcacagagatcctgtaggagttgtgtaggtccaagactgtaacaaccactgagtaattcacactctggttctaaaacaaaaacaaaaaatatttttattgtcagccctctcctaggggaaaataatactttaaaaaattttattaaatagaggatttggttatgagtcattggacctgagttttaattaaaatagtcacagtgaatgggactataaccaggttctacttttgggggtaatgaatcaaggtaactcagattttagctgtcctattcagtagttcttttggcttcttagtatgtcttaaccttgtttataataaataattccatatgtagttttttgtaatgtacaaggcagattgaaaagttttaggatgaataaaataatggaaccagttctcatttaagacttgaatctacttttagtcttaagtattatttacaattcattagtattctagttttttgcttctgttggatggattttgagactgagctctataaaatcacactcttgataattctatgaaattatcaagtatatagggaagatgctaagccagttttaaatactaacttctatatattctttgcatgttttttccctatagattgttaaactttgtttcctgatttgacttagacatttcttttaaatcttactgaatgattagtggtctgaatgatgtatatgtattttactgtcctacagttgttttttcttgaactttttgagtcttgggactgaactgtttccaaaattaatgccttctggaagttgaaattgtctacgttttacattgtaaatggcacgtaatgttcagtttttagaatatctaaattaaagacattgcctgtgatagcttgagggaatatttgagggcctaatatggtagctggtcattcttgtagctaaaaacttggtgtgataaacaggagtctgacctggccgttgccttttctcatctgcaggtgtgtgtggtttcagcgcagcatggctgtggtcatccgtttgcaaggtctcccaattgtggcggggaccatggacattcgccacttcttctctggattgaccattcctgatgggggcgtgcatattgtagggggtgaactgggtgaggctttcatcgtttttgccactgatgaagatgcaaggcttggtatgatgcgcacaggtggtacaattaaagggtcaaaagtaacactattgttgagtagtaagacggaaatgcagaatatgattgaactgagtcgtaggcgttttgaaactgccaacttagatataccaccagcaaatgccagtagatcaggaccaccacctagctcaggaatgagtagcagggtaaacttgcccacaacagtatccaactttaataatccatcacccagtgtagttactgccaccacttctgttcatgaaagcaacaaaaacatacagacattttccacagccagcgtaggaacagctcctccaaatatgggggcttcctttgggagcccaacgtttagctcaactgttccaagcacagcctctccaatgaacacagtcccgccgccaccaattcctccaattccagcgatgccatctctgccaccaatgccatccattcccccaattccagttcctcctccagtacctacattgcctcctgtgcctcctgtgcccccgattcccccagttccttctgtgccacccatgaccccactgccacccatgtcgggcatgccgcccttgaatccgccacctgtggcacctctacctgctggaatgaatggctctggagcacctatgaatttgaacaataatctgaatcctatgtttcttggtccgttgaatcctgttaaccctatccagatgaactctcagagcagtgtgaagccactccccatcaaccctgatgatctgtatgtcagtgtgcatggaatgcccttttctgcaatggaaaatgatgtcagagatttttttcatgggctccgtgttgatgcagtgcatttgttgaaagatcatgtaggtcgaaataatgggaatggattggttaagtttctctcccctcaagatacatttgaagctttgaaacgaaacagaatgctgatgattcaacgctatgtggaagttagccctgccacagaaagacagtgggtagctgctggaggccatatcacttttaagcaaaatatgggaccttctggacaaactcatccccctcctcagacacttcccaggtcaaaatcgcccagtgggcagaaaagatcaaggtcaagatcaccacatgaggctggtttttgtgtttacttgaaagggctaccatttgaagcagaaaacaaac

SEQ ID NO: 9150 - DNA, 6000 bp, Homo sapiens
tccccgagcccgggatcggtgcgcggcagaggaggctcgcgggtgggagctggcgctggggccggggcttccctcgcggaggcgccgccagcaactccccgggggctgctgcacggaagcgctgaggagcgagtcaacagcccctctgctgcctcccgtagatgatccgagccgcgccgccgccgctgttcctgctgctgctgctgctgctgctgctagtgtcctgggcgtcccgaggcgaggcagcccccgaccaggacgagatccagcgcctccccgggctggccaagcagccgtctttccgccagtactccggctacctcaaaggctccggctccaagcacctccactactggtctgccgccctgccttctgggcgggattgggagaagagatgacggatgagggatggggggtagttctgcagacccctgaggatgcctgggagccgggagggctggaaagggcccctccaactgcgccaaccctgccctgacccccctcccaggtttgtggagtcccagaaggatcccgagaacagccctgtggtgctttggctcaatgggggtcccggctgcagctcactagatgggctcctcacagagcatggccccttcctggtgagtggacagcagggggaaagcacagttcccaaagtaaaaggctggggaaagcgagagaggggctttgtgattttccaaaaagtttccttccttctaagcctcgggattttcctctatgccattggctttgctgcctgtacctctcagaggttttacccacatgtaaagtgcctctcatggtggccctttccctccacccagctggcccttgggacttactcagccatctctttcctcctcaggtccagccagatggtgtcaccctggagtacaacccctattcttggaatctggtatagctggagctgtgggtgtgtctgggcacttggatggggtggcatttagctaatttttccctcccctctagattgccaatgtgttatacctggagtccccagctggggtgggcttctcctactccgatgacaagttttatgcaactaatgacactgaggtgagtctggtgcctgcccatctgccccaggctccccggtcctccatccatggcatgatgctgggagagagagcatggccttggagtctacttttcgctctgtcatatgctattgtggtatggtggccagtcacttcctcttgcacaaatagggtgggttaatgtcattatctctgaagttctttccagttcaaataccaaagcttcctgattccctctgtcttgctctgccatccccaggtcgcccagagcaattttgaggcccttcaagatttcttccgcctctttccggagtacaagaacaacaaacttttcctgaccggggagagctatgctggcatctacatccccaccctggccgtgctggtcatgcaggatcccagcatgaaccttcaggtgcagggtagctgcaggagggaagggaggtagcttgaggctgtggccttacagttagcaaggtcagactgactggtcaatgtccccatccaacccagcttcctgcataacctccccaccaccggctgccctaggtctgtctgtgtgcctcccacacaggaaactcacctgtcaggctgccagctctgtgttttgcattgagtggcctctcatacccaccggcctacataaaccaccctgggtttcagcttccggattgctgaaggtctgggtggtagggtgagggaggctcttcctttttgccctccacatgagctgagcaccctgggtgtttcacaggggctggctgtgggcaatggactctcctcctatgagcagaatgacaactccctggtctactttgcctactaccatggccttctggggaacaggtatgggatagggcagttgggcaatctctggggtgaggcaggtcacatgatctcaggtctgtcctccaggcacatgatatgacaggcccagcccaggtttatgagcagcaggtgggttgcagaaagaacctagtgctgaaaggccaaagaatagagatcagtttttctttctttcttttttttttttttgagacagattcttactttgtcacccaggctggagtgcagtggcacgatcttagctcactgcaacctccacctcccaggttcaagcaattctcatgcctcagactcccaggcagctgggactacaggcgcgtaccaccacacctgcctaattttttgtatttttagtagagatggggttttgctgtgttggccaggctggacttgaactcctggcctcaaatgatcttcccaaagtgctgggattacaggcatgagctacagcgcccagccagaaatcagattttaaaggaactaaggaggcctgtctgtatgaccctggggcacctctttgggagctagcttagatgacatacagaccacaccctgtgatatctttcccagtctcctagggtcagggaggttggtgggaggtggggggtatgctcgcctcctctgccttcctcttcccaccagcagctgatgcgcttttcactctcatctcctacaggctttggtcttctctccagacccactgctgctctcaaaacaagtgtaacttctatgacaacaaagacctggaatgcgtgaccaatgtgaggttctgccatcactttgcatgagctctcccatccctaatcctgagaacaggaccacattccctccttggggactccttgttctccgtccctcattgctttcttgcacctttaagcaatttagtgttctctgggacatgtgtctaagtgtgtattcccaccaccacctcctatggtggcaaatcccataacctccgtgaggagaaaggacttcttcacatttatcaaacacctgcaacgtggcaggcactgtgctgaactgtgtctatgtagattatttaagcttcaagattccccctcaaatgagatcatactacccacattttccagataaggaaactgagggctatgaattttgaaatcactgtctgaagtcacagtgttgggaggcagtgatgctaggatttggacccaggtctgggaagattcctgccactgagcctcagtttccctacctgtgaaaaaaagtgggtgaagaggtgaaatccaagagcagtaaatcttgggacaacttggtggggtcgtggagaggctggggatctgtaaagcatggtggcttggtgtatcattgcagcttcaggaagtggcccgcatcgtgggcaactctggcctcaacatctacaatctctatgccccgtgtgctggaggggtgcccagccattttaggtaggtgctgctgggtgcccctggagccaaccccagccccatctggaggctccacacccattcccccacctcacattgcaggtatgagaaggacactgttgtggtccaggatttgggcaacatcttcactcgcctgccactcaagcggatgtggcatcaggtgtgcgagggcgtgggcttcctcctggtgaggtgggggcagggggaggggcagggaagcagaggccctgacccactgtctgtgccttccaggcactgctgcgctcaggggataaagtgcgcatggaccccccctgcaccaacacaacagctgcttccacctacctcaacaacccgtacgtgcggaaggccctcaacatcccggagcagctgccacaatgggacatgtgcaagtgaggttccgtggccacctgtgacttggggtggtgggttgctggggcttgtgggcatcggcaggtttctcagggatcttctgtgtagagtttctcaatgagatgagctgtagaggatgtttaacatccatccctgacccctcagtggattgagagtcagccaattcattcttttatcttttttaaatttaaaatttttttgtttgagacaaggtctcactctgtcacctaggctggagtgcagtggtgtgatcatagctcactgcagcctcaaactcatgggctcaagcaatcctcccacctccccagtagctgggactacagacgcaccaccacccccaacaagtttttgtattttttgtacagatggtgttttaccacattgctcaggctggttttgaactctggggctcaagtgatctgcccatttcagcctcccaaagtactgggattacaggcatgagccaccccgcccagccccatttcattacgtagccacattggttgttgtttcacagttcactacagcctcaacctcctaggctcaagcgatcctcccaccttagtctactgagtagctgggtctacaggcacatgccaccattcctggctaatttttaaaaaatttttttgtagagacagggtctcactatgttgtccaggttggtctcaaactcttggtctcaagcaatcctccctccttggcctcccaaagtgctgggattacaggcgagggtccccacacccggccatcacattggttaataactattacttccgactgggcgcagtggttcacgcctgtaatcctagcacttttggaggctgaggtgggggaatcacctgaggtcaggagttcgagaccagcctggccaacatgaagaaaccccatctctactaaaaatacaacaattagccaggtgtgctgttgggcacctgtaatcccagctattcaggaggctgagggaggagaatcgcttgaacccaggaggcagaggttgcagtgagctgagatcatgctactgcactccagcctgggcaacaaaagtgaaactccatctcaaacaacaataacaaactgttaacttccatgtccagtctcctgtggccacccccccccacaaccccaagtaaaagggtaacactgggcccagcagggctgctcaggtccattttgattggtcagtgctcacactctaccctgttgtatgttgtgactcccacacctgctggcccctagacactaaatgccagatgcatcccagtcctcgtaacaaccaaaatgcgtcccttgtacatttctttttctttttttttttgagatggagtcttgctgtcactcaggctggagtgcagtgctgcgatcttggctcactgcaacctccgcctcccgggttcaagtgattctcctgcctcagccttctgagtagctgggactacaggcacgcaccaccacgcctggctaatttttgtatttttttttttagtagagacggggtttcaccatgttggtcaggctggtctcgaactcctgacctcgtgatccactcacctcggtctcccaaagtgctaggattacaggcgtgagccaccacgcccagcatccctgtacctttctaaatggtggtgagttgaggctgtctgaatcccagcccatccagcccaacatccaagtcagtcctagagaggtggcccccccccaaaaaggggagtggaacccagctgtctgccttctgggttggagcttggagataggagagaaggtctgatctgttgactacttttcgccccgacctggtcttcctggggcctgctcgtatgttcccggcagctttctggtaaacttacagtaccgccgtctctaccgaagcatgaactcccagtatctgaagctgcttagctcacaggtgagtggggagagcacagctggatcaccagcagccttaggaccccagagtagcacagcaagctgggggcccttgagacttcctgtcaggacaagggaagctgaaactccgaaaggcgaagcccagggtcctgtgattggtggggtcagaatttgaacctgggtttgtccccacccatgctgtcctgctataggaggcctaggggtctgcatcagccacggagtcttaagggtgagaagagcttcattcatgccaaaaatgggccagcagaggtccagggtgggaggagaccttgcacaaggtgatataggaagcactggcagggccaagttaggactaggttctgtccagcacagtggttaatagc

SEQ ID NO: 9151 - DNA, 6000 bp, Homo sapiens
tccccagagccagaaagcaacttctcaggggaagctgccgcactccctccaattgcaggtgccccccgctcaccttggccggaaggcagaggacctggatgagtttgtggagtcctgaagtaggacatggcttccccaaagccccggtttgtgagggaatagtgatctgccgcctgtcctcccttcttcacccttctagaatgtcacctcatagaccctccccttcacacttggaatccactttacagcgttgacctattcattctagaacctggacatgacaataggatgaggttaaaagagcaccagaccaggagctgggtgttctaggttcttgccctaaccttgaacgagtcacccagatagttttgttccttgatatccttatctgtaaagtgtgtctgatgactgcccactacctcattaggagttttgaggatgaaatgagatcatttgtatggaagcagatgaccagagatggaaacacaggagccaagtgcttcgtgccttgtagagtaagacttcgggtcagacccagtattggtatttttctttttctttttttgagacagagtctcactttgtcgccatgactggaaggctggagtgcaggagcaagacctcagctcactgcaacctctgcctcctgggttcatgcaattctcctgcctcagcctcccgagtagctgggactacaggaacctgccaccacacctggctaacttttgtatttttagtagagacagggtttcaccatgttggccaggctggtctcaaactcctgacctcaagtgatctgcccacctcggcctcccaaagtgctgggattacaggccaggtattggtatttttcaaaattcctcaagtgattataatatatgacaaagttggaaccttttttctagggacatacttctcaaccctggctgtacatgagaatctcttgagaagcttttacaaaacacaatgtctaggcctaatttcccaacaaatcaaatacgaatccctagggatgggatgtgggacaccagcactctttacatatcctaagatgactctaacaagcagccagcctagggacccctgctcttttgctccgacctgctgacctgcagtgattctaaacgaagtgactctcataggctgtaggggcaaggagaccttccagtgatcaagatgtcagcatcggctgtttatttctggtcttggctggcagcaatgtggccaacttcggaccagccagccacaggtctggggctccaggatgcagctgtgctctggtgcactgtgggtcttcactcatacttgcagaaatccttaagttctttgggcaggtggagcccatcaatggccagccggtgcaccatgctcctttgtatcactaggcggcacagagtctgcagggatggcactgtgggaagaagactgtgaaaggcaaactgaactggagggtgggtctgaggccaagatccagaaggtctaggtcatggtccccactttgtcattaaatgtgggcaagtccttactgctctctgggcccagcctgcttcatggggctgagagaagcacctcttcctgagagctgccacaaagctgcagccctgtttatatcataacacttagcacaatcccttccccattcacttagcagcttctgggggcaggggtagtgtctgatttgcctgtgcaactgaagcctccagcacaggcctggcacaaagagggttctggtgcattgagttcatgaaatgtgatgagaggtataactgcaatgcttaccagggctataatgaatcatactcagcattaagaagctctcagtctggggtttgttatgcctcgaagccaatagccaatatgcccaagtctatgagcatgtttctttcttttctttctttttttttttttatttaaagagagagggtcttgctctgtcacccaggctgaagtgcagtgctcagtgaactgcagccttcaattcttgggctcaagcgatcctcctgccttagcctcccaaatagctgggactacaggcatgcaccaccatgcccagataattatttaattttttgtacagatggggtctcactttgttgcccaggcttgagctagctagcttgcttgcttgcttgctttctctctcttcctctctctctctctttcttttttttttcagagtcttgctctgttgcctaggctggagtgcactggtgagatctcggctcattgcaacctccacctctcgggttcaagtgactctcctgcctcagccttctgaatagctgggattattggcacatgccaccacacccagctactttttgtatttttagtagagacaggctttcaccatgttggccaggctggtctcgaactcctggcctcaagtgatctgcctgcctccccctcccaaagtgctgggattacaggtgtgagccactgtgcccggccaagcatgtttctaagaaaagggcaaacaattctcaaagaggcccctaatatctaaaattggtttagaatccctgccctaggtgaatacaggaaacactatcaaaactaaaagggaacttgtagggcatcttaatcaatcaaccaagataggtaccaaggcccaaaaccatgtagaggcttgtgcaagatcacaagcagaggtgcaatttgaagctagattctcccactcttaaactagtgccggacagacgaaggcctagcacatgggctacggagccctagtagattccagtccccacactgagccaggaggggtcgctgcccagggatacctacagccatactcgagctggacaaggcgcacgctctttgtggaagcaaacacgtccaccaccgcgtagaggggctgcgcagctggcagtccccgggcgctcgggcccatgtcctcgccgttgatgatgatgtgcatgtcggccgtgccatcggggcgcgggcaaaagaggacacccaggcggctacggcgcgcggtcggaggcagcacgttcagctcatagagctggtccaagagatggctgtagagccctggccggctgcggcccaccaggcggtcccggggaatgcgaaactgctcaatgcgcagatatggttccacgaggagggttggaggtcggctgggggccgctgcctccgcctccgggcggccctcccggggcacgcggttgtggtggcgcgtgatggcgaagacccaggtgtggcccaggttgaccagatcgggcagagaaaactcgggaacgggggccagactggcggggtccagcgcggtcagaccgagacgcagatgtccgcaccagcccagctctttctcctcgatctcgaccaggaagacctggcccggggccagcggctcgcggctgaagcacacgccgtgggcgaagctctccacgcgtgtggcccgcgtcccagaggggtccacgcggatgttggcaccgtgcacccgatggaagcgggtgggagggggctccgggcgctcgagtccccagagtgcacccgaatccacgggctcggaggcagcagccatctctcggccatagggcaggccagctggcgccgggggctattttgggcggcgggcaatgatggtgaccgcaaggcgaccttgtaaggcatttcccccctgactcccttccccgagcctctgcccgggggtcctagcgccgctttctcagccatcccgcctacaacttagccgtccacaacaggatcatctgatcgcgtgcgcccgggctacgatctgcgaggcccgcggaccttgacccggcattgaccgccaccgccccccaggtccgtagggaccaaagaaggggcgggaggaagactgtcacgtggcgccggagttcacgtgactcgtacacatgacttccagtccccgggcgcctcctggagagcaaggacgcgggggagcagaggtgagctggcaccggaggctggaggggatccccgagcccgggatcggtgcgcggcagaggaggctcgcgggtgggagctggcgctggggccggggcttccctcgcggaggcgccgccagcaactccccgggggctgctgcacggaagcgctgaggagcgagtcaacagcccctctgctgcctcccgtagatgatccgagccgcgccgccgccgctgttcctgctgctgctgctgctgctgctgctagtgtcctgggcgtcccgaggcgaggcagcccccgaccaggacgagatccagcgcctccccgggctggccaagcagccgtctttccgccagtactccggctacctcaaaggctccggctccaagcacctccactactggtctgccgccctgccttctgggcgggattgggagaagagatgacggatgagggatggggggtagttctgcagacccctgaggatgcctgggagccgggagggctggaaagggcccctccaactgcgccaaccctgccctgacccccctcccaggtttgtggagtcccagaaggatcccgagaacagccctgtggtgctttggctcaatgggggtcccggctgcagctcactagatgggctcctcacagagcatggccccttcctggtgagtggacagcagggggaaagcacagttcccaaagtaaaaggctggggaaagcgagagaggggctttgtgattttccaaaaagtttccttccttctaagcctcgggattttcctctatgccattggctttgctgcctgtacctctcagaggttttacccacatgtaaagtgcctctcatggtggccctttccctccacccagctggcccttgggacttactcagccatctctttcctcctcaggtccagccagatggtgtcaccctggagtacaacccctattcttggaatctggtatagctggagctgtgggtgtgtctgggcacttggatggggtggcatttagctaatttttccctcccctctagattgccaatgtgttatacctggagtccccagctggggtgggcttctcctactccgatgacaagttttatgcaactaatgacactgaggtgagtctggtgcctgcccatctgccccaggctccccggtcctccatccatggcatgatgctgggagagagagcatggccttggagtctacttttcgctctgtcatatgctattgtggtatggtggccagtcacttcctcttgcacaaatagggtgggttaatgtcattatctctgaagttctttccagttcaaataccaaagcttcctgattccctctgtcttgctctgccatccccaggtcgcccagagcaattttgaggcccttcaagatttcttccgcctctttccggagtacaagaacaacaaacttttcctgaccggggagagctatgctggcatctacatccccaccctggccgtgctggtcatgcaggatcccagcatgaaccttcaggtgcagggtagctgcaggagggaagggaggtagcttgaggctgtggccttacagttagcaaggtcagactgactggtcaatgtccccatccaacccagcttcctgcataacctccccaccaccggctgccctaggtctgtctgtgtgcctcccacacaggaaactcacctgtcaggctgccagctctgtgttttgcattgagtggcctctcatacccaccggcctacataaaccaccctgggtttcagcttccggattgctgaaggtctgggtggtagggtgagggaggctcttcctttttgccctccacatgagctgagcaccctgggtgtttcacaggggctggctgtgggcaatggactctcctcctatgagcagaatgacaactccctggtctactttgcctactaccatggccttctggggaacaggtatgggatagggcagttgggcaatctctggggtgaggcaggtcacatgatctcaggtctgtcctccaggcacatgatatgacaggcccagcccaggtttatgagcagcaggtgggttgcagaaagaacctagtgctgaaaggccaaagaa

SEQ ID NO: 9152 - DNA, 6000 bp, Homo sapiens; identical to SEQ ID NO: 3703

SEQ ID NO: 9153 - DNA, 6000 bp, Homo sapiens
cctccaggactgagtgtaatctgctggacatggcacactagggctatagctgtctccaaccagtcccagcttcctctctaccacaccatatctgttccctacccctgcacagagtgattcccagttccttagcctcggcacagacaggtgcctcagtaattcaaggcctacctcaaaggtcacctctcctttaatgccttcctggcagagctcctcacagttcttggtagaggcctttatattatggtatgtaacacacagggttataatcatatgcctctacatctgtcttttccaagagttcatcaatggcacaaaccatgtctcaataaacttttgaatccttggtgcctagcactgggcaaatggggaggtataataatacttattgcaaatattaataaatgtgcctcattccaagaagctacccagagcaaagctggtagccaagatctctaaactccaactgaatcctgtgcatctgtgtacacacacacacaagagtctggagagaagctggaggtgttgtgggtcccaggactgggtgtgctcagctcctccagttatctgtgaagcaggcccttttcctaggttcacaggaaacagaggatcccagctgggcgggggggcctggaaacccacacatcggggcaagcctggggtgctgaggaaacactaaaaggtctgacttcccttggaaaaaactacatcagacaggaaatacacaggcagggatggctagctctggagatccggacatgtgctcctgcccctctcccactgggagtaacagccagtacaaagaaaacccttgatgacaccggcctgggccttgccctctcccgtgctgtgggcctagccctcggagcaggcctcctggtgtggtctgctccccagccacaggggtcaagccccagccagctggttccactactacctcccttctgagcccgcctgcctcatcaaggcagttagctgttttcttccgccaccctcaccctcttcatcaaaggtactgctcacaattgtcattgcctgttttcatttccctaaaagcaagcacccatactccttcacctcagagggcctggcatctagaaaagtatctagtgaaggatcagccaaagacagaagcctggggcctcagaagtccccatggacatgctcagccagtattcagagtacctccacagtgtctacaccagtgtttactgggcccacaaagaccctcaaatggacaacctcattaaacacgagtctgaaccatctcaactcagaaaacaccagaagaaaaagtgtggagccagagcctagagaggctgaggctgtcttgggatacaaaagccaaagtggtctttgccctgtaatgcatggtctgagcacaaaggtgtctcacagaggagccacgtggaccacagggaacatgggcttggggttgctagtcagcctctgactagtgagctggccccagctgaggccctggcacacactgacacaacaccttgggcacaaacgattctccatttccatttgctcatctgtaaaatgggacgaaaggtctcaatagcactcagctggaactctacataactgcattttattcatttatgtcagtatctgcaacataaaaggccaaacaccaacctggttcctgtcataccaccaggacaaccaaacttgtcaacacctaagcacttccccaccccgcttttgagccaaatgaccaccctagaaatcaggaggtgtcagctccatttcacaactgctgacaagagagggcacagagtcagggcagaagaaggtcttacatatcagtatgagtgctccttaaaccacactgtctctccctcaggtctaccaacaccctgaaggtagcacagtgtctctctcttaggccaggcttcaggcactgctggtaccctggtagggtcagcaggaaaggccagatacctgaggtgcttgggcaagagtccaggtggcagaaaacccggctggcagtccaacctcctcagaggccgcagggatcagaacccaccaacaaggagagcccacgaatgggtagaagcagggcacggcttcagtggaagcctccattagttaagtctgaacacacaagcatcgaccagacttttcatccaggctcttttcaatctgagcccccaaaatccaaaagccagggtcctcctacatcctctgcctactctccaggcctgttaaatcccagctaactgatgagatcactgaatttgtacacctctggctgacccacctgctcacccctgggtagggggttatcaggtcctctgtatgcctgcctccatcccccaaatacatgaggcatgataaatcatcccctctctgcacccctcttttctgttcaggccccaacttacaaacaagaaaggtcacacccaggagtcaaatgtgcacaactgcaaacactttctctacagaaacactgttctacatggtgggtgggtgagtgggcacatgggttggggcaaaacaaaactgtttcctgcctttttctgagtagcaatctaagtgaaatgtgaatttggtcaccgtcctcctcccttcctgcaccttcatcctcacctatagccacacctcaccccctcaccattcccagttcagggtcttgaagggcagccacggtctattgttaatgttattgctaataacagctcatatttattaaacatttatgtgtcagacaatgctagatgttttatatgaattgtctcatttgatcctggagcaaccatatatactggatatattattacccccattttacacatgaggaaatcaaggctcagagaaggtaagtaactggccgggaaacacacaatgaatatatgggcttcaaatccagacttgccatcaaccactgtgctacatttattgcctgctaatatgcgtggtttaaaatgcagtctgttacccaggagatctctgagaacttccagccagtgccaccaactcaacacagcatagggagtaaggaaggggaccatgcctggagcctgatgcctgagtgatgttcccagggttatctcagctctttgcagtgtcgattcttcctttactttggaatccacaggctctcaagtcactaaaatgttctcccaatggctgacagggtcagtgggggcactgaggaagggggctgccatttctaagttgagcagctgcattagatctgtgtcagatctggagtttgtagctgaggatggttggctgcctcaccacaagaccttccttcctcccaatctcctcaactatctacacacatgcacaccatacccaagaaggtttgtgggacccccccttggggtgtcacttcctgatctccctccttcacacagacctggttctgagcctgggtctctctaaccctagtctccgggggtccctgcaagaagcaacccagtctagagttgcagacacaccatctcttcacactgagaggcgggggaatggagggcagagcagagtgcccatccgaccacagcacaggcacgcgctaagtggaacaactctcaaagatctggggtttttcaaaatcccccaactccctcctcccactagagaccagcgcaaaagcagccaagctcaggcctgggaaggcgaaaaggcaggaaactaagagaagccgctcccgctccctgaagccaccggacagaggacaaagggctagactcacaaactagctgcactcctgagaagaatacctgactccaaggcgctggggcaggcctttatggggcccatctcctgggaacgtgcttcccagggcaaggggagtccctgccctggcattgagtgtctgcccacccacataggcctccaaaacccagctttgggacaaaagtagcagaaaaaaaaaaaaaaaaattccagccactggcttctctcaggcttctccaaaccaaacaagaccaccttcctccctctcccccagagggagatgagtaggcccagctctgctccaagaccagccctacccaacatctgcctaagttctacttagggaacccaaagattcctttgcaaataagagcccagcctgggggcccggagagtttcacagactgctctttctggataaagagtgggcggggaccgtctggtcaggccccaggttcccgtgcagggtgggggccactgccttagctcccctcgccgacgccgccaccactcccagggtctggggggcccgatgcctgcaccgcaggtctccagcccgcgaggatttttaggcctcagggcaaagcgcctggaacactccccccagctgggggagggggggtgtcctgtcaggtgaccgaggacccggatgccccccgcccccagtgaccacccgagacgaagcgggggcggggcccggagggagtctgggagggcccgaaagtttgcccaagtcgctggggcggccggccggggtgcaagcagtcgggccgggctcccacgacccccgcgcggggcgggcccaggcaggaagtgggcgcacttactggccccctcgatcttgtcggcgccccggctccacgtgatctggcgcgtctccagcttgacctggaaggtcttccgctcgggtcgctgcgacttcttggagtagaacaaagtcatgacggtgcccacctcgaggctgcggcagaggtgcagcacctcggcgtccgagggcgcgccgggcccgcagccgttggcgcaaggggacgcggcgcccgccatggctccgacgctgggggcggcggcggcacaggccaggaccgcccgggagcaagcgcaacggcggcggctgaggttggggctgaggctgaggcggcagacgagcgggacccggcggcggctcctgcaggcggacacggggcggggcctcagcgcggcggggcggggctgccctgaggccccaccccgcttcggcgccgggaacaaaggcgcccgcgcacccgtggggaggacccccgcccgtcggcccgccgcgcctgcgccccgcgacccccagacaggccgcaggcggggacggaggcgcgatggcggcgggagcgcgcgccgttcccggtcgacccacccagccctcagtcccgcagagctttctcacgcggccccggacacagcccggcggccacgagcggccctgtcacgcacggcagccccgcccacaggccgcaggcccggcggccggcgcgtcagtcaggcgtactcgcacgggcggccgctaccccgcggtcccgcacagacgcagcccccgcgtcccgaacaccgcccatgcagcgaccgggacgggacgtgaggggatggcgcgtcctccgggaatgcccggccaaactcagttacctgggcgggcttcccggacaagggagccaggacgggccgcctcacaccggcggcggcgggtcctccgcgcgccctctcccgggaggggcgggggcggggctgcctgcggattggtcgcgggcactgatggacagccgacatgtcccgcccccccggcagcgcggggctggtccgcaggcagttctggcgacggccagacccacgtctgtctgttccgcccctgctgccagggtggctttcagtggtcctctctttcggagagttccccccaagcgtgagcaccccttacaggggcgttaggtccgcggccgcgctgtccagtggtctgacctgcagctcccagggcctttgtgtctgtccctcgcatgggcctctgcacgctccgtccccacgcgacaggactcgagtccgattcggggctccgactcagaccctaccccgcagcgccctcctgcaaatgctctcctgaactttggttttccccgccttgctttcttcctcctcctgtagccgctgcctctcgatctcagaagcttctcttcctctgcactcagtgctaggccagatcccaaggcgacctgacctttcccctggctttgcccaacaacacaggcaccggtgactccaaacctgcatctcccctacgttccaggcccc

SEQ ID NO: 9154 - DNA, 6000 bp, Homo sapiens
ctcccaaagtgctggcattacaggcgtgagtcaccacgcctggccaaatatttcttatattggattaaccttggttatcctcaaatgagcaagagttagttttgaactaccccaaaggaatatagtgaggggatgaaggttctcctgaaccaccctgaccaccaggacaaaagcagccttacctttgcatctggcacctgagcaccaaggctgctgagtcccacgatggagtagaaggcagattccaaatttgtgaaagggcgatccagcgaggcttttagtctctccacgtcatgcttggtgaggtagtgagtgggcgtcagagcccaggtgctggctatgattgtcagggccaacaggaagacagtgcttgaaccttggggggaaacaaccattcagtacactctacactcttccaaggtgctatacacagtcccaatgatgatgcacaccaagatctgggaaccaaatcacatggggaagggcgagggaatccaggggtttaacctgaggagaagccttgggaaggcagggagcctgctcttcaactggtggaaggacagtcctcccagcagcctccaagcatctaaagcacaggccttatcctactattcccatctgaaagatgtctgtaagtcctctgcctctaaggacaaacccaatcctgaatcctcacaccttgccagcctctcaaccagatctcctccctcgcgcttcccgctatctgttgctctctggcttcttctctgtcctctaagaagccaggttctttcctgctcagcatttttccatgtttttacctcaacttggcttaatttttactttcagaattcagctcaagcacctcttccttaagcagctctccctaggattagttccccagtacaataatgtaaggaagaacccagactctggggccaggcttaaatcacacctctgccatttattagcaatgtgcccttggcagttattcaaccagctggtgcctcagtttcctaaagtgtaaagtgataatagtatctacctcaggtacaattacacgagttaatacagaaagatctggccgggccagcactttgggaggccgaggcaggtggatcacctgaggtcaggaatttgaggccagcctggccaacatggtgaaaccccgcctctactaaaaatacaaaaaaattagctgggtgtggtggcaggtgcctgtaatcccagctacttgggaggctgaggcaggagaatcgcttgaacctgggagacaagaggttgcagagagctgagaatgcgccattgttgccaacctgagtgacaagagcaaaactccgtctcaaaaaaaaaaaaatcttagaataatgactggcacataacaaatgctatatcaatgttagctactacttctactactattattattgttgtgcttatatccactcatagcaatctgtacttctctgtgggattttctacaactttaacagcgtaatgtctgatttctctgctaaactgtaagttccatgaggataaagactgcttcttttgttcatcccagtatttccaagtcttgcacactgcctggcacatagttactgaataaatatttgctgaataaatgaaaagaaaaattaatccccatctatgatgccccaggggacaggaagctgcaggagtggtacatttctacttcatttatttaaaaaaacaaaacaaaaaacacttttgaatgggctgcttcttgataaagtgcattgtctggcacccaagtaacagcagtaacaaataatcactaggctaacatgagtggccctaaatcctttgcctttagtgttaaattaagcttgaactagaatccttgaaaaaaggcactattggccagcggcactggctcacttctgtaatcccaacacttggggaggctgaggcaggcggatgcttgagcccaggagttcaagactagaccaggcgacatggcgaaaccctttctctacaaaaaagaaaatacaaaaattagccaggcatggtggcgtgtgcctgtagtcccagctactcgggaggcggaggtaggaggatcacttgagcccaggaggttgagactgcagtgagctgagatcacaccatggcactccaccctgggtgagaaagagagaccctgtctcaaaaaaataaaagacagctgggcacagtagctcacgcctgtaatcccagcactttgggaggccgaggtgggcggatcacttgaagtcaggagttcaagaccagcctggccaacatggtgaaaccctgtctctactaaaaagacaaaaattagccaggtgtgatggtgggtgcctgtaatccaaactacttgggaggctgaggcaggagaatcacttaaacccaggaggcggaagttgcagtgagccgagatcgcaccactgcactccagcctgggtgacagagtgagactccatctcaaaaaaataaaaataaataaataaaattaaattaaaaaaagaaaaaatctatcacgtggtgtattcatcaaatgtatactgagctactatgtgccacacactactttaggtgttaaaaatacagcaggaaacaaaagaaacaaaactcccaccctcaaagagcttctattctagtgacaaaagacatcacatgaaataacattatttatcacattacaaagtaagtgctatggaaaaaaataaagtacagaagagatatttgggaagggctgcattttaaatacggtagtctatgaaggactaagaaataaacatattgagtacagatctgaagaagaagcaagtcataaagatatctggtgggaaactatgctaagaagaaaaacccaatatggccaggcgcagtggctcacacctctaaccccagcactttgggaggccaaggcagggggatcacctgaggtcgggagttcaagacaaacctggccaacatggtgaaaccccatgtctactaaaaatacaaaacatgagccgcacatggtgacttggcctgtaatcccagctactagggaggctgaagcacgagaatcacttgatctgggaagcagagtgggcagtgagctgagatcgtgccactgcactccagcctggggctctgtctcaaaaaaaaaaaaaaaaaagaaaagaaaaaccaaatgcaaacattctgaatcaggagtatgtacacatacagtgttttttgagatcagcaaggacagtacagcttgagtggaataagcaaagggtaagaagtagatgaggtaacagaggtagcagaggacaaatccagagggccttgtataccaccgtagtggaagccactggaaagttcttttttttttttttagacagagtctcgctctgttgccaggctggagtgcagtggcgcgatctcggctcactgcagcctccgcctcccgggttcaagcgattctcctgcctcagcctcccaagtagctaggactacaggcacgtgccaccatgcccagctaatttttgtctttttagtagagacggggtttcaccatgttggccaggatggtcttgatctcttgacctcgtgatccgcccgcctcagcctcccaaagtgctgggattacaggcgtgagctaccgcacccggctggagaccactggaaagttctaagcagaggagtgatttgacttacactctaatggtattactgtgttgagaataaacaatactgtgtggagaacagaccatgcaggtgcaaggacagagcaggggacaccagttgggagactaccgccataatccaagccagaagatgatggtggcccaaaccagggcaacagcagtgaacatgatgagaagtgatgagagttagtctggctagaattcaaagtcaaagcctatcagaaactgctaatggacagaaagacctaagagagagcggagtcaagatactaatgctgaatccccaatgccttgtgcacaggcgggtacccaatatatgaagatctagtgaatggctgcgactagcattttcccacctagaccgtaaattcccctaaaacagcacctgtgtcagaatcctaatcttctcactccatgttaacgagagcagtaacttttctgactaaaagttgagcacttaatatgttaggtatgcccacgctatgctgtgctttgcacacaccaaatcattaaatcctcacaacatctaagcaaggtggctattttctgcatttcacagaccaggaaagtaaggctcagaagtagttacctgccctaggacacatcactgaaaatcaaacttcaggcaatttgaatccaaagtctgcttttaaccactttactatcctgaacttctcaaataatgaaacggtgagccactgactcattcatgtgtcaccctgggcaagtaagttcccttccgtgggattccaacttctcatctgtcaaatggtagtaacaagagtacatgcttccaaagttacgatgaggctacatgaaattccaccctgcacagcgtctactcagtaacttccaatgcagttaacttagttcttacctagggccatgcactgttctaaactaagcacgaagattatttcacttaataaagcaactcaacgaggcagataacgtgactaatttgactaacttattttacagatgagaaactgaggtgtagaggggttaagtaacctgctttgggttacacaatgaatacgtggccgactgcaagtttgcacctagagtgtcacttgagaacttatgctccaggctcccagagagaagtgagggttttctttgcccctttcactgaatgggaaactacagcacaaagaaggacaatctgcccaaaacctcacacggagtaaggggcagcgccgggaccagaaccttaggccgcctggcccagaagcccgcgcgagtgaaatgaatgaggccagacctaggctaagcgcgtccgcggtccccacggctgagcctcggggcgacccgtagctccgcgctgcacccctcccccaggcaccaaccccgccaggtcgcgggcactcccaccagctcgcagccctccttcggaccctcgatccgagagcgccccagccagagcttgtgcccatgcccctgtcccgcaggggaaggggatcccgcctggccggctctcgagcggcgactagtaacctcccgcgggcgacagccctctccccaaagccacgcgcaactcctcacccggcggcgccattcctccgagcaggtcccgccggagtccgagccgcgggctgacttccgctcgggaaagtggctccaagagcccgccacaggggacgccagggactcgcggcaggctctgcgggccaggatgagttctaagcacaggtcagtgtccgcggccccgctgagcttcgacgcttccagcagccgcggccgggatcccagtcctcccgctcacagggccttgcagttcccgaggacagacccgcctctcccccgcgcccaggcccacttggaaccgaccgtctcgcaacgctcctattccgggagctaccgggacgcggttgggccaggcctcggggtgggcccgagacggggccgcttctgattggcctgtctgctgtcactcactcgtctttctgctgcccggcccattttaaaggaacaggaagggtctcgtcgggaggggatagcttagaagggatttttttttcctctttagaaaattgtggcagtttctggccgggcgcagtggctcacgcctgtaatcccagaactttgggaggccgaggcgggcggattacctgaggtgaggagttcgagatcagcctgggcaacacggtgaaaccccgtctctactaaaaatacaaaattagccgggcgtggtcacacatgcctgtaatcccagctactcgggagcctgaggcaggagaatcgcttggacctgggaggcggaggatgcggtgagccaagatcgcgccattgcactccagcctgggcaacgagtaaatctccgtctcaccaaaaaaaaaagaaaaagaaaattatgtca

SEQ ID NO: 9155 - DNA, 6000 bp, Homo sapiens
agcccaaaaaatctagattttagtgaaaaaaaaaaaaaaaattccacttttaaaaggtgactcaattgcttaataacatgaggtcagtgaaacaaattccatgtgaaggccaagttcagctcacacagggcaccagtttggaattcctctcaagacagcctaacagaccttgtttgcttataccctaacagaccttgtttgcttataccttgcccaggatagagaattaaagatttgaattcaagatggtcttttattccaacttttgagtcagcagatgatattcattatcactataaatagtctgtaacttccagtagtcttagtgggcctcctttctgaccagaaagagatcaagtagctgtccatcattcagcttcttcctttaaagttaaactttggttttatattattctttacagagtactaatactaagatgagcccacaagtacaaccaagaattcaaaaattattccccagtactgcccaatgatcctttcgaagttatatggaggccgggcacggtggctcatgcctataatcctagcactttgggaggccgaggagggcagatcacctgaggtcaggacttctagaccagcctgactaacatggtgaaaccccgtctctactaaaaatacaaaattagccgggtgtggtggcgcatgcctgtaatcccagctacttgggaggctgaggcagaagaatcacttgaacccgggaggtagaagttgcagtaaaccaagatcacgccattggactccagcctgggcaacaagagcgaaactttgtctcaaaaaaaaagagaaaaaagaaaaagaaaaaaaagttatatggagaataacagagctgtgtaaatagtcactggtgtaggaagcaatttatgccacccaagaacactggaactccaatactttggaactgaaaaggtttcgggactgggcaggtattctagtcttgccaaaaaaatctaagttagaaatcacaaaatgttcttgataagttaaagttgctgcccattgttgacaggtggaagacacatgttactgaatgcacataaaggacacacacgtctggttttgggggtgtctggttgtctgcttcaggagactcggccagaatttgtctgcctaagaaaagtctcctaggaggcccctgaactaattttctatatgctaagtgagagtgcctccttgcctaggcactgtcacttaaaattaaatatttaccttcccttacaagccatcactttctacctaatatcaatttattttctgtctttgttacaagtcaccattttgatgctgagggcattgggtaaaaaatctctccaggaaagggccactatctgtgtggcccccctcccactcctttttcttggaatgcagtttacaatgcacacaaagaggcgggactaatgctttctcagggtgagatcttatcaggtgaagtgtatcaactgccactagtcaactggttttgacctacagaatgggcaatttcatgtggttcaacatattaccacatgatcaagaggaacagggacatgaatgtttacagaataccagctgcctctacatcagcactgtctagaactttctgtgatggtggaaaccatctacagccacgctgaccaacttatgactactgagcacctgaaatgtggctaatttgactcagaaattgaatttttaattttacttaatttgaattgttttaaacttaaattgctacttgtggctactgtattggacaacacagttctagacagtagctttttcaggcaagaactaggtctcacttgcggtgtttgaaggcccaccacacaggagaccctcggtgaaaaaaatgaaatgaaaaataccttcagcactgccagattttcaaaatgcctccccaccttcctgccactgaagctcttaattttgatcttcacgttctgtgtcctcccttgggtaattattgccccaggaaggtggaggtatatagccaggagggaacatttggaaggccgggcccacatcgcctagcaactgggcaacaggaactggcctgacaaccttctgaccagctggacctccacattctcatccactgaatgggtgacaaccattcccaccccctagaacagggttattttaaggcctaaatgtaaaccacagttgtggaatctgattctaaaaagtgaaccttaaaaaccaagttgggctaagcttcatttatccaatgagacagctgggaatagtttaacaggtatgggggcgctgtccgcctggtataaccaatatttatgatgttataggccaggccttaaccactgcaggcccagcatgcacagacggacagcacagtccctgccttcatcattctgacttgaccattatttttgtttctcctgaaacaagattttagcaaagaaaaacttgctgtctcaacagaactgttgatcctctatgtgtcattcatctattagttaaaattcccagggctaaaaagacaagaagagtctggggtcccgacacttttaaaaggtgtccctgctacataataaatcaatactccaattcaatcactggcattcaaccatttaaactgagtttgctgctatgtaattattgcagcctgttgagttagggctcatttcattaaagagcataattgctcaaatgtgacttgatttaagatttatttaaaactcttccatcaccaaaaaatactcatataccatgaaccactgtaacttcttaatctctctgtaaatgttcagaggcagattcctaagtatgaaaggtgagagttgttatagtgcctagagctctaaaccctctcctaaaccccaagatccctttctggtttcccctcccccaaccttagcctcctccaggcctccactggcccaagatccctgcaagccggctttgcggtgctccatgtaaaaggaaaacttcacctactaggaggtctgccccggcctttgcttcaacagagagggaaatggcacctccaggacctcagaaccggaagcttctttctggaagggaaagaggttggcatatgatagtgggagtgacctttggcaagttcgtaaacgagtcaagacatcacacagtaagtgacatgctgcagggtcacagatttctctaggtgtcggattaacaggaagttaaatcaaacaaggagtgtgaggagggaggcggggcagtgggagaatgccccccagctgcacagggcggggtaacattcgcagttgttcttcctgggagtgccagacagacgtcctgggtctctggggacacccagttctgaagaggtatctaatgtgagatatgaggccctaccaggcccatttctccaaattcctgaaaatgccatccagatggcccctaccctgaaggttccagcacgcagagtgaatagctgagcagtgacgtgggaggctcctcaggtccctcagagtttcatttccttggtgcttcccagtctctcctaacctctgacctctcagagtaattgccaaattgccttctgtttgtacaaggtcccagcacttcccggcgtggttcccgaccctgtgagtgggtggtgctgtcttcaggccacagataagaaactaggattcagaggggctatgggacctgcgagtaggcggccagtacgtggtccggggtgtagaaccccggctgtgcaacttctgcagccccgcgcccgccgcagtgccggagccaggccccaccttcctcccgtgtccagcaccccccaacaaaagcatcccaactgaacagccaacacttgtggctccttcctacaagtgctgggtctccacagctttcctcgcaaatcgaagctaacaggagccccgatttgcagaccaggaaatggagaccccgaacgaaacaacttggtcggggtcaccctcgccagccggggcactctagagctaaaactcgcgacttatcattcggagaggggtccctgaagcactgcgggcgccccactggaagcgcagaccccggcctgcctcccctaatcagggcgcagcgggagagccggccgggccggggcgggcaccaggccgggtgccagcgcgcttggccggcccggaggtgtccgcttccgcccggggctggcaccgccggcccattcatcgtggccgcgggcggggcgggccgggccccgggcgccctcgtccccccgccgggagccctcgagccaggctccgcgcagcccagccggggaaacggtggccccggccccgccgccagggggagcagggagccgcctcccgcactccgggaagttgccaccgcggccgcccggcgtccgtgccatggacagacccggtccctgcgccgcgagccctgcggccccggcccgccccgtcgggggccgtcccagccccgcgaagcgccagcgggccgcggcccgggaccggcgcgctcggcccgtgggcccccattcaatcccgccctcctcccctcggccggcctccgccgccttccgcccgcaccccacccctccggcccggactccagcccggcaacgtcatccggcggcttcccgaaacttaaccccttcctccgccagctgtgcgccgccccgccccgccccgccgccaactttcttcgcccaacttcggagcgcgctggccggcccgacggccctgccgggagggagggaggcagggagcggtcgccacgtcgcgcccgtctgccgccgcagctccccggacggcgagggccgcggggtccacaccacggggcgcgccctgcctacgccccggtacggcgcttgcccggcacccccgccccgagtccgaccccgaccccgatggtgcacggccgcggcggcaggcggcgggcggcgggcgggccgggggaggggccgccgaggagacgtgtcactcgcggcgcagcgcggccggccccggccccccgacggcccggcccgcgcgcggccgctgcagggcccggccaagtttcttacctgcagccagagacgcgagagggaaagcgagagggcaggagccgccgccttcgcagccgccgcggagccgggagagaggagccggccaagcctccgccaagaaaccgcccccgagcagctgtagacgctgcgaccctgacgccgcccgccccgtctgccgtccgctccggccgctcgctggctgcgtgcgcgcgtgtggagtcgtggcactttctgcctcagagctggcgaacggccccctccgccgggatcgccgcctcctgccttccccacccgggccagccattcatcgagccgcctcttcccattggtccgcaccccgccactctgccggtcgctggccagtcaggacgcgggtggccgagccgcggcggcggccattgggcagagaggagggtctccacctcggccaatgggagaggggaggagctgcggggaggtgaagggggcagggctggggagaggcggggccgagcggcgcggcgctcggccgtgcgcggggcggggcggagcaggaacgccccgcccaccgaggggggggtctccggccagctccgcccactctgggcccgcggcgctcccagcagtctctgactaggatccggctctgcctaggcgggaagcagaaggttcgggtcccggcgaccccgggcctgcgcctctggataccgctgggctgacatggcggtggctgaacagggttgcgcaaccgcgaacagccaaggaagctgctttatttaaacccaactaacttcccccgaagcagcgccccctcgggccgccgggtatgaggacaagctctgctgggggtcagcccagggagagcaagttcttatcatcaaagagattgcaatcagcaccagaaggaatttccttcagtaaatggaggaattggggtggaagagccagaaggtgcacgaggaattgaagcggatgtcatcgccctcgttgttagggagggtacaactgaggcacggtctatttaagatactcaaccaaatcacagccggcagagc

SEQ ID NO: 9156 - DNA, 6000 bp, Homo sapiens
gtagctctgctccttattcagtacttatttattcttactttatacaccattctaaaaatctatgaggtttgatttctcaggccataggcaactataaacaacgacttaaaaataacacagaatggtaaggagctagaagaagcagcaattatagcaccagtggtaacaagaagtaaagaagcgcctagtaacagctaatcagcaaaaactagaaagtcataaactattaagagtacccatataaactcaaaagcatttatggcagggtcctggggactaggaactgacattacatagtccaattattttcataataaattccttgtcatcaataatcataagaagtcaaattatacttgattatgcttaatattttcagtttaagagagacactgactgttacattttgtaaatgcttccataaacaaaaagatttttaaaaactgttaaggtctcgacacagtttagtagcttcaattttgtagaaaatacattaacatgggatagcctatccttccacctgtcttttcttaaagacaatttatcttaggacttctcaaatgccttctcaataatcaaggtggaaggtggtgcattctattctggaataggttgagtggaagctgcattttatgaaagctagatgccttggaaaatgatcatagatgacaaaggtggagattctctaatatcctgaacattggcattgttgtattcacctgggggtctccaacccaaagaaaggcataaacaaagcaatcaaaattttttctgattttttttccatgtagaataaacagaatataaaatttaataacctcctttgtgagggagagagaataaatgatatgaattcatttatcccacaattgcccaacgtgaattgttgcttgacttgaacaaattgcagaggttttgactccccttgtgccctacctctgcaggggtgctgagatgaaaagaatgtgtttgacctgaacctgccacagcacagctgggtcccctttcagaggctaaacagactgagagacagccttgctccacactcagcagaagcagctggccttaaacggctcagccttcaggtacccttccctccctggagcttaaggatatcctcctcacgaagatgcttggtggaaagacttgatgagtccatgatctgtgcatacgcacccaccccctctgccttctggatgcacagaaactcggactcacagcagcagaatcttcaactagaagtatccgagagaacaagaagaaacgggcccagaaaggcaaaggccctttcccccatctgtagctctctagattaactaacgtcttaaatactttagctgctttctccttgggaagtttgcatcaaaattacagttttttccaaagtgactttttaaatctttctccctatgaaggttcatcttttggcaaaggaaagaagatggggagagagggaaagatgaaatataagaagggagggaagaaggtaaagaaaagaagaaggaggaaacaaagggagactgagaagaaaggactaaagtgaaggtaaacggggaggaggctgggagggagaaagaaagaactactgagataagttcatacattcagcttactgcttttttagtctttgaaaattattaaagaggcaggcagtgtcatttcaacctagaggaaatccaagtggtaacatcctggggccctggtaggtccctctctcatccttcctgaaataaactaggtcttcttcccctccatcccccaacaacttaccttcactgaagacaaaatctgagataatgtcaaaaggttggatgtggaccgcagacaggatcatggtgaccgtcttctgcggatcactagaggccagtgaaatggtttgttgagcttgacactcataggacttcccagcgggggtgaccaaggcagagaggtggtgcgagttggctgtgtgcttcccagctacagcaagagcccagagcaatagttagaaccctcattgttcctaacctaatgtgccagagagctggctattgcctctcagttccagacaccacacccctcctgtcctctctgttcccttgccagggctagggctctacaaatggcatcaagtggtgatgaaggacaaacacacccattatcttgagagccagggctctttcaatattaatttggaactccttttttgaagaggagaatgatacttaaaaacccaacccttgttactgtataaaacctaggctgggcatggtggatcctgcctgtaatcccaaaactttcagaggtcaaggtgggaggatcgtttgagcccaagatttctagaccagcctgagcaacatagtgagactctgtctctacaaatacacacacacacacatacatttacaaaattagtctggcatggtgacacatgcctgtagtcccagctactggggaaactggggtgggagaatctcttgagcccagtagcttactccaggctgtggtgatctatggtggtgccactgccctccaccctggtggacagagtgagaccgcacttcaaaaaagaaaaaaaaaatccctaataatggagattccaaagacacagaaggaacagtgacttggttttccacatttcacacgggcctggcaaagaataaaacatcttcctcaacaaagccggacagattgctggtcctctggatgcttgtccttacacacatacatcccctctgaaggtctgcctcccattgctctttttctgacctaagtttgatttttcctttttcctttttggtctaatttaactgggggacatcttgcatctaaactttgatgaaaaagaaaaaatcctccttttactgtgataacaaaaaggggtgaaaagggaaagatgacacatgtatttttatgtattcaataaaaatcctttcccaactcaggtgcctgggtgatgaagggcctcattatgagtgaaatagacaacttataaagaataaaataaatttaaatgtggtctttgacggtgtctgcagataggaatattgttatttgggggatgaacgctcgttttgccgaggaggatctggctgagttgtcggagggatgggccagaaacgctagtaaattatacatggtgcagaatccactgtcaggtagctgcagtcgatgactgaatatcccgtgcgagccatgctgccatgcgcaaaaagacactgaaggccatcacatcctgactgaaaaggaaagtcgcactgcccccttgcagttttagcgcataagaaacaaaaccaggatgcggaagaaaattaaaatgcagctttgcccttctccgtggtccttcaaaggccaaatcataagaggtcgttttgaagcaccagggaacgacaggccttcaagggacttcttatctaggatcaggccacgggtgacgtttgggtccccacgcctgcggttcctggcggatctacaaggcctgagacccagaagactcatgggcgctcccgcctcttccgccctaaagagcaagccgagggaagacttggcctgggacctcaaagcgtgggacggtttccaaaaccttgaggaattctctctccaagcctgttctgcgagttcccaggctccctccccagccatgccagcctccactcaccactgactgcgtctttgaagtgggttttctccgaggagtcgtagacaaactgcactttgctcagcctccaagtcgcctcaggtcccttggacatgttgtggctttcctgttgagccggggaggtgcgcttcaatcgtccccgcagcgtctgggttcttaaacctaggggccgccacttcccacacccacgcggagcctgcggcccctctgcccgctgggctcggagttacctttacaaagagcattttgagtgcatatgcgcgatccacccagaacacttgcagctccgactggctgtggccacagcggcccttcacctcagctccccgggtcaatgcgatatcggcctgttctgtgatcagctgggaacacagacgccccgcgccccctcagctcgcccggccccggggcgggggctgtaaagggcggcgcgtccaaactctgggttgcacgcttgggcgctcctttgcgcgcgcgcatcccaggttccgggaacatgcggttagatgctctacgtgcagccccgatagggaagcggagagaagggggtttactttcaaagcaggcaggggaacagaaggcattacaagctggaatccccatgcagcattcgggagcagcctgccggggtgtgggaaagaaggcgggcaacccaggtcttcgaagagccttgaggaagggtgcccttcgccctggagccctaggagcaagctgaggggggggaaagattccttacatctacgtagttgctggcccacacatcataaggtacaataaatttggctgcaaactctgccatgagacacgtcgtcccattttcccgcaccacaaatatatctttttcagggttagtggaaaggcctgagagattttccacttcttgttctgccatgatttgagccattgtatctgcggaacaaacaaaacaattccatcagttcagggctcagcccacgcgtctcgggcgctagggtggggagacagtgctctgcaggctttggagtgacaaagttctctgccagcagctgtgcgctctacgagccgtttctctaacccgggtctaacaagcctcattccttcgctgttaatttataatgaaaatacagttaaaaaaattaaaaatcctgactttgtttgtaatatagctggctgttttctacatcttgggattttaaagtaaatatttcttgccaatgctctgacctcacgaagctggcctgtctaggctctgtctggaatatgccacagaggtgtatggctctcaggggaattccctgccaccggcgaggaaggccctccctcctcccctaaaagaaaaaaagaaaaaacaccgcaaaacattaagggccatattttttatctcaagctaattgactttactttgccggctctgttctctgcaaagagtgcccgtcctctctcccagtcgccaaatcgctactcacggaacaacatcaggagaactcgaagtctgtcgatgctggggacccctcttccttggagatccatactcgcagtgccccgaatgaggccggctgtgctgctgcagaggccgccagagagggaatccctcaaagtcgccgctggagtgggccggggtgagcgagaggcgggggacagagaagggggagggagggagcgcgtattctgtgagcgcctagctaggactcggtgtcgagcgcggcaccgacagctgctggcagagcaaatcggctcactgcggaggaaaggaccgcacggcggtccacggctgcgagtgctgaaagcaatccgattgtgtggcaggagtggctgtggcttggcttgtgcggagggccaatgagatctggggggactaaacttctccctgggtctgtttcctgttctgcaactgcatccgcaaagatgagtctgttctgagaaacttaataccaccctcagccttattaaatctccttaccaggtacagttattaagtggtgtagataccttatcactggagtactgtcttctgaaaacgcatctggttcccgaaagaaaacggtggagcaaaaattgttgctgattcgggggaggagggctatgcaggaatagagaagggaaaatgctatggcaacagtttcctgaatttggagacatccccttctctcccctgctctcaatgagctcatgggtttaaagttaaattgacgcctcctcgaacgaggccatcagacaatgcagtagctccatgtgggcttattttcctgtgaattttgctcccgggtgcatgaggactctgaactctggggtcacctaccctcccgcattatactgtgaccactctgccaaaaagggatgcaagcaaatcagaagtttttgagagttatctagtgtctcctagg

SEQ ID NO: 9157 - DNA, 6000 bp, Homo sapiens
tcacactgggcagtgtagctggcttaacccagacctcctgggaagctgaggccaactgtctgacctaagattcgggtcatagaactcaactcccttaataactcccctattgcaccacaacctaaaacccagacagtcagaaaacctgtgggtgaaaagtcccagggtttagcgggtccacaggggagaacagctggtgttggacatctgtattttaaccccaatccaaaacatcagctttcactaacgccagggtctctccttagaaaagcaaatccaagacgaaaacgggaaaacttcatctcaagaggaagcccctatctttccttcatggcacacaacaggcactcagtaaaagctgagtggatgagtggctgcggagtggccacaggccttcacagggacgaacgtctgacgggaattaagggtctcctggcaacgcagatgctgccctctggccctcaagccccttaggagaaaccactaactgattaaacagtggtctcagtagggggcatttgaccatgtctggagacatttctggctgtcaaacctgggagaggggtgctggtatctagtgggtgtgggagaggggtgctggtaacaccttacagagcacaggacggcctttcctgccccccaacaaagaattaccgggctcagaatgtcacagtgccaaggcactgtctctacaccctcacttgattcaagcaagtgtcaaacagcatgtgccaggcaagcccagggaaacctgggtgtcctgtgagtttctgatattttctcatatttgtttggaaaaggttggagaagaagaatcagaggctcggtgactctggccagtgggtgatgttaaaaagacagctgccaccgtagataccaccagagatgggcccagggcaggggcacctcccagaactctcaggaaacgcctcccgcgtgagcagacaccgggtggccccaggttcagtctttcccgagagcgaacttagcatccatctgggccccagaagtttgaggcaataaccagaggagaaagaccgggggtaatctctgagacgcagcagaactgaaatgaggtagatgaggttgccaggaaaaccaggtgccaggagtcctttcctcaaaagtagccgcttcaagctccaggctgacatctgcaaggctgtcactcgtgctgcctgcttttaatcccaggacccttggctttttaaaagaaagggttttcccacgggtatgttttgggaacactgaattcccaccagacagcagcctcatccctcgactctcagaaaaaatggggccccaggagtgtcctgttacagtcaagcccactccattcagcatcctgagagcagacgtggctcccggcgtacaaaggggctctgacaatttcccccagcccccaatttcaaggaggacctgctctggggcccaagtaccaaattcaagaggtgtgggcgtgcagtccaagagaaaccaccctggcctggggctggtgtgggttttggacctcgggcaaaactttccacggtggactttcctcatctgtaagtcagggatgtgaaccccgagcttgcgtaggctcctctcaggtctgaaatttggggtagctgaagaccacacaggggaaccagcagtgggtgggaagcccggtccagcctgaagacctccagccaggctcagcaggggagaggccctatcttgaaagactatagaattctagatttcatccatcacggcctcattcttcagatgaagacagtgaggcccatcatggcttaaggacctagcaaggtcaatttccttctgccaaaagaaggtatcttacaggataggagccacttggacactgcctcaaagcccaactccaaaccatccatcaagttctcgttgcaaacaactcccagcatgtactagatgaaaaacagcagccactactagttaaaagaaaaaccaaatactagcttttttcctttcttttttccttccctccttccttcctatcttttggtgtaaagaaactccaggagacaccaggccttaccacttcctcaccctagtctctcggggaaatctgatgaaaacaaactgttacagtatacctgcattttaaagactggttggttccctccgtgccttgcagctttcttccaataagtagggggctgtgtatacacagaacacaggactaactggggcacccaggggccagctggaacaggctagggttccaggtattaaccccaagggtcccaatcactcaaaggctgctggcggcggcggggcaaagtgcagagggcggcggcaaggcatttaacaagaggccttgatgtcaggtcaaaaacatcatggactgatgagcctaagaaaggacagaaataagaacaatgctttttttttttttttttaagtcctgaaccataaagagagacaagagcaaaatgatgcactgtgcccagcccttggaataagggtgacacaaggatgtgtgcccctcgagcaggaggtcctcaaggcagctttacagagcgaaaggcaaaaagtgaggcaaggagggcactgaagcagcaatccatctaaggcaagactctccaaacgtgtgcgaacgtattttaataacattctcgtgcatttcattagcctcctgagttcacaaagggcctctgggaaggcaagtcggttccgcaaacgctggctctgggcaggtcctcctggcacctcgctagtctggcacaggccagctaaggtggggtagggggagagctttccattccaggctgggagggagtgtggagaggtggatggatggaaggacccaccaccaaagcccggccagcctggttatttttaccacttgaagctcactgtataggctcaggggccacaaactggcagccgcctgcggacacttgcttatgagccgcccagacactgccttcattccacagcggctgcttctcagctccgggccccagctaggggcagcctggcccccagcagggaaggactgtgtgccccttcacctggcgtgcttcttcagggtggggatggggaaactaaagctcagggaagcaaaaggtccccgaaaaggtgggctgggggacaaggtgtaggctagaagctagaagccagaacccgggaggtagtggttcaattctccactcaaccaaatgtccacctaggtgggctgtgtgtgcaggaggtagagacttacttatctgaacttttgggtgcccaggcggctgcgttagcgacaaggttcaaaaccccactccccaccgttggtccactgatcccttatttagggccaggcagtcccaaacacaaacagccccaaactttgactcctttgtaaccatggtctcagccagactgaaccaagctgtccagacagaggctatttataggtgcgtcggggacacagacactggcacaatgacacacacacattcaagatccacgctgggccagacgggccagagctgagccctggattcagacacctggacacacacggtccccagatccggcccaaccagaccagacccccagaaagatggacacgctcaagaaaggcaccccggcccggacacgggaaagacacacagagagaggcaggaagactcggtgacacgcactcttgggcaagaccgcgactcagacccccagacaccccgagagacgccgaagacccagacagagccacgcagccacgcacactccacagacgcacggacatccactcagagcccgagacacagcgccgcgaacactccagacacacgcccggagccccagacacctcgcagaccagacagtgtctcacacgcccctccacccccgcccaaagttgataaagagccggcctaaatgctccatcgcgactgccctcagggaaataaaatggaaacttcacggatccgcccgccccaaccctcccgcgccgtgcgccgccgctgagccccgggtccgagtccgggcgggcggggcgcggacagcgggggccgtgccaggctcgcagcgccgcgggacaaagccgggccggccgccagctgccgcgagccgggagggcgcgcccggggcgcggcgggcgctgcccgggcgcagggcgttcggtccgagggggcgcgcagggcccggacccccgctcgcagctgtgccccgacatagggtccgagcccgatggagtctccggggaggggggcgtggggtcactcactgatctccatgctctggaacaaagagcgtttgcagttgcacgtgcaggagacattgggctgcccggcggcggcggcggcggtgctgttgacccccatcaagcggtgcatggacggcgcggcggcgcggcgcggggcgcggggggctcgggggcggccggggggggctccggccggcgcccggagctggggccccgcatgcaggaggcgcgcggcgggggaggcgcgccccggctcgccgggctcgggtcgccgccaagttcccggggcgccgcggggctcagtgcgcgggaccgcgctccgctgcgcccccccggcctcccctcggcagccccgggggcgtcggcagtgcccgcgggtggcgtccggaaaatgggctggcagcggggcgcgcgctgccgccggggctgagcctctgccgctagctttccccagccgagcgcctccgccgccgccgccgccgccgcctcctcctcctcattcaagtccaaggagatcgggtttcgctccgagaccgcggtcggaggcaggcagacggtctgacgtcagcgctagacggggctgccggttcccaccgcgcgggggccggggagggggcgcgcgctgcgccaatccccgccgaggttcccccgcaccccctccccgagccggggggcggggtgacgggaaacggggcgggctcttaaagggccagagctaggcggcccacgtagacccggcacccgcgcaacggaggaggggcgctgtgccctctccccaacggcggtcagcttggaacgcctgcccggcgcacgcccggggccggggagccgaactcggtgccagccgcacccgggcgggttgctggtgcgccctcccctcgcccccgtccctggggtccttgacccaggctcttggggctagcctatcttctgaggagcacaaggtccctgggggctcagggaagagaaattggagaaagggggaggaagcccccaagatggatcacccattgcctggtttcgcaggagactgtccgccttcagttctccagcagctcggggatcatggcccactgaacccccaagcgctttcacccgaacccaaggaggacgaccaggaaagacgggaactcgcgtagacacgcccggaagcccttgtcatgtaaatagctgtcggggactggtgtattgtcgccgccccagccggcgggacctggggcgaatccacacccattgtctgctgcccaaggggcctccggctggggggcgcggctgcggagttcaaaaggggtatgagcaggaggggtgtacttttagttcattaagttttaattacaggagtgctacaagaacacattcttcaggtttaaaaagatattaaaatattacataagagacctcccctccctggcccacctccagcctcttaaaaatttagtgtgtcgccttttagacactttctcaaagcttcacttatttaacaggcacttaaggagcacctacctgtgccagaaactctccaaatattaactcaacctgacaccgactcagtgtggccgaatattactctccccattttacagagcgggcagctggtcaaggaagtcgcttgttgaaagtcacacagtggtggagcctgtgtgccaacccaggaccctggggagctgcctccccctctcccacgtagtcctgattctttaagtgtccacatattcctgtaatgcctggagtttcagtaattagcagggacttagtgtgttcagagaaaaaaaaagcttttaaaaattattgttactgtgttt

SEQ ID NO: 9158 - DNA, 6000 bp, Homo sapiens
cagggcttcaaaccaaggtcagggaaaaccaccaatctctaacccccctaccctctgcaaaaaaaatttttttttaattaaaaaatttaaaaaaacaggaaaaaaaatttttcgttcatttttttccccagaataatgacccacattattcatattcatgaagttctcaaaggggtccttgatctaaaaaagggtcctgaccccaccgtgggcctccagcacttggactccccgctgaggacccaccccagaccctcccgagcttgttaaacacatctcttcctgggcccctcccgggaaacccaggctcagtgaagctggggctgggccttgaacccacactttttaaaaagttcccccagcttttctgatgagaagcaggggtgaaaactccatgatgttaacccaggagccttctaccctgacagccgagccactgaagaggcggagctgccgggcaggcgctgcggggcaggcgctgcggggcaggggctgcggggcaggcgctagggctcctcgggcacctctgcactgggacccctcccctggccccagctcaggcactgccctggctctgcttccgctcaggtgttccagcatttcccacaggtgagacttacttggaagacgggtgatgattacagcgagactcccagctctgctacatcatcaagagaggccaagccagagccagggcactcgcaggagctcgccaccacagacgcagcccgtgtcctctttcacagtaagagggtagccccacgccctgtgcgcacctgacacctgccgtcattatcggagtcaccgaaatgtcactgaatcacagtccccctagttttaaggcaataatggaagttgctctctggccgagcacagtggcacaaggtcccaggttacagggggctctttctcacgatcagccttggatcagccttaggtttattcagtacaaagcacaggcactcacttccacaccatagtcctccttcctctacagctgcctccgtcttttctggaaccaaaactccacacaactccctacacactacagtcctccctgcctggtgctcctccaagaactccccgtatgagcccacaacaggcgctctctgggcacccctgaaggttgcagtcccagcgcctttgataaagaaatgtgctcagtgtctgctcagccaagagcccctcagacccttcccacccctgacttgcctcagcgtcggggccacagcccccaggccctcagtgcgcaggtgagaagtacacaccttacacccaggagagaggcctgatgaccgccacaagccctgagggtgcgggaacctcttcaggccccaaactatggagccagccactagctcaacaggactgatcccagagtttgtttctcaaaatacatcaagcgagtgttccactgaaaacagaaggcaagcaaagagaaacagccacaaacatcaggcacgagtctcagatccagtcccttataaaagctcacttccaccactcagctcaactcagaggtcacaggatttgcatcagcagaagctccagcggaaagaatgtggatgctgtgacattctgctgaatgatcccaagttcttttctgaatctggaaggaaaaggaaagaagtgccaaaaagttcacgcaaacagtgctgtgagctatttaacagatgcttttattatcaagagctgcagaggtgggccgggacaccaccacgcttccacagtgggaccctagcccaaaccagcagcctgagaggccgggacaccatgcctgaaactcactagcaagaacactctgaaaaagcaaaaatgacagcagatttacaaatcaactagcatatgtggaaagtgcatttaaactatcaaaccagaacccaccatattaactcaggacttcggtcctttttaataatcagtcatgttcaaatactgacttcctttcagtgtagataaggttataaatcaacctgaaaatgtactacatattggaattaaacctcgtacctgacaatctgtgctaaacactaaacgaaatgtcaacacccaaacaggaagtatgacaatgactaggagaaaatcagcccacacccaaagatcccgggacacctgagggtgtgactgctgcactgctgagaggctccagcttcagcaggtgttggagccaagggcggcccaggcacccacaacgtatcagacacttgatgttatattttcacagattccacatagtaatccgtcttacaggcaaagacactgaaggcaggagccagtgggaacccacccaggacccaagagccctggtctggcgcaccaccttcgcaaagatgctgtgactcaggaaggcacggcgccagctgtgcctgcacggccagacaagacatggcttgcatggggacattaaagaaatcaccttgaggagatggcagcttccctgcttgaagacagcataagaacctaaaatgtgtcaacaattcccttatacaaaatgtcacttttgtaattggctgaatgtactaaaactttaaaagtcgagcaagctttaatgacaaatccaagacccaaaattagccaggtgtggtggcgggcgcctgtagtcccagctacttgggaggctgaggcaggagaatggtgtgaacccgggaggcagagcttgcagtgagctgagttcgcgtttgcagtgagccgagttcgcgccactgcactccagcctgggcgacagagcgagactccatctcaaaaaaaaaaaaattccaagacccatctgctggcatctcctggacggcacagaggagagacactgggatgaaagtcaagtggcatttttttcacattcaaacagcacctctcattaacatgtggaacacagcagagtctgaccctctcaacgcactcgaggcgtggaagaaaaatgtcctacgtgtgtactctaaggcagtgtgtgaagtcccctggaactgaactcagaacggagacctcagagtctggactgtacgcctgtcagcacccatgcccctcagtcctccctcttcacacagagaccaccactgaatctgccagtaacaaaggagctgggtggcagggaaggtattctggcaaaatcctgaatggtcaaacggtaaattactttatttcagaaaaaatgaaatggctttgtaaacactcaggctcacaaaaaagaaagtctattagttctatatgtagcaaaatcccgaaattctgacacagagtaatgcagcatgattagaatattctaaacgaaaatgttaaatgaaaatcttgatattaaaaggcagtacagggtagtgtttaagagtgtgaaccctggagcctgggttcaaatccatatttcataatttactgctgtgtggtttaggtaagttacttaacctctctgttccttagcttcctcatgaatgaactaaggataatgtcagtacctgcccagtggactgttgtgaagatcacacaaagaaagtgaatacgacatgctcgtaacagtcctggaacaatcattattaaatattatcgtctgctggggtaagagctgtcattaatagatggacacatgaagaaaacagggtaaattctatgagggagactcagtcactcactcactcattgccacattctaaaagacgacactgtggcaggcactgggctgggcagggaggaagtgccaccgacaaagttcctgtcctcaacaaggggaaggtaactggcattccggggtgcgcactaggtgtcagagactgtggtagaaaatgatttcatggcagggcgcggtggctcgcacctggaatcctagcactttgggaggctgaggcaggcggatcccttgaggttaggagttcgagaccagcctggccaacatggtaaaaccccatctctactaaaaataaaaaaattaggcgggcgtggtggccggcgcctgtggtcccagctagatgggaggctaaggcaggagaatggcttgaagccgggagacggaggtggcagtgagtcaagatcgcaccactgcactccagcctgggcaacaaagcgagactccatctcaaaacataaaacaagaaaatgatctcgtttgcttctcttatcagcaaagtgctacatgtccggatgaaggagttgaggctgacagccagaaaagaggccatgggcacgagttaggaagggcagcagggacggccgtggcttcccagcatgtggcccctgcaccagttccgggctcctcaactctccgctgtcctcaccacacatccagctggtgggaaggccgcacagcacccagccaggcccacagcaggcattcgagaaacgtctatccaaccaaaccgaatgggaccccttctccaggtgttccgggcagtcatcccaaagctgccggagccaggctaggccagggcctgtcctagaggacggttcagatagaaacgcccctgggaggtgaccctcaccccaggagagcctgcaacaccccgacacccactgcctcgtcgccggtcctcccatgaagcggggaggctgaggtgctgtgacgacctaacagtcttggtctgggcttataaacttggaaagtctaaagacgtattcttctgagtaccaaaatataactggcgaaagaaggaacctcttaaaattacattaccaaagataggttttaggtagcaagttctcaaccgtgtgtagtctgctaagatttataaattaaaaacaaaaacagagcccaggggaacggacaagggctcgcgggcaccctccccgggacgacgtgcacacaggcctgcgggacaagaaggccagggtcggagtgggactgcgtctccctgcccttcttcccggcggaactcgccctcctcacctacaggatcgccctaaatgcgcacgaaatccttccctgttcccggtgaggtggtgagagagggcgaggccgcgagcaggtgcgcccgtccccacttcctgctcagcggggcagcaggggggctggggatctcgggggggccgggccgggggtcccgggatcgcagttgccgggcgaccgcagggggaagggtgcgggggccgcgggacccaggcccaggccccacgcccggccggaactttcctcccaaagtttccccggggcgccaggctgcggcctaggccgggcgcgcctcccagtgggggtcgaggccggggccggggccggggctggaggcggcctgcggacccgggtcctgcccggcccgccctcccctccccgccccggctccagccccagcccgcggcccaggccccgcagctcgccggggtcccgggccttcgcgtggcggcggcgggggccactcacctggacgcgggtccctcggttgccggccgagctcactgccgccccgcccccgccccgtaggcccgcgacccactgacaccgaggcggaagtgcggcccgccgcctcgccgactgacagcccgcgcccgccactcgctgcgcccggcgccgccgcgtcggccgctgcctgcccaatcagcgcccggcccgaggctcgcgccggggggtgggactatgctaatcccttcgcgaagggcctctacctgtgccccctcagagccccgcccacgcagcggagtgacggcaaggacagccagtcacagcaggagagaggcggggttatgccgcccctgagccaaaaggggagggaggcaaggaggaaagggcgtggctgcagagagcagagttgacaaacagtgagtcaggtggcccggggcgtgggtgctccgccctcaggtgcactgcgtcctggcggcagtgcgggcctgcgaggctacccaaagccctgggggctttttcctacaaatgctggggaccgtgcgatagctggggcgtagctgcttccactgtcctaccaaatcctgaatatcgtccacctcctttgcatgccattcaccgccaaccaaaatccagcgccaatttacccctccagctgcatccccgaccgtttcaccaccatacttaaaacc

SEQ ID NO: 9159 - DNA, 6000 bp, Homo sapiens
agatgcataacagtaaaacacgtgtagcatgtttgtcagagaagtgctgtagaatgaaggagatgctaaggtttttcagtaatcctaggtctggcatgttcccctggggttattttccttcatttgtggtccagctttggccactcagagactaagcccatgcatggggaaacctagattctagggagtacgggtgaaggcaggagtgattcctctttccctggggaacccatctgtccaccttcactagagttcccatctcaagagccatctgagattcaggagatagtggttctgtcatatcctctgcccccaaattctctgtgtatctctgggcaaaatcaggttcctctctgtgggcctcagtatcccgtctgtaaaaatgagttaggtcgtataatccatggcacttcttcctgctctgaaaactcttagtgctctattaatctcagaccaaagccacatatcccttcctaaggagccccgaccaagtgagcagacagtcccaaggggggaccccagcccctccactgacacccctcacctctcaggaagactgtgccctattctggcctccagccaactctctgtggtgaggttcagagaaaacacatggcaggcacccaccacactgccagcctggcactggccagtaaaaagtgacccacagctcagagccccaggaacctggctgccagtacagcatcccctccccaccaagaaccctggggagatctggggccagagaaaccctctcactaaagcagcacaagatgcagggctagggagggtcctatttctaaactctgagtctctcaaactcataccccctcccaccatatgtctcagagagaaaaaagctcagagaagctgcctcctgagtgtcaggatttgggaactggaagagatattataaattattttccactctccacttattgtgaaattggagtctgaaaatggaaaggttcatattttcttcatggggtgaacttgtaacagactagggactagaacccagccccttgacctcctgtccgggactccatccactgaaccaggacaaggggctggttggaggaagctagagccaccggactgggtcctcttttcacaggaggcaggcatagcattcctccttatggctcaatccctctccctccgcatctccactgcattacccccacaacctaacccacccaccgctggctgtggccttatgggcccagggtcctgaatgccctccttcactcttcttcttccccacccgcatgccccatcctcggacccaaaactgtagcagtgaattgatgagtccagcgcaaagcacgccccacacacacagggctcactgcggagcacgtcaaccaccactgtctccgtggcaaccgggggtttaattaacaggctgcagccccatcaccatagcaacagcaccccaacagcccctcattcctctgcagactcagtccatcttccctctttcccaatccggacccctttctcactgcactcaccccccgatccccaccccacctggagaactgaggcctaaagatcgctctggttcattgagaaaaggggaggggagaggagggggatgagagagaaagagagagcagcctgtcaccatggcaactgcagccccgttcataaccagtttgttgccatggagattcctagggctcaccttgggctgaggtaccgggcagtgaggttctgagttctggcttggggatgagatgactggagatctccttagacagactggaaatctccagatccaacatatataccaataacagcattattcttcccaatttacagatggagagactgaaacatgaggtttgtgtctagagaaggcagacagcttcatccttccaaatcatcacaaaatcttagcatttttatggttagaaggacccttagatagcttcctgttcaactcctttatactacagatgggtatattaaggcccagagaggggaagaagtgtgcccaaggtcacaccacagagcctgagctagaacacagatgggctacattgtggtcttgctccatcctcccagcataagttagctccctctccctccatggggacacatcccaactcctgttagtcctaccaggcccagggctcttttcagggccctgactcccccctgagaaatggaggcatagtagaggatcagataaaggaataggggagcatctcagagttgtaacaactgtcaccaggtctacttctgttcatccaagtcaccatcaatctcccatgacacaggtgaagcaagtgaggtgtgtggcccgcaatccagggttagtggcagatttgaggcttggccttgccttgcttctttaactccctgtaagtcatgttctcacctatggctcatcctctggcagcagaaagccccccaagtggcaaaccccactcatttggcccagagtaaaagataatacacacccacaccatctcccccaacctttcccagtcttagacatgctgctatccctccctttgggtgaagacaagaggtggaaagagaatctatcaggggctagagggctgacacaagaacagctatgggaaagataccagcagatgctgggttcccctaagtagcccttgtctacttccccatacagtgatctgccagagaggaggtgcttgagactgcttcaggcttaaaaggttaaaagtcacccaaatcattgtccagatggaacttccaatacactcctgcacacaggtacccacccctcagatagacacagaaatgtacacatcagcacacccttcaacgtgctggcaatatagtgacacacagaagcactgagtgagtcactgaccaccccacaggtcatcaaaactaatgggggatgctcctcccacaagacacacacacacacacacacacacacacagcctctgccacagcacacagcattccaggctcatacacacctgcacacccaaagcttgggggctgtgtttcacttcgaccccagcgaagtagtgtgagtaccggcatctgagagtgtgaatgggaaaacagcaatcaccttgggacatgagagagggccgtcttattcctaagccaggggatgaggagcgagagaagagaaggcaagggtagagaagcaggatcccacagccaccctcctctcatcttatgagcattacacacctactaagtgccaggctctgggtctggaactcagaacacaaagataaaggagatggtccctgtccttgagatgttccaatggaggatacccataagtaaagaaaacgactgccatccaccgggacatgtgcactaagggtgcagtgggtgggccgaagaggaaactgaaaaggtttttggaaaaggttaaatgagctataacttacagaacgaataggagttttcctggctgatggaggtgggagaatgaatgtggacaagaacaccagaagcaaatgaggaaagagaatgacagacttaaggctttggcctttattttgcaagtgatggggggcttctgtggaggagggctagggaaggactggaggcagggaggccagtggagaggatgtggtcgtggccatgtgaggcttggagcagggcgatgatgacagaggggggaccgatgctgccagattcaggataagtttcagaggtgaatggccaagacgtggggatcagttggatttgctggaaagaaaaaaggaagggttgagaatggctccagaatttcttactttcaaatctgggaggctggtaaggtcattcatgaaaatgagaaaagagattatgagaaagatgaagagtggaaggagcccaagaaatccaagtggccacaaccaggaggcgttcggttcccgggactggggccattcggaattccaggcctcaatttggtcatctgtacaatgaggaggtccgccagataaccccctaagggttactctaggggtttcggcgcttgggtttgcttcggggcgagctcacctgcggctcggcagcgacccctggcggtctggggaggcttctcctcctccttctcctcctcctcctcttcctcctcctcttcctcctcctcctcttcctcctcctcctcctcctcctcctcctcctcccctcgctggggccactacaagccgattcgccttgttccttccagacccgagggcctcagagccagggagaggacccctgatgagtgccccctgaggggagactgtgcacgcgcccaggatgctacttctccaccgaaggccagaaggatctttcccctcccctatactctgtgccctgcgtgtaacttccattacaagaccctgcacagggcccgcgaggaagacgcccccaaccccgcctgagctggctcctcccaacccttacggagctcgagcagacaaggagctaagtgggtccccaagagtcgggatcagcgaccctacggcatcctccctgaatctcgctgcccaggatccatactaacttccctgcctcccgtctccttcccgggatccccagtcgctgtccgctaagcctccagggagctagaggattggaggatccgccaggcaccgaggacccgctgacctggcacctgcctcggcaaccctgactcagttttcctcccgccctcgaccccacccccctcccaggccccactcccatcctcctggcccaactcattccctactagtcccgccctttcctgaccccaaaccaacctagtcccgccgcctcccctttaggggctcctgaccatcccccttcaacacacagccccctttttccctagttccacctcctcactctggtcccgctccctactcgagatgtccccgcccctttagtgccctacggcctactctccaccttgaccccggcctttccatcaccagacccgcccccttcgcctccgtccaaaccccttccctggccccacccctttccctcgtggccacgcccacctcgcgtttggcccctccccctccacactttgcgttccgcggccccggccccttggtttcctagtcctggctccattcccctctcaggcctagggctgggacccctccccgcccccggtcttggccctgcccccttcaacagacggtccgccccggcccctccccctcgtcccgcccggccctggcaggccccgccccctgcggcctctacctttgacgtcttcccccgggaggtggcgggggtctgcgaccgaatgccggcgggactctgggtcagggcttctggcgggccctgcggggggcagcgaggtgaccgtgaacctgcggctcatggcgcggaaaggagccaggcggccgcggcaaggtccgggatcgcacaagtggctgcaaccaggctctaggagggagaaagagcggatcccccaaccccctccgcccgcccgccccccgcgagacgcggcgccgcgcagggtcctagtgcccgctgtgcgaagggttcctgaatctggccacttcgctgggaggccctgggctccccagtgccacccgaagggcctgaggaggccatctgcaggtgagagtcgtccctacaacgggggcacctctgttagggtctcctaaacacctggggctcattcattcattcattcattcattcggcacatgtcgatagcgctcctgtgtttcggtcaatggtgcgagggatacgtcggtggatgagatccactggcttcttgccctcaagtggcttaaattctaataaggagaaaaagattataagtgagcaaatgcatagatgagatcatttgagattggatgtatgtttaaaactagggccatgggataatgggtaagagggaggactactttaggggtggcctgagaaggcctcctagaagatgtggtatttgagctgagacctcactgatgagaagggccagctatgcaaagatctagggggaagagttctctagaagaagaaacagcaaatgcagagccttggagtgagaaggagtcccgactg

SEQ ID NO: 9160 - DNA, 6000 bp, Homo sapiens
gttgcacatttcaaccgttactcagaaaaccagcctcttcacaacagaaaagttgctctggagggtcggctctgaggtggacctgtgcagagcctctcctaagtgctgatgtggccacgccctcatacaatttggactacaaggaatttgctcctacagggtgaccctggagcctggtttgtgcttatggtgtgactgtaatatatttttggaaaggagggaggggacttagccacagacagtaatgagaaactgctcgtggcagaagaccgcctagaggcccgtcatccgtttccaatccctggggagggtgccctgatagctgaagccagaccctcccattccagattcgaccctggcctgggtggggttgtcagatggacttccaccgggccccaagcctgggagcctgcccgccacgcacgacccccgggctcgaggggggcgaaaagcccaggttgtcgcgggcgcacctctccagcttgtgcacgtggcagaagacagaggcggagcccacggagcgggccgggcggcggggcagccagaggccacggctctcgggcgcccccggggggcgcgggctgggggtgcgggcagcgcgctcgggccagtcggcgctggcaacgaggaagcgcaggaccaccaggttgaggaaggcgccaatgaccgtgagccccaggaggatgtagaggaagctgaaggccacgtaggggagcttcctctgcagcgcctcgccgctctgcagtgccacgaagtcgccgaagccgatggtggtgagggtgatgaagcagtagtagtaggcgtggaagaaggtccagccctcgaagtgcgagaaggcgacggccccgagggccagggtggcggcacacgccagcagcccggccaccaccaggttctccgtggacacgcacgtccaccgcaggcccaggcagcacttggccgccaacaggaggcgccgcaccaccgcgttcagccgttcgcccaggctctggaaagtgaccagcgtcagcgggatgcccaggagcgcgtagaacatgcagaagaccttgccggagtccgtacccggcgcggcgtggccgtactctatgcagggagagcggaggggagggctgtgagcgcccagctccagctgacaacagtcccgcccgcagcctgcctgcccggcgtgtccctccccgtccccggggctggaagggcatctccaaatactagtcctaactaggtcattcatcaccccaaacttcagacaacccaagtgtccctcgactggggaatggataaacaacctgtggggcatccaaacaccaatttttttcagcaactgaatgaactcctgtaacttgcggcaaccaaggatggatctcaaatgtctaagctgagtagaggaagacgagctcgaaagcctacagaccgcatggttccctataaatgacactctggaaatgacaaaactgtggcaacagagaacagatctgtggttgcttgccagtagctggggttgggggcaggcttaactacagaaggcatggtagaattttgggggttgatggcaatgttccgtcttgaccgtggctgcagttacgcggcaggtgttcatctgtcaggagtgtacacaggaaaatggtgagttctactgtatgtaaattatgccttgatgaaaaaaaagcaaaactttccccactttccagctacaccccgagctgcttccccagtcagcatgtcctctccacatgccttttctcctgactacctccccctccactgctcagcctgcccgcactgaacaccttttggttctgattgtctggcgtggcgattcttactgggtcccttcaactactatagggaatctaaacacgactgggcaatcttgagtcctggaacaccgcgccattgcaggggaatgaatgggtatctcattgtgtgtcttttcctggaaagaggagcagttgctttcatggtattctcaaaggagcctgtacgccaggaagagtcaggaggccaagaagaatgcgcctcctctaacagattggccctacctgccaaaaagtaaaaaatacaaatcctttgaccaaggtagttccacagttaggaagttagcccttcaatatacacacatgagcaaaaatatgtgtgcacttgggtcgtcattgcagcattgtcggtcatagcgaaaatgagaaacaatgtaagtgtccatccaaaggggcctggttaaataaattatagtgccatccaaaccatgggatactacagagtagcagttctcaatcgagggtggttttgcctttgaggggacacttggcaacatctggagacattctggttgtcacaaatgggggtgaggagtggggatggctgtgtgctactggcatctagagagtagaggccagggacactgctaaacatcttgcaatgcacaggacagtccccacagccccaaatgtcagtagttccaatgctgagaaaccctacaaacaagatgacgcagctctttagagactgacataaaaacatcaacatatattctataagtgaaaaaagtaagagacaaaactgtgtgtataacgtctatacaatgtgtgtgttttaaaggaatatataggcagagaatatatccagaaggacacacaagaaactggcaactgtatttgacccaggaagaggaatttatgagctgagagacagggtgggagggagaattccttttcattccatacccttttgtgccctgtgaagtgtgtactgtgtgcatatataacttattcagaatatcagcactacatacatttaaaggcctgtggctgcacttccacatttctgttgcatagccctatcactttgcctctctgttacttttgggagaaagggggtctgctcatcactagactttgagctctttgagggcggggacgatggtggtgtagtccccatcaccaaggtcctgcacagagcctgacgtagaccagaagctcaatgagagtttattgaatcaaaccaagctgaagggggtgctggtgagaaacagaagagtctctttaggaataaaaggcttccagctgtttgggactgtgccaggttttggcagagagtgaaatgaataatgataataactaataatgacagtaactaacccatgtatgtactctgcatggattatcagatttaaccctcccaatgactatatgacatgttgttattcccattttatagataagaaaactaggttcagagggacaaaactgcccaaaggccacaggcctgagctattaaccagcaccctccacaggcctgagctattaaccagcaccctccatgggcctgaactattaaccagcaccctccacgggcctgagctattaaccagcaccctccacaggcctgagctattaaccagcaccctccattgcttcagtgcctctctcccatccaagcaaagcccaaattcctggggcctggcacctggctctctgcaaggctggcttcagcggactagaccacagagggtggtggtgcccccaagtggccagaaaaggcaaaattcctcctgtttccacttgagtctcttacatcagcctcccagacgtacctcagaggtaaagaaccagggtaagaggccaaaaccacatggcaagcctccaaagaatgtagataaaggcagagagaacaagttgatggcatcccagaccagtgggcacggtaaccaggagggtctcaggtgtaccaagataggaagcaggggtgtccatgtggacaggagggggcaaaagagctgaataagagctggagccacgttggcaaataatgaattattacaaatgaatagtgcctacttggcttcaggcactgtgccaagcatgttacatgcttgacctcactgaaacctggcagtcacccagtgaggtaggaacaattgcattttgcctttggggaaaccagggcttggacaggtggaatcaattgccagagaaggcaggtggcaatagagatgagaccagaactccagtctctgtgattccagaactcatacttttaactccactgcaaaaaccacagctcatattcacttgcaagagcattatggggaaactttctccaaggcactggctttcggactggtgatccaagccccagggggggtgccgggacgttcacagctggagcctggggagtggctggcaccaagcctggagccctgcagagcccacttctctccttcctgttcccccaggtttaggctcagcaggtaccagccagatggtagtcatggcaacagctggtggtccagatgctccaaaggaactgctctgcatccctgagggcagagtccagagcctgtggttatcagtcattcctttaacaagtatttattgatcatctactgcatgctaggcacgggtcatacagcagtccctaagacagactgggtccccattctcatggggtaacaataacaattgcaataataaaaaaatgatcttttctttgtagtgctctgtatgtgtcatgttttagcacaggccttgtctgtgcatagtctgtctcctgaataataactctcaccacagccctgagataaggccgattagcgacactgttttacagaagagaaaactctggctcagagaggttgagcaactcgtctaaggtcacacagcaagtgtgaggcaaccaggcaaggaaaagcaaatccagccacttggtctcccagccccgcttcacctatctccaagccccttggacgttttctgagcactcctgggtcagccttttggcaaactcgatttactgattcctcccgtccctgcctgcgtgggctgacagctccattcagcagaggggggcaaaggagaccagggagacgagggaggcgaaggagatgagggaggctcggtgagccgaaatgacccgtccaaagtagctcagctgggcgggggcagaggtgggaccgaaacccagaggcgccccgggacggctggggctggagcgggcgcggagggaggctccgggcggctcaccgatggtagtgatgacggtgatggcgaagtagaaggagccggggaacttccactggcggccggcgcggtggggctcagcctggagcgccaggcgctccagctcgcggtagtcctcggccgagaagccgaacttcctccggagagcgccccgcttctggaccagcagtcgctggcggccgctttccgcctcggactcgagcgcgtcgaagacagcagcgcccaccagcaggtaacacagggtgcacaggaccagcccggccgcgcgcacgctcggcctccgcatggcgccccggccccggtacccgccgcggtcccaacctgctccgtgtgcccggaccgcgcgctccgccccctccaaccccggccccacgcggcagggttgtgacgggcgaggcggggcgactgccgggaacctggaggctgggatcgccacgggtgggggccggaagaaccgctcccctgtccgcctcccactcgcctgcccggggttcatgtgtctgtgaatagtgagatctgaagcaaaggcccaaaccccgggcctgcagaagtcctgttcccgccactaactcatgttgtgacctcgtgccagtcttccgtccttccttccgtccttccttccttcctttttccctccctcccctcccccctcccctcccttcctccctccctccctcctttccttccttccttcctttcactcctttccccatccctccctcccttcttccctcccatccttcctccctccgtccctcccttcctccctccgtccctcccttcctccctccgtccctcccttcctcccttcgtcccttcatctcttcttcccttccttctctccttccttccttctttcattcagtcagtcaatcctctgacaaatatttaccaagcacctactggtgcaaacaacattcctgttgtaagtaaaagtgatatcctagtgaggagggccagctaacaaacaagaaactaatttaag

SEQ ID NO: 9161 - DNA, 6000 bp, Homo sapiens
actcacagttcagcatggctggggatgcctcagaaaacttataatcatggcagatggggaaacaaacacacccttctccacgtggcagcaggaagtgccgaacaagagggaaaagccccttataaaaccatcagatctcgtgagaactcactcgctatcacgagaacagcacggaggtagccgccccgaggattaaattacctcccactgggtccctcccatgtcacgtggggattacgggaacaattcaagatgagatttggatggggacacagccaaaccctatcaactagggatttgttgacttaatgcacacgagccaaccataccccaacaaagcaggtactagccttatagtacacgtgaggaaactgaggaatgaggcatctcattcatgttgggaatattaattgaaaaacctgtcagctcctgtggcccttggagttccttgaaaataatgttatacgccaatacttattatagtactgtaaagatgcaccatatcccatatctcatttgtcagtggaaagaacacagatttggagccaggtaaaagtacctcttgctacctgtgacgtcttggacaagttcccaccttttggggccagtttctccatctataaaatggggataatgcctaacttaagagttattttagatccaatataaaaattcccagcccaatgcctggcatgcagtaagcaggcaattatattatttttcctctctactagtcacaactacccaggaagggaagttttcactcattcctggccatccgccccatgctgggcacttggggcatgctgactgtggtgaatgaaacagacagggtactggtcctactattatagaatgtttgcttcataagaacaggcactgactgtatcatctctgaacacaatggaatgaagctggcaataacaaaagaaaaattggaacatttacaaatgtgtggaaattaacagatttctaaacaatcaaggggtcaaagaagaaatcacaagggaaattagaaaatactttgagatgaatgaaaacaaaaacacaaaataccaaaactgagagtgtgtgatgacaacagtgtgcagagggaaattcatagctgcaaatgtccatattaagaaacaagacagtaactatgtgaggtgatgggtgttaattagctcagctgtagcaatcatttcataatgtatatcaaaacatcccactgtatactttatacttttttataaaaataaatattcttacaaaaggacaggcgctgtgtctgtctggctcaccattgtacccaatacccaacagggtgccaagtacccaatacccaacagggtgccaaggaacacaaaaggcactcaaaatatgtttgttgattggagtttacaaggaagaaaggtattttcttatccctctcttcccttcccacccaaacatagcttcttctaagaaaagaaactgaggctgggcaaggttaaaagctagctcctggtacttttgcatccacactcagtttacctgtgccttaaaccagacttcatcaaacttcagtcttcacaagtcacttcaccatttttgctctacctacttactgcctgtgatagaaatcaactcagtttgtttagcggtataaacttaaaaggaactttagatcaatcacttgtcttagaaggtaaccacaaaaatacaaagcaataaaaataaaaacatgttaacatgaatttcagttgcctgaaagctgtaagtctgcttttttaaaagagaaattggagttaagcagacttttcattttttgatcatgaccctgaaagagaaatatatttgacatcaaaactcagcacatatccttggtctatatatacacgtgaaagtttcataaaacaatacactgatattttccatgctgtattctatttcattttttaaaatgctggttgtatcccattaaactggtttcaaaataaatataacatgtacacaacaacaacaaaaaaaaacactgggttagagggccagtaagctcagcgagtatcagcaactgagacttcatccttgtctcacaaggactaaaaagagaataatgttctcattatgtggttcaatgccacacccatgtatctgagatatacatgtcacaatctgggagaagcctgtcctcaatttactttaaatacccaattctgcctagaacatgacttagacacatagtaagctcttgagtgaagtgcagatgataatgacacgatcacataccacttaaaaatatcttaacacctttacttagatctcatctcatacttgtagcatttcttcaaatttactttgaaaaaagagcttcactgtgtgtggttgtcatacacattcttctacccaaccatggacctctttcttcctctcaggcgcacttcatctaatttttttagcactggcctggcctttttggaggaggtggagtagctcttcagaaaggcttcaaacacagtttcagtgttgggatgggtactgaggaaggccttctccaggacatagaggtctactcccttatcctctggaagtgctgaaatgaaactcagcccaaagtctatgagcacaatgttcagctgttccagggggggtttcaggagcatgttggaggtggtgagatcaccatgaatgaggtcttcatcgtgcattcgagccaaaacctgcccaattgtcttggctaagttggagagaccctggggagttttttcagtctccatagtggactgaatataatctcgaacagtcactgagccttcaatttcttccatatataagcagttggaagcatagtccacaaaaaagacaactggggcagatattcctgaaatcaagacataagtggttattgggttggattttttttaacgggtaaacttaattttcaaagattaagccagtttttccatctatatctacttatttcaggactattgaggaatgctacaggaaatggtacaactgaactcatctggaatattcccctgctcatgcccactgcaggactatgcctgggaacaccccacagctaaactgaggaggccatagcttcctcctcccttccaaaccaccctttctcactggacttcatttgtcacactcactctctaaaaaacaaacaaaacaaaggccgggtgtggtggctcatgcctgtaatcccagcactttgggaggcggaggcaggcggatcacttgaggtcagaagttcgagacccccatctctactaaaaatacaaaaattagccaggtgtggtggctcacgcctgtagtcccagctactcgggaggctgaggcaggagaatagcttgaactcagggagcgtaagttgcagtgagctgagattgtgccactgcaccactccagcctgggtgacaaagtgagacactgtctcaaaaaacaaaaacaaagagcaaggcacagcccagtcagagcagtttctactgatgaggacacaaacaggaggccaagcagtgtgctagcttcgaggttcatcttcgtagtcagagaggacagggttcaaatcccagctgcttttcttattagttgtctaatctaatcttaaaattacattaacttctctaagcctcagtttctgctactatacaaggaacaatagctccaataaactcaatgaatctttactgaaagtcaaccaggctcagtatacttttctagaaactgagagatgttatcaatggggatacagcaataaacaagccagctataatacaatctctgcttaacgaaacagatcatgaggctgaaaacagaaatatgaatacacaaataacttcatgaaatcttaagtctctgaaagggcagcaatgtgtccgcttgttggctactgaatatcccccacccagatctcccagcacttaacaatgtcctggtacccactggtacctaaaaaatactgataaaagaaaggcaagaagcgtaaaagtaaaaagccagggcttctgagtcagaggcataaggagctgagggcctggaccggccacttagtaaccgtgtaaccttgggcaagttacttctctctgagtgtcactttctcatctgaggacaaagtttatggtgctggcgcacaatgatgtttaatgaaaaaataggcaatttaatgaaatccaacatttattgggcactatgtgccaggcacacatttgaacataatacgtgacacacatacctcctctaatggtcacaacatccctatgacatggatactgctactatgtctcccattttacaggtgagaaaaccgaggctgagaggctaaataacttgttgaaaggctacacaagcagcagagttagtatttcaacccagggagcctggctccagtggggcaagtacttgtcattacatgtttcttaaaactaataaatggaaagataatgatcgaaaattgaaacgagtcaaatggggaaaccaaggctcagggaagttaaacatgttcaacattgagcaataatgacagatcccagatttgaaccaggcagaacggcctcaggacaaaagcttgacgctgcatggccacgtggtttcttaagacttaacgaatgaaaaaagggatgaaagaataacatttccgaaaggccggacaccgcagaaggcacagaaggagaaactgagggaaatccagcttcggagcgcaggggagtccctcacccgcccaggccccagagcctcggggccgcccacgccgggatcccggcccaccttaccagcgcggcgacagcggaggagcgcccgggcctcctgcaccgtccgccgtctgccaagccgcgcctccagcgccgggtgccggtagcccttggggaagcggtgcttgatcaccgccgcgcggccctggaagcggccacggaacacgcgcgcctcggcaccctgcttcaccagctccaggccgctcaagaagcggctgctccgctcccgggctgcggccagagcctcagcctccggggcgggctcctcgccatcggccggcgtagtagctctggccgccgccatgactgctcggcgcaacagctccaaccgatcagctgtctctgaaaactgtcgcgatgcttcggctcgcttcggaaatcctgggacttcttcggcaatcctgggacttcttcggctacccgaatgcgtccaccccggacacttccggcctgtaagtggttacgcctcccaacttttcggctctctgaagcctgaggttccctgcaggaagggctcttgtggccccgccttccgcctcttcggctatctccgtacacgttcggcaacgctcagtaagtggctcttcccgactccttggctctccggaaatcttcggtgactctcgcagccggctttgggggcccacctctcagttggtcgtctctttccggaaaacttcggcgcctctcgagaaaaacgtcggacgcgctttgctctcttcagaagtctcttccgggacagctgtaccctctagtagtctctttttggaactcctcttcccctgactcctacattccccccaaaatgtgctcatacaagtcagagtcggaagggtcagacaatgaaccatgtttccgacatcctcttaagtgctaggataactaccatttagtgcattcagaagaaataaggttaaatgatgaaaatccttacagaaaagaaaattgagactcagagctggcagagggggtggtaagatggggtggggagtgggggctggggaatccgggaaagtcttccggagacagaacctaaactgaattgggaataattaaactttttcagtttctacctgtttcattacaaagcttataataacacaggctgtagcaaattcttacaatacggaactttgcacacgcacacataaataaataaactacctatcccccttgtgacactgctggccgttagtttctttccagaattttctttcattcagtgtgcacactcacacatcgttgtggcgttttttccaacataaatgacatcatactg

SEQ ID NO: 9162 - DNA, 6000 bp, Homo sapiens
cccatgatcgcataggaggggcggcctctgctcctgagtctggcggcccccagatgcacagcatggagaaaggggtcccccaagcccaccctgggacacgtctcagagctttcccacgtgggtgccccgggaatgaggcggtgggacagccagctcaagggagccccagcgcaggtcggcgtacggacacagcatccctggctgagctgccgtgacctgtcctcgcctcaccgggctgacattacacgtggacagcacaggcctccactgcagagcaccccagaagccacccccaagagagcaccccaaagagctgccagctgcttttgtaaataaagttttgcggacacagccacacccatttgtgcacacacagcccagctgcttttgcgttgggactgcacgggccacagcacctaaggtatttaccatctgccctttacaggaaaagtcagctgcaaactactggtctggaccgatgatttggttctgcactgaatgaaaatgctgactgagcagagagacatttttctgaacattttttcagcttctccagaggatgcagcaaggacagtatggccaggggtctgctggggtccaggtcccaccctgggcttccgacagtgattctgtgcctgatttcccatctgtaaagcagggatcgtggcagcacccagatccctggctactgaggggatgaattcgtgaaggcgttcagtgcctggggccccccaatatatgcagctgctccttcaagcagcctcggaaaagcccctccgtccgaaccagaattctagatgtccaggcagcaaagaggtctgaacccaggggtctgggttggcatttgtggggtgttcagtggtgtccaggaaaatatgccaggatggtgccatgggagccgccatcctggtcacctcaacccacctgcccataaagagggccgggcccaggactcaccaccatgacatagcgcagccggtactggatggtgccgaagagtcccaggatgacgatgatgatgtggacaaagttggccaggatgggcgcccactggtagcccaggaagtcaaacacctgcctctccagggcggcgacctaggagcagggcgggcgccatgaagggtggacccgagggaggccccaggcccgccagccaggtactgggccaaggtgacaggatctcagcagggacttcctccccacacccgcccaccacacctttgtttgacgaaggacaccagggctgtaactcctgctctgtgaccaccaccgagcaggcactgagcatctactgtgtgcttggctcttccaagaagaatccccaaatgagcctgacaggcccccttgtgtccccgtgtgtcaccgtctgtccccggtgagcgttcctcccttgagtaggccccatcccctctgtccccagtttcctcatctggagaatgggaacaccaggggctgctctaaatcacgaactgtggggccaggtgacagacacacagcccagaaaacgccactcgggggggtcggatggccgggagggacggacgcgggttcacaagagtactggacgccgaggccccagcctgctgcctgcatctcggccttggggacagggctggtgaggctgctctctggcaggcaggcagcctcccctccacttcaggatattacaggactctgttgaactgccctctacacagggccgagagagaaccaatgagggggggagggaaaggtgcctgaggaatataaagttggtattttatatttaggagaccaagaaaacctgagcaaagccatgaccaggacgctaactgcagggactggcgcactcggcaccacccgtcaccagctccttcccacgtgctggtgaagcacaacccagagaagagaagatgctgtggaacccaccccatcccccaccccagccgccctatcccccaccccagccactccatcccccatcccccatcccagccaaaagacacctgggcccgggggaccactaccaccaagacgcagagaccagtagtggccctgaatgccaggctgtgctgatatttattggatacaagacaaaagggcagggtaaggagtgtgagtcatctccaatgacaggtaaggtcacgtgggtcacatgtccactggccagggggcccttgcctgcctggcagccgaggcagagagagaggagagagagagagagagacagcttacgccattatttctgcttatcagagactttcagtactttcactaatttgctgctgttatctagaaggcagagccaggtgcacaggatggaacatgaaggcggactaggagcgtgaccactgaagcacagcatcacagggagacggttaggcctccggataactgcgggcgggcctgactgatgtcaggtcctccacaagaggtggaggagtagagtcttctctaaactcccccggggaaagggagactccctttcccagtccgctaagtagcaggtgtttttccgtgacactgaggctaccgctagaccacggtccgcttggcaacgggcgtcttcccagacgctggtgtcaccgctagaccaaggagccctctggtggccctgtctgggcgtgacagaaggctcacacttgtcttctggtcacttctcactatgtcccctcagctcctatctctgtatggcctggtttttcctagattatgattgtagagcaaggattattataatacgggaacaaagagtaattgctacaaactaatgatgaatgatattcatatataatcatgtctatgacctatatctagtataactattgttgtattatatattttattatactggaacatctcgtgcccttggtctcttgcctgggcacctgggtggctagccgcccacgaaactcttagtctcaggcctccccatcgtgcccggaggacactaacctacgaggagggatgtctgccctgccggagccccggggggaaggtaagcgagccccccaaggggagcagttcttgccctggcccactttgcctacgccgggcacagttctgtgaggtctgggctggcggctgggacaagctgcacatctcggctaaggggtctcggcctgaggagcagcctcaggtctggctccagaatggagaccctgcagcacagaggggctgggggcgtctttttcatctcgaagccaaggctcccagaggctcagggctccatgacatgtggcgacatgcatgagcagggaggctcatgccaccatggaagcaggtgaccctggtggccctgccaggacccagccccaaaccccttcctgggcctttggctcccagggtctcctcaatgcagcagggcagagcctgggaattggacgcagcacagcccggctcagagccagcaaagttcacactgttctttggggagaaaggcgctcagaagagatgcctgggccctttgtcctgtagcttggtaacacaaaattctcacacttgtcaaaaaaaaaaaggggctatccaacaaccccgcccttcctcccgggccccctacccccatgcagtgactagagctgtggtcaaggactcttcttccccaaggcagaggaggcacagtgggctgccagattgccaacccggccaggacaaaaggcctttgacagctccctgctgcggttcagcagtgacccagaggctggccctgagaggacacggctctgcccagtccctggagagtccccaggtctgctagtgaagccctgcggccctcaagccaggatgactctttccctcttggctgcaaccaaatttccaagggcctgcatgtgcgcccatctgtctactgtccaccgcagaggtgaaacgggaacatgaccccacccgcccctctgcaccctgaggtcacatccgaccagcacagtcgtgcctcaccctgcacctgagactgaagcacccatttctcctgcccaaaccccagcaccatcaaccccagcacatcctcacaccaccttcaacagatggaaaccaatgtcactagtgtcccccaaagcagcctcacttcctgacgctcatgcatcaccagctgccactggccatgctccaaactggggtaccgtccaggctggtgcctgtccttcatgaggtcatccgacgggcactggagtcttcgagtgcccacccttgctctccccattcctgcttccagcccctccccaccagtctcctaagggactcctgccattgaggagccactcactgaaagataccaactgttccaaggcctgggatggtccttgggcccccagcctgttgcaggacctcaggttatctccgcggccccagcgagcctcccaggaaagcgccggaagctccttccttcctgcaggaaggacacgatgcctccgccgtccctaggtccgcccgcaagcctgtgcccctaagccgagcacaggacacccaagctgcacagccacggactccgagggtttcgctgctcaaaactctgaaacagccccttctggcccttctagcttcaagaggaggaggggggcgcgcggtccagctgcgctccgcagcccacaaagcatcgtttcctttttaagacgggagacccagggccaattagcatcgaagcaaagcagcttccccagcctggacaggcgaggcctttgtttagccccctcccccgagggcaccgggctccgggaaagaatccgccccccaggcgtcccagggagcttcggactccggggcagaatggaaacttggccgagggagccccgaccaatcccgacaccgaagacgcccgcgctgcgccccgggcatcggctccagccccttctcgcctccgcgtagctccacgccgggcggaatggggggcggcgggggcgggcggggccggtttgctcgcgggtgggcaggacgttctcaccccccgccccctacactcgcaaactcgcaggcacagcctccgtcatcgccccacccgaatctcagaatcggaacttggccgctcactcggcgcccggggccggctgcgggaaacgctcgcacagacagagacaggcgcgcacccgggggcgcacccggggccacacacgcctccccaggcgatggggtccaggcggccccgcccgaaggcttccgtccggccagcccatccagccgctgccccgcacctgtccccgccgctccggacccgcggccgccccccgcgcacgcacaccggggacgggacccggcgccgcgactccccacgccccgcaggcgacgccaccttcggccgtagcagcccggggtccgaggcatcccccctcggagctggcgcgggacccagcgaacgggccccggggcggagggacgcttcgggaccccacagccgccgtgggtcgggcaccgggggctccaggaggctcgcggaggggtcgccactcaccagctgaaaagcgcagaggacgacgagcgcgcagcggccggagcaggagcccatggtgcccgcctatacaggaggcccccgggtgccccgcgctcggcccccgcccccgctccgcccgctccccacgcgccgcagcctggaccccgccccctccgcatcccgttcccccctcctccccgcaacccccggcccagccccagccccgggtaacagctgcgctgcgtctcccctcccacccccgcctgcggcccctgggggcttcgcgccggccggagagggggaccgttcttaaaggggcgatggcgcggcctctcgggtagcgaggggcggcgccgcggccccaggacagacctgcagctgaggggagcccgccctggacgcggcagggatgaccggcgtccgccccctcctgcaggatgacctgcccagcacctgctcccgccgtgcgccctccggcgtgagatccccatcaaccttccccgtgtggggtctgagcgacccgcatccgcgaggcgttttctctgagagtctcagagattccttggcttggagaagtcctggacccgggtccagagctcaga

SEQ ID NO: 9163 - DNA, 6000 bp, Homo sapiens
attcagcggttctcaaagtgtgatccctgaatcagtagcgtcagtatcacctgggaccttgttagaaatgcagattttcagaccttacctaaggcctactgaatcagacactccatggctagggccctggaatcagtgttttaacaatccctccaggggctattggtatcagctcacgttgtagaaccaaagctctgatgcctgtgcagctgtggttggatggaggcctgtggagaggcgattatgaagtgggatggattgaagcacaggttcatagagacccaccttcaaatccaggctgtgccaattccttaccctgagattggatcgtgggcagagagcttcatttatttattatttttacttactattattttagagataggttctcactctgttgcccaggctggagtgcagtggagcaatcataggtcactgcagcctggaactcctgggctcaagcaatcctcccacctctgcctcccaaagtgctgggattacaggtgtaagccaccatgcccagcccagtttttaaatttaatacatatttattgacaacctattgtttactgttaaagaccctggagctacagctctgggacaaaacaatggcagcggccaacacttaaccgatattaactcatttaaccctcacaagaaacctttcaggtaaggtcctatcattaccccgaaggaagcacagatcatcaaaataacttgccccacggggctagtctgagagaccgctggagtgcaagccactaggataaactgacctggagctagttagggagacagacaaaatgcagtggagacacacaatattagcaggtcgtgatgcatgctatgaagataaaatagggaagagggtagggcatattgggcaggcgtgagggtgactactttaacagggtggtctggcaaggcctctcaaggaggtggcgtgtgagcagaggcctcctgaagtctcagctgcctcatctgtagaatgagggaatgattagctcacccccccaggtgtggtatgaatgtcacaagtctgtaaagcatagtagctgctgaacagatgggaattgttactgtttggaaaactgagttcaaatcctgactggtctggccacccagacaaagggcctgttgtgaaccttggagattacccttactctgtaagggccggaggacatagcaggggctcggtaaggtcactcccatctcccatccccccaaccccacttgccttccagcctggtgagcagcaactcttggggcagttggttccctggtccaggctgcccaggagtccgtgctgtttttatttttattgttctggcttcacagctgagacctctaactccaaatggctcttcttgcccagaaaaataggtcgttggcagctccagcctcctggcaggcctgcctgctgacgccagcccagggttacgggaagtggggagcagagcgcgggcagggctggaaccaggtgaagctgggctgtgcaggtgccagcgtgccccacagggtggccctggtcaagtcgtgttctgtctctcagtgtgtttcctcacctctgggaacaccgcggagttgctgaggcttcagtgagataatgtatctcaaaggacctagaacacacaagggtgtcatctacccccctgcaaaggccaaactccagataggccctgccatgccatcgtggctgctttcacatccttgtcactactgacccctcgtatcagagtttgttatccctatttcacagatgaaaagactgaggctcaatttttttttttgcccaagttgcataagtcaaattggcaaaatcttggcttccaagcccctgatcctctccttctcatgcccatttgtcttcttcccttgacaacagggaaggaatgtgatctgacttctgtgcaaggattcctcgggctggtgagtgaggaatcgacagaaggcacaaggtggaaatagggcgcccaggtgagagcggtggaggctcagacgagggcggaagcagcggaggcgctgagaagtggtttggccctggttgtgatgagaaggcccagcaggcaggatttgctgacagattgtgccctctaggagtaagaggaagagtcaagcagcaaaagcagggatgcaaccacccctggcttcccatctcacctcctcggtgagaccttccttgatccgttttcaaaattgcaatctatccctctcatcagcactcctgggcctcttccctggctaattccccccaccccgtagcacctgtcccatttgacaaactaaataatttacttatcttatcggttcgtttcctcccactagaatgtcagcttcttgagggcagagatttttatctgttttccagctgttgcattcccagtgcctggcacctagcagatgcttaatactgttgagtgcgtgagtgaacatgtgtgaaggcagttagattttaacgcagggcagcacagacctcctgctgtgcgggtggctgattcatgtcaattatctgccataatctctctgtgtggcctcagacaagttgcccctcacatcagtctacccatggcccgtgggtctcaatggcttctcagccttgaggttggccaaggatgatttttatgtggacagagaacaagggtcagggccccctccagggggagaggtgagggaagccctgctgagcgcctttgccaaaggtgctatatataaatagcaggtggttcaattattatccttccctaatctccagtttcctaatcccccagcaggtttgtgagtgtgtatgtgtcttgaggaacagtgaacagcagagccttctggaagtccagggcaggaggctgcctcttctctgacttcatcagcagcccccatctccactcccaccccagatggagtctggtgacagattttcccaggagcctccctggttaccttcatggtctagacccgatgtggcctgaagagttggagaccttccctgcacccacctcagataccaggataaccccagaacaatctttctcattggtgcccaattccacgctcctctctctccagtccaccctccgcttgcagactggccttttagacacataaatcagacatggccctcccgtgctgaaaaccctctaggggtctcccaactgcagaataaacgcaggctctttacccaggtcttggagaccatcccaccctccccagtcctgcatactgcgctttctctcctccggcctagccacctggggccttcccctccttgtgctgggccctcttcctggaacacctttctccccaaatcttcgccttgctgaccctacttgtgattcagcaacccatgtctcagggaggtcttactggcccccttatctaaatacgctcacccctctccttctctaagttcaatcttccgttcttcattaattatttctacttgtccacttacctgtctcccctagtagaatataaattcctcatggacagggacctcgtgctctcccacacccagagaaatgaaaattcccttgcacttcaaatgctgcccagaaccctgtgggttctcaaggactgttgtcaaacacttcacttatttatcaaatgcttatgttgcacttggtatgtgctaggctctttttaacatgtcttacaaatattaactcatcaaatcctcacaattgagactcacgctggcctcgtctcagatgaagaagctgaggcacagaagaggtaaggcactttccagtccacccagctcataacagtagccgggggatttgaacccacggagttcagcccatgttctcaagtgtggcaccttccctgcccccctgcacaacagcagggccatgccttcaccaggaggctcggggcaggaggggaggcagtggtgttactttgcacaggtctttaacctgggaatcaggaattcaaatcttgtttctaccccaagctttgctgtgtggccttaagcaaacctattccctctccgggcctcaactttctgtccatttacagggttgggccttctctcaccttgtgtcattcctgtcctcttaaccgccactgtgtgaaccaaaattctctcccattagcagcggggtcttgaacttgtgttcctcccacagtgcggagccttctgccaggtgaccacgacactggcactccccatcactgacctggctactacaggaacggcgttccctccgggaaaaccggggttctgtcctctccaactccaggcctctggccccggctccccttcccctcatcttcctcagggcttgtccttctcccggaacccaggccttcagggccccgctctcccacacacgccccggcctgggcctcccacccgcccagtccgccctccaccaccgagacacctggccagggggcctccacctccctgggaaggccccgacccttcccctctggttgcgcgccacagcccccttctcgctccctctcctccccgcgcctcttttccaggcggcaccgaagtccttcctacacacacgctatttttgtaccatcatctcttcttcctctccccttccccctgcgttcacttacttccttcttttccttcacctcggcccggctctgaaaggatcgggcccctccggcccgcacccacccccaagaggggccttcagctttggggctcagaggcacgacctcctggggagggttaaaaggcagacgcccccccgccccccgcgcccccgcgccccgactccttcgccgcctccagcctctcgccagtgggaagcggggagcagccgcgcggccggagtccggaggcgaggggaggtcggccgcaacttccccggtccaccttaagaggacgatgtagccagctcgcagcgctgaccttagaaaaacaagtttgcgcaaagtggagcggggacccggcctctgggcagccccggcggcgcttccagtgccttccagccctcgcgggcggcgcaggtccgggcccggcagggacggggaggggcagagcgggaccggtcggggctggggaccagccgcgcgggcttctgaacgggcacgctgtcggagccggaggctcgtctagtcccgagccccagcgggccgcggcggctcgcggggccgccttcccgggacagcagccggggcccgggcgccggcgcgggggaggacgctgccctccccggccgggcgcgcagctcgcagccctcgctccctcccccggggcgcgcaggcgggcgctcgctcgcagagaaggtgccggcggggccggagccccgaagcctccccgggcggcgggaagacgggaggaggggaaagggaaggagggagggggtcgggctgccgggagggcgggggcagcggccgggactgcgggccgggagcgagcccagccgcccgcgccgtgtggagcccgggcggggcaggtgggcagcggcgggggcggctccgcgcggccgggctcggccgtgctgcccctcgcccctgctcgcgcggtcctctctcccgcgcggtctgtcggtctgcgcgccgcctcgctcctcgctcctcgctctccccctctttctccccctctcgcctctccgtgtctctggctctctgcctggctcccttgggtctgtttctctctcctgccgcctctctctggccgcccctggctttatttctcgcgcgcttggggtctctcccagtctccgtctctccatttctcctggggggcggggagggggggtctccaaaaaccgcggcggcggcggcggccgctccaggcgcccgttccggagtcggggggaggcccagccgggaggggggaagggggggagccttagtcatttccccgctccagcctgctcccgcccgagcgcgcactcacggccgctctccctcctcgctccgcagccgcggcccatggagcccgccggcccggcccccggccgcctcgggccgctgctctgcctgctgctcgccgcgtcctgcgcctggtcaggtaagcacccccccgctccc

SEQ ID NO: 9164 - DNA, 6000 bp, Homo sapiens
tcccgcagtactgagagctccatgagagcagactgtgcctgttttggctcactaggagtcttctgtgcctagcacgtgccggcacagagcaaaggctgaataaatgtttgctgaatgattaaataaaccacagctaaaagagttcctcgaagacagggacctcatgtcttaaattctgtgttcccaagagcctagcacagtgcctcgcaataagaagatgcttaaaaattttaaatacacactaacctttccttggaagtcttccttgatcatttcctctcctggtgttccctacagacctgacctgaagttatgtaagttggcctctctgcagaggttggcaccttacctcctcactagagtgaagtcctttgaaagcaaaagaagggaccctctgcctcagtctcccgagaatatttagcaaagagctatgcccatagcaggcactcagctcattgccacctctacaccttgacccattggtgcaccctggccgactagtctccttggctgttaaagacatcaattcttcacattttttctctgccctggcaaggtactccagtctaccattgagaaaccacagtaagatttaagtgagatgaacctcacttcctgccagtcagcatagtccatctcttaaccatagtaattagttcaaggctggcaagtgacccaatgagagccaacacaatgcttgtcaggacttctgggaattaaaagcattgtttcttataaatgatttttaaatttctgaatcttttacctctccatataaactacaagtgtgcaaagtggtaagtgtattgaagaatgaatgggcacagagtttgcccagagtaaagcaagggacccgactcagtccagggatctcctccctgaggaggtgacattttgacgtccacaaaataacgtgctggggttttgattggcattgcattgaatcaaagatcaggttgggaagaactaacatcttgactattccaatccacgaatatgaactatttctccatttatttagttatttgatatcttttgagttttgtagttcttctcatattacagatattttgttagatttacacctaagtatttctctcttctttggtgctaaggtaaatggtaacatgtttttaatatcttactattttgctttctctcttcctttcttctctcttttcttttcttgacagagtctcactctgttgcccaggctggagtgcagtggcacaatcatggctcactgcagcttcaacctcctgggctcaaacgatcctcctggctcagcctcttgagtagtaggcatcacaggcccgcgccactacatccagctaattttttatttttagtagagatgaagtctcactatgttgcccaggctgatcttgaattcctgggctcaagcaatcctcctgcttcagcctctcaaagtgctgggattacaggtgtaagccagtacctgtggccattttttgtttgtttgtttttttaagacagagtttcactcttgttgtgcaggctggagtgcaacggcacgatctctgctcactgcaactgctgtctcccgggttctagtgattatcctgcctcagcctccagagtagctgggattataggcgcccatcaccacacccagctaatttttgtatttctagtagagatgaggtttcaccacgttggctaagctggtctcgaactcctgacctcaggtgatccacccaccttggcctcccaaaatgatgggattacaggctattttcttttctgaaggaaataccacaggaaatgctgacttcccttagatggtgtggagtgaagacctgagagtccacacagtagtggccatttggggaacatgtggggagagtctgaagctaacaggctaccagggtaggggcaccatgaggaggctgaagactaagaaaacttgcaaagtccttggtataaagggttgaactgctggatcaaactttgcctgaaagtatgcaaccttggaccttgggtctcttctaaaaaatgagcaacattttcccttcttttttcttttttttttttttttttttttttttttttgagacagagtcttgttctgtcgcccagctggagtgcaatggtgcaaacttggctcactgcaacctctgcctcctgggttcaagcaattctcctgcctcagcctcctaagtaactgggattacaggcgcctgccaccacgcccggctcatttttttttttttttttttttagagggagtttcgctctttcacccaggctggagtgcaatggattgatctcagctcactgcaacctccaccttttggtttcaagtgattctcctgcctcagcctcccgagtagccgggattacaggcgcccgccaccacacccagctaatttttgtatttttagtacagacagggtttcactatgttggccaggctggtctccaactcctgacctcgagatccaccagcctcagcctccgcctaccaaagtgctgggattacaggcgtgaactaccgcacccggtccatttttgtatttttagtagagaaagggtttcgccatgctgacagagcaggtgttgaactccagacctcaggtgatctgcccacctcagcctcccaaagtgctgggattacaggcatgagccaccattatttacatacaataaatatgtaaataattatgtaaataatttgtatgtaaatacaaatacaatgaaggctcccttcattatttaaacccatttgaattgggttttctgttgcttgactgtgcaagactcctaactactacgctatctcttcttttttcctctgagcctcaaattcagactcatttcctccatcaaggcagaggaatcatgggaggtgctcatctggccttaccttccaacacagtgagggccagggccggcgggggcacaggaccggaggtccctcagggtcgtcgctgagagcagtgcctgcacagtcctcatagaagaggtgcaggtaggagcggaccccataccacttgccatcctccacgctggggccgcggctgcagctgcaggaacgattgcagctcggcatcatggacccctggggagcaggtaaggtgcagctgacggagggagggattagtgggagctgctcatggtgaccttcataagccccctaaatctttgtgccccacccgcttctcctcccactcgagacaccctacacgcatagcacagtctggccttttggaatcccagcctgtccttcccaaagcacactgcgaatgagccaatgcactgaaggccttagcccagtgcctggcaattggaggtgtcaataaatgtgcatgtttactctggaggccacccagtacctgggactgtgggctctggagcctgaccacttggactggagtcgtggacacactgcttcctggaggcgtgaccttagacaagtgcttccacctttctgggtctcagtttcctcatctgtaaaacagacctaataatcatacttctttcatacagttactgtgtctaatgctgagaaatggtagctgttgtgattagtactgtaatttttttgctattacttccatcttgaactttttagtctccatatctggaatgagagagcctcaccctccgctccccttcagaccccctcctgggggtaattgtcatggctgacacttgggctggagttcccaagctgcaaggctataaaaaggtcctccccaggactgcccctgaaagcctccagattccaatgaattttgactccattggaagtgaaagtcagggtccctcaggattaaagactcttaggcttaagggctgttagatttccagagaaacctatcaaataacctttttttttttttccacaaaagtggacacggatcttgggaatggaaggtacttgtatatccatatacaggtttggcccgaaccaaagccaggaggtgttgggggaggactgggcttctaccccagtctccatgatggccctcagccttaattagcagcctcctgcaaaatgaaacaatgtgcttgttccaaagggtaagataaaggtcctgacagctgcccctcacttccaatcagatgtggtcctcaaatccctgcatagagaaactcaccgaaacagcacagagaaacacacagacatactcacaaagcatacagagacatacccagataggtacgacacacacacacacacacacacacacacacacacacacacacacggttggaggttctgcttggagtcacacggcacacaagattgctgtcaagaaagcctgtccataaatagtggctgtacaccctcctcacttacaattcagggaaaagaagagcggggaaggaaaggaggaaaaacaacaacaacaaaagccacgacagagaacgggaaaaggcagagactgaaagcgaaggaccgtcggaggaggagggcgagaggtctggagaggagggctcgccggaggaggcgggcggggcgggctgtgcggagggtgcggccagcgcggtacccgccccggcgaggcgctggggaggcccgggtggggagaagaaatggggcctgggggacggtaggagcctccgtgcggagaccactgttcaaggccacaggtgaggaggtgtggagggggcttcggggctgttgacctgggtcagctcctcccctccaattcaccgcttccgcgactccaaatagatggaatcactcagtcctgctgctactggagagggaaggtgaccttgacgctgcctcccgctcggcctggcccctccgcctggcgtttcagggctgcacggagtaggtctggcgggcggggggcggggcgcaggcacccgggacgagggttgccatgggaaccgctagggaggcgtccccagcccgggagccgggaggagctcggtgggaggggagcgggaggcggagggggctgcgctgtccgacgtggggagactgcggcggagggaggaggcgaggggcggcaggcacgggcggaagtgacggaagccagggcccgaagatggacggaatctgtcgcctctgcacagcctcattcagttgtgtccttcccagaccctcagactcgcccactacagcgtccagcgctgcccgggcgggggagaaggggcgccctcccgggggggatgggtagggggtgtcggccggggaaatcaggccatttcccgcctcccttccccaccggcacccgcgccactcttcctgacaggaccaccgatgccctgctccacaccaactgcgtccttttccctagagagaaactgaggcagagaggggtaggaatgggtttttgaagtgttggcgggggtgggggtgtcctttgaagcctctacccagcctatcaaccctgaggcgtcgaggggcgatggggctgtttctgtctcccgcccctgctgcttccctgggacccccacctcccaaagccgaggctcaggcgcaaaggtcccggccctggcgggacacggcccgggctgaggatgcgggcagagcgcgggggttctccaggggctggggctggggcctggccgcgcgtggggcagggctaagctcacctctctgcctgctgtctccgccgagcaaaggcgggtccggttcgcgcctgcgccgcagttcggggcgggggagggggcgccggcccgcctcagggcctggctctgcagacggcggccgcctgcagctcccccggctcctgtccccttccagagttccctgctcgctcggacaccccagcgccctcacagagacccctcggactccctgggccccagcccctcacgcagcccctcagactcctcaccgaagctgccgtcactcccgcagttccccacccctcccgtggaagacccatcccttaaccgagccttcctctcctcgctgcaccgtcagtcccttttccaggtctccatccccctcatggagccccaccccagcgtagaaaccgcttctcctcgccgggcccccgccctcttcacagg

SEQ ID NO: 9165 - DNA, 6000 bp, Homo sapiens
caaaaatgtatcacccatttccatctcctctaaaaaaatatgaaataagccttaaaaggctgtcatagaaacccattattaagccaataaaaactaatgaagaaattatgtcatttatccaagatatggaagaaccacctatttacagaaatcctaccaatgtcctagaccttcagaaactacatctcactaagctgaccatcaagccccttcaaactgcatctaaggacaataataatattcaaacatcaagaaacaggcacaggttccactcaacaccattattccgtggagtcttccaggactaaattgttttatagaatctttgctatctttgttctctagaaaatgatatcccaaagactctaaaataaaaccagcaaaacccctgtatttgttttccattgtgtcataacaaattatcacaaacaaaacaacacaaatggattatcttacagaagtcagtgggcttgactgggtctcacaagggctaaatgagggtatccagtgggtgggttccctgctggaaactctggggaaaatttgcttccacattcattcaagctattggctgaatttagttccttgcagctgtaggactgagttcccacttccttgctggttgtcagctgggactggcctttcctactagaggctgcctgcattccccgtctcacactttcaatctggtcccctccagtaacggcaggctgagtccttctcatgcttcaaatttgacttccccttctgcctcatctctgacaccagccagaaaaagttctctgcttttaagtgcttatgtgagtagaataaacccacccagaaaatccaagataatctacctaagatccttaactttaattaaatctacttaacatattcatgttccagggtttatagtatggaaatcgtaggggagccattctgcttaccgcagtctgccttctggtttccaaggattcatctctctctcaaatgcaaaatacatccatcccatcccaaggtcccaaaggtttcccatctaaagcttatcatttcagaagtcccaaatctcattcatctattcaggtgtggatgaggttctggggacaaaacagtaagtccaattcctggggcacaattcctaaagaaacaagttctctactcccaacataccactgtgagacatgtagagaataacagttagacattccagttcaaatgggcaaaatgtaaaagaaaacagagcctccggtccaaagcagtttcaaaatctagggaatctccattccatttcaaagcctgggaaaaatcctctccagcttttagctccacccctctgggctctcctatctccgtctgagtcaccctgattcttttatgaaaagcaacacattcacatgtgagtagttttatcagcctgcttcctatcagtagaatttggggggtccaacagccctattactttctgtctctttcaatccaaactagaactgtttatgttggcataaaattctcaagaacctaatgggctgtggaagtattccacatgggtccactccattaaagttcacattcacaaataaaccaggctgcacatttaatactttgcttggaaatctcagctaaatatacaagttcatcacttgcaaatttggctttccatataaccataggatacaattctgctaaacttagttgctactatgtaacaaggatcccctttctgccagtttccaataagaaagacctcacttctgtctgggccctcactagcagagtcattaacatccatattgctactaaaagtatgtcctaggccttttcttttttgacagggtctcactctgccacccaggctggagtgcagtggtgccattaccgctcactgcagccttgacttcctgggctcaagcgatcctcctgtgttccaggccttttctatcatgcccctcaaaacaattctaacctttatctactgccactttcatttttaggtaatagtaccccactcctggtaccaaaatctatactagtgttctactgctgccataacaaattaccacaaatgtagtagctaaaaataacacaaatttgttatctcacagttattgtaggtcagaagttgggtgggcttggctagctaggtcttttgcttagggtctcacgaggccaaaaatcaaggtgtctcaaggttgcattccttggtggaaactgggaaattcacttccaagctcaatcaggttgttgaccaaattcaggttccttctggttgcacaactgaggtccccatttctttctggttgtcagccagggactggtctttgccactagaggctgcccacattccttctgataaactttccatgtggtcctctctagcaaaggcaaatggagtccttctcatgcttcaaatctctgatttccttttctgcccatttctctgatcccagttggagaaagttctctgcttttaaggacttaagtgactagattcggcccacccagaaaatccaggataatttttctattttaagattcttaaccttaattacacctgccaagttccttttgccatgtaacacaggatagctacagattctggggatcaaggtatggcaccttgggaagagggagatgtaattctgcctactacaaatccaagtcctatggaagggtttaaactcacttcctaaagaaaatcatccctttctttaacagagtgtgaagtaaagatgtatatattttacttatgtgaagtaaagtatatatacatacatacatatgtctttacttatgtgacacaaagatgtatgttcagagatagagacaatagtaaaaacaaggactcactctggatgagtgagtaggaaaaggacgcgcagtatggaaaaggagttgccacctgtttcatcctcaaattgcaaggcacttcacccataactacttagaaactaacccatgctcctccttaaatgtgtatttctcttctctgtattccacaaaggagtacataactaggcttttttttatttttaaagaaaagtcacctcacggggacctaactgtataatcagttgattaatcaatctaagcaaatttccaatcttgcattctttcttcaagtcatacaccctcccgcaatagcaaaccaaagccaagtatttcaaagtcacagaaggacaaaaacatgccctgctaagactgcaggtgaacttttgagaataccacggaggagaactagtattggtactggactttcagccccaggtccaccaagccagtaaagccaaatgacttacaacaaaaccctacaacaactacaaagatactactctaaagccctgtctacagtcaaattcttgactataaattttacttagaacagaagagccccaaatataccagctagtccctttacagtgacaggtaaaagctacttactacacttactacctgccagacactgtagtaagcacttgacacaaattgtcttatttactcttctccgtaaactcacaagctagaaaataccatcatcccccttttacagacgggaaaactgaggcttagagagtttaggtcacacagctaagtagcaatggccctgatatttgagaacctaggcagtctggtttttaaccactgggcctacactgcactcctcagatggaatgaagtctccaattcttggaaaaatcttcccttcttagttttcttttttctttttgaggcggagtctcgctctgtcgcccaggctggagtgcagtggcggatctcagctcactgccacctccgcctcccaggttcaagcgattctcctgccttagcctcccgagtagctgggattacaggcgcgcgccaccaagcccggctgatatttgcatttttagtacagacggggtttcaccgtgttggtcaggctggtctcgaactcctgacctcgtgatccacccgcctcggcctcccagagtgctgggattacaggcgtgagccacacgcccggcctctcttcttagttttcatttcctctccccatgtcccattctcgtagaattaaacagctgaaaagtaatcaagtcttcccaaataatttgccaccttcttttcaaaactctttcctccacacaaagcaatagccaagatgcaacttctcctgaccctgactctgcttccccaaaacaaactacagaagctccacccatcacctgcttaatctagcaatgttccaacactgcaaaaaacacacaacgaaaaacaaaattgaaaagtcctactctttcaaaaggtcaccaacatatgtatacccttagccaagctttctctccatacctctttttctatccaggctcctaactagtccttaactccaactccagacgttctgccccacgtcttggtcccttccccctttcgccccagcaaccccgcctggggttctctccacctcgcacccactctgcaggtgggaagctcagccccgcccagagggaccctaagaaggcccctactccagctgcccagtttcgcgggagggttcactgcacactacccagcaggcaccactccctccgcaccctcccccagcacccccctgcggccccacccctcaagttcccttccccctctgacgaccccctcctccaagttgtcccctagtccccacccagttcagtcctctcctctgcaataagctggactccggcagccggttcccaccctcacatcggcctctgcccccaaacctcgccctccgccctgaggggtggcccctgggcctccccgatgggctgcaggggcctcgcttggtttatgtgtgaaggtgggggcaggggaaggcgacgggccgctcaggagtctgctggaagcgtgagggtcggccgcgctccgctgccctatcctgggcccaccccacccgccaacgacctcgcctggctgctccctaggtacctgtggtggaagcggcagcggcggcggccgctctcccctctgctcacacagacaatatggcggcgatggaggaggagacacacggctcggccgccagccgcagggaccagagcgaggctgcagccgctgctgccggaagcggaaaccccctcctaccaggaggcggggcgagacagcttccgactccgcccccagaggaatctctctgaatgcggccatgctgggatgtcctattgtaaccttagggattcagttctggcctagggtgcaaaatggaaggaatccccaacgcaaagcagaataaggagacttgcaatagttaagcgcattttatttcaatagtgttaacaagtgacaacagagagaacacgaacctcccattaggtgaacagttggtttgacccaagttaagatggcggtacccaggtttcccacacttcacccagctggcccccctttcttgaaaagaaccatgcgcgacctgcagagctgtagagccaagcattctgggagctgaagtctcttttgctctgacccctcgttttaaattagggtttcagcaacactttctattcaaacttggagttcggaagaagtgaatgaaagttggaccctaggaagggcatggcgcaggagtctgagaagtgaggatactagctctcaagagaccaaggcccaattccttcctcctacaggagtcctgccaagagctgtgcgtccaaaatacagtgtttttttttccttctatctgcctcccacccctgctctccttgcccgagctacctccccaaaacagccacaaagcactttctaccatgcagagctcatcatggtctccctatggtcaaaaatctcccatggacctctttatgcaccaaagatagcccaaactcttcacttgacattcagagtcctccataatttggccaaaccctcctttccagcctcctattctgccactctcttctcaaattccggaagattccacccacaagactgcaaacaattcctggaacttagctgtgttgcctccctccctttacactggcagttacttctcttactgtcacc

SEQ ID NO: 9166 - DNA, 6000 bp, Homo sapiens
gctctcagcccgagagaaacgcaaaccaccccgcccctccggtgcatctagagagccagctgccctttccctgggagcttagccccctcaggccctgtccctgctctaacccacaacaaccccgcaggggaggaaggggggatgttgctgccagaggccttggcagccagggtgtgaattaggccaaggcgatcagccgggggataatgtgtccctggagcctccggctgggggcaggcctggggagggtgtatgcgtgcgtgtgcgcctgtgtatgggtcagtgcccgctattttaggaggaggccatgggggccagagttctcttccgatttcctcatgctggcctggtcagtcagctgcatctccgggataggaggccctgactcctctgctagggtcttttagaggcgaatccggctgacctcttcctccccctcctctcaagccaggacagtgacctgggaggagctagtggccacgtgcgggtggctggcacagcccagactgtgggaactggggtgccagcctgtatccccgtgtgtgggcagctgacacagcccggcctgtgccacttctagaagcccacctacttccctaggccccatgcacttacttcccagcctggctccctgcaaagcgctctcagcgcagtgcgtggaaaggacgcaggatctctgagaaaactattttaagcttgccagcccctgggcctggcctggctgacctactgtggcccagcaaatgtccccagggaggcctggagctgggctgggtgggtagcacccctccacattaggggatgtcccagtcccggcttccaggccccactcagaatttggaggccaggcaggaccatagggtctcagttctcctttctcttcagattccagcccaggcactgcctggcaaagccgagtccctcctcctggcacctgacggctctgaggctgccagccacagccacatgcctgccctgcacccagccccgccctgagcacctgcctgctccccacaccatcttcagctgcctcccctgccacaccagccccccaagacacctgggactctctcctctatctccaaattcactccagggtctcttcctcaagctggatgaatgaatgaaaggagctttcacttctttagcttgaggcacagactctgggatcagcatatgggggcctcagctgtgcctggtacaccccaatttgcatacctggtgacctcgcacaggcgagcaggcaggaagccattgctttgtatggggccgacaatgaaggattgtctgagcaagagggagccagggtgcggcagcagggccagcccagaaggacctgtccctcaacctgcttgcacccagtctccacccactgaacctgggagcgtggggaggacgggtgaagccacgggtgtgtgcaggtttactcttccttccgactcatcatcccatccatggaactgaaaactctcctgccattcaagggcatgtttgagaagaagacggaggctggctccaagccacgcaggtcacgggcctctctctgcctcagtttccacccataacagagacatcatgagaatgagaatgagccactgagcgtcctactcaaagtgggcccagtcagcactggagttcatgggaaacagactcagaatggaaatccaccctgtccggccccggagccctgcaggccctgcctgccgcaggtccccactgctgccctggcctcctcagcctccttccatggctggggtggaagtggcttgccctgcccatgctcaggacccccgctgtgcctcggctactggtgagtgaaggcgtaagtgatgccacaactcatgttttcctgcatgtggggggacccctttacagacccgtggtgttcacagctctctttgtcctctggggaagaggaaaggacctccccagttctcaggctagtccttgggcacagggcctgcttcccagcctgctgtgcagagcagccagggctctgggactcctgagggtgaaggtgaggaggcaggggatgcccaggacctccctcctccaggagagccctgtgcaccacaggaggcagggcgggtggtgggagggaagggcgggcagctcagaggtccgccagcaaaggggctcaaacctgacccccaatgtgtgggagagacaagacccagaagggccctcggggagcttgagaggctgcagggagcaggttctgtccagatgaggaacctgcctggcacagctgggccactctcctcccaggtggcctcctaggcccatgggtccaaatctcaggtccacagcgcctcccgaaaggcagagtccagtggcaaatgcaagggccccaagtgagcctggggcagactggacgacacacgccacccaaagcatcgcaagctctccctgcggcttgggccagaggggcaatgcctcaggtgccccccaaggcttgccagattagaaaaaccaccaagaaaaggcaaggtccgtgggcaggaagggcctggctgcgcgtgggagggagaggaatctgggctctctggcacccaaaagcgaccccagccactggtgccaagtctcaccctacgcttgggctacgtggggagcggcttctgcagaaggcacgtggtttgaaaaagcagtcaccttccgccagaaatgtagtcccagggtctaattctgtgtgatgctggtgggaaggaggctactgaaaagaactgaagggttggagacagccggagaccccagtgtctgaggactgagggtgaggctgcgggtgaggatgagggtgagggtgcgggtgtgggtgggtcctcacccgcaccctcatcctcacccgcaccctcaccctcaccgtagcctgaagggccagcaggggccagagaaggcagcagggtccccaggaccaggttgttctttgtagtcccagtctgcttcctctgcagaggcccacaggaggacacgcccagagtctgttgtcccagcagcagggccagtttcctcctcacacccctggcagggccaaggctcagagtcacccagaacctgttaacctagcatgtgagttactggcacctccctccctgttcaaggggtgcaatccccacgtgcccattccaacaagtgggcaagacccagatcctgcctgaagtcagctgacactcagcaagctcactggggggccagacagtggtccatgtcccagaacgaaggcaacagcaaggtctgaggactgtcccatgtccttgtccaaaagccaacagtgtgcaccttgccacttgcaaatgaggcagtcatgtggctcgtgagggaacgttttgtggcctctgtccacagcccgcttgaggaagcaggagggctggcctggcgtggctctctcccagagctccaagggccctgctccctcctgcccccagcaccaggctgcacgttggcttttctgtggctcatctctgaccacctacaaccatctgctggggagagcaccaggacccaacacgttccagtggacgagtccaggaagccaggaatgtatattggctcagcagtacccaccccagaaatggattaacactcatggagacatccggatcgaagaccttgtaggcacaatactaagctcgatgagttaacttttcattctacaatgggctgagaaaaattttgccatttggaagtcagaccgacctggagccaaaactgcaatggggcttggtcaagccaaggggcccatcagagccccgaggagagccggcctctctgggcttagtctagcaaggagagcatgtccatccacctggccacccttcacctggcccagcctgccctgcctgccacgtgcccagccagctctccaccatgggagggacttgcccagcacctgctttaggggccacacccagtgagctacagattaggtcacggccactcgggagggaagctccctcatgaagaattttccaggcaccacctgctgaccttgcccagcaggaaggcaggacacagcctgctgagggcggtcagggcagcctggctgtggtcagcgtccaggtctcaccgagtggccggcctctgccctggctccctccagcagcacagagggaagtcgggctgtgtggtctcggcccgagcaacatcctactggtgtcctgcgatcactgacaacccagaacagacactctggcccagtaaccgcaggcccagctcttgggacgctgttctgggtctccggcctgaccctgcagtcgccttttgcctctttaagaacagagtcgtaaaacaggagcccaagcctggatcagacaaacctggagtcagacctcttcagcacttacaagctgtgtggcctagagtcaatcacttaacctcttggtgcctcagtttactcatctataaagtgggagtgataatggccacctcgtggggttgctagggactgaatgagacgatgctcaaagcaggggtaccatgcccggcacattccagcactcaacacctaacccctgctgtcactgtccttgtcattattaccagattcacaagcggagccggctaaggccaaggagctgtcctctgagatccatttgctcccgctgctgggaatgaaaacgtcgctgacaccgggctctgcagagccagtttctgattagatggaggtaacccaagttccaaaaaccacagctgaggagcagcagctgacaagctggttgcatggatgtggaaaactaccgcgttccagccgcctccagacagaaacaggacgcatagccaggtcccacggcagctccaaagagggccttgcacgccaagcggggcaccccccagcctgagggttcaccaaccacgcggaccacgcggaaacctagctgggcttctctctcccctcggggcgccagtgcgggaggcggtttctcccttggaagtggaagtcagatctgcttccaggttcccggtctagggccggtctagggcagctaagcctgcctgctccttcctttccatcctccctggtcaggggagcccaacagcaacgcgagggcacccgaccctctgcctgcacctggagggcgcccgggtccccccaagccacggccaggacgtcgcgtggtggggcagggaaaggggcgccgccgctgctggaaactagccctgtgcgctccgcccgcgctcccctcccggagatgtctcgagcgcctctggcgcgaacaaagcccggccgcccccgagaaacttccgtgcatgaaggtttcctccttgactcggcagcagcggccgccgcaggtgggtgactccgcaactctggagctccgcggaggcgcgttcgtccccagctggatctgtggggcctgcgcctgcgcgcgctccgggccacctgcccaggtcacctgccccggccactccgacagtccctgccagggccgcagcccctgctcacccgcttccccccggcacccgctgcagcgtggggccccttcgcctcggtcctcctgcgggcgactcgggagctcctacctgcgcagccggcggcgggaagcggcgaatttggcctccgattccgctcggtcctgccctcccccgcggagaggctcggggcgctcggccggtgcccaggcctcccgcccccgcgcgcatccccccggcgctccagcccctgcccacgatggcggcacctgccgcgctcctacgccagcaggtcgggccctgtgcacccgcgccagctccccgctccccgcgcactcaccgtccccgtctcgagggcccggccgccgcgccgcgcagcgctccacgctctggcctccccggcagccacgcgccgcttcattcatccgctggggccgcccccgccgcagagggaggggcggggtttcctgcgcggggcccgcctcaccccccacggccaatggcagcggcgaccgccccctcctcccccccagggcacagaggcgggaacgcgcggcgggggaccagggcgtctctctccggagcgctgccgcc

SEQ ID NO: 9167 - DNA, 6000 bp, Homo sapiens; identical to SEQ ID NO: 954

SEQ ID NO: 9168 - DNA, 6000 bp, Homo sapiens
agaactgggaactgcagatcagaaactgcaaagctcaggcctgcattatagttatggccttgctccccacttactaaggatctggcattagccagcttctttttttcttttttttttttttatctccactagtcagtaagaatgggaataataccgcactagattgctggaatgatcaaataaaacagttagttggaacatgtgatgtaagccatgtaactatgaactgtgattgtgatgatgaggaagtggaggaggtggatggaagtggtaaggatgacaagttttaatgaggctttaaaccctttgtggaaaccatctaaaatcaaacattcgcatgtttttaaatacccataacagtatctagagcagtggttttcaattagaagcatttggaagtatgcacagggaatgggagttacaattttttgatgtcgcatgactgagactactactagaatataatgggcaagtatgccaaaggttctgcaacacgtgggccattcccacacaccaaagaactgtccacccaaaatgccaatagtgtcctgttgggaagcactgatgaatgtccaacacagaggaagcattcattaaacatttactaaataaatgaacataacttatactacatatttccttcagagcacaatctcttggaaggctcattcttcttcaccttcccagctccccaacactgaacctgacacacaagcatttagtgagttgtctctcaaacattccatcaagacatcaagacaatctattaaactgcaagaaattctaacttgacatgggcaagttaaggtaatgatgttcaacacattctctccaggtataaaggaaggctggaaagataatactaaaacctagatgtcctatggaaataaacaaagctttgctccatcaccaggtgtttaatttaaattttgaaacatgatcattccaaaaacaaaaataagaaaaggcaataatttataaagatttatatgctttacagaggtaaactaacccaaagacatacttttcttctgagtatcagcttgaatgtcaaaattaagccacttggctatctatttcttctgggggaaaaagccaccagaatgtatcatattacatacttccatgtttcaaaagaacaaaagtcattttctccaggactgacataatgagagccaagcaaatgttgaaagtagcaaaaggttgcaaaggaactgaatgaagaatagtataaaacaatggcaatagagaaaagcatgcatcatacagtagtttaaagattagatcatttttcctaattcagaaaaagggcaaacgagtatacaataagcccatagccgggtgcctgtattcccagctacttgggaggctgaggcaggagaattgcttgagcccgggaggcagagggtacactgagctgaaatcgcaccactgcgctccagcctgggcgacaaagtgagactccatctaaaaaataataataacaacaataagcccatagcattaaagaaaatgtatgtagcaatgggagaacttttcagatttctaaaatcatcagaatagaaacggtgaattactgcaaatatacttttaactcatacatttttaaaacactggaaattcaattgcaagaatccaaaaaattgactgtttgaaagactaagaaaaaataaccaaatttaatttcataatagaagcttttcatgtctcagggctgccaaatactgctagattcttaagaataaattatctataccaatataaccagaaactgcattagaggggatctgtatgacgtggcgtataaaagaaaaaattcccagatgaaagagcgcatataagcaaatgaacaaataaagaactctcattcaaagtaatgaatacattttgatatcggaaagcttctcaatctgtgtctttaaagaagttaactacaacaaaagcttctcaatctgtttctttaaagaagttaactacaacatctttgaactactaacaatttccatttatgtatgaccagctcatctgaactaagtgtcaagatgaagctaattttaatgcattttgtttttctctgttatatacataaaaaaaaaaatctggtaacgtataggctatttaaatgaattcttagaaattcatagcaggcctctagtggtatggaggatataatgaattttatatttttttaagtactggagtttttttcacagcaaggaggaggagtatcacctgataatacagaaaaaaatagatcacaaatagataagaaccaaaatatttcttcaggatgagcacttgggttttagtgcgtataaagaagttggatggaatggtttggatcaattttcattgacagccttgcttcctagccacctattctgaagtgcactcgataaaaagagaatgtctactaaaatgaccttgtgtctacacagcttacttccagattacaagactcatctggcatcacaggccaagcatattccatacaactggacacatgacaaactcagagcaattgattactatgtttaggtttatacattcataaaaaagtaaaatttgaaccatcaacatggccaagcacagatgttgttggctctccctcaaaaacttattgaggctttagtgttcttaattctattaccaaaaaaaaagcaattccaaaaggaaccatagaggagttgaagtcattaaaaatgaggaggcctttctgttttaacttttcttacatacatatgcaaactcagttttaccctgaaagatgacatctaggaaaaagtccattttgtaagcacctactgaaaagagaactttctgtagtattggctgacaaaatgcagtttatcccaaactcttaaaattattacaaacatggaagtcttaacacagctccacttattttaaaagtttctcaaatagaatatgaccccctcaccttcttccaaaaatagttaagtggaatattttaataattcatgtctacagttccctttaataatttcattgatttattatgataccaagggtatttcatttggaggtctaaaatatccccttctttgtgactaagaggtaaatgcacatttgaaggggtgatatgccttatgttcttcgagcaatgtaatctgctgtgtgacataaattttggctctgatctcacactgaggttttcactccataggcacctgcttgcaatttaaattgaaagaatcaaaacttggtcttggataaaggaaagatccaattttctgtctgtgtcctcaacgtaaaacaaagattcaatagtagtatacagattgccagaaaccacaggctaaagagatgtggcaatttcctgaaagattttatgtttggggggtgggggcgggaggggggcaggtagggtggaaaggagttgtgggaggggagagagagacagagagagagagagagagagaggagggagagagagagagagagaggagagagaggagagagagagagagggagggagggagggagagagagagagagagaagagagagaggagagagagagagagggggagggagggagggagggagggagggagggggagagagagagagagagagagagagagagagagagagagagagagagtctgcaagcccaccatgatggtctctcaagcccgctcagacatctgcccaccatccactgcaagcctctttcaaatggtcacttcctattataaggttaaactataatcaacaaatccctttctttctcctaactcaaaactgtagtttcccatctccttaaagaaaaggcactatccaccatttgctttctattgttaaaaggggcaatgcgtatcttcttttctttatggcacaattattaatattactcagaaagtcctacctttacaagttataataagtatcaacatttatttgaaatcatactgtaaaatttaaaaggcatccatatttatgttttattctcacaatgacatctccaggtcttcaaacggaagactacgacacaaatggcctgccttcaccgtgctgcaatttcttcaacaggtaacttgcttagcctgtgctacgtattcatactgcacgtggatgtcactgaatgtcctttctcttccaatacatatctgtatctaaaagcacacggtttgcttgcagattttcttccttcccttctcctccctatgggaagctgcccactccaccccgaaaacactgtcccccaaagcaaggggacgcgctgcaccctcggctgtcaccgcgagggctcggcgcgcatgcgcggcgcgagcggccgggccccacagccgcaggtcgttggtaaggcgggtccgcggaccccaggtcgagcccagcggcagtgcaggatcgcaagcggcccggcaccggcgccgcaggttgttggcaagcctggtccggggttttaggttgagcccaagcggcaatgcgggatcgccaccgggccgcgcgggcttgggagggtgacgcccgcgaggacactgcggcgtccggggcgggcgggcacactcacaatttcagcatccactcgccctccatcaccagcgtccagttggaggcggtcatgggctggacccggctctgctccggcggcagcgcggcctcctcggggcctgccgtcgccgccacagccgcgatccaggcggccaggagcgccgttagctgcgggccgcagcgcccacccgccatgttgggcgccgagcgaggcttctcggcggggagtgtggggaagggcagcggccggcccgcagcctcgctcgcccgccgggtttttcaaggaagcgggagacgcaagggccaccccgcctacgcctagcggcgcagactggcggtgctcgcaatgccgcggaggacgccacctcttatcgccgcttgcccgtcgaggccacgccccctcccgcctccacttgccgttgcccggggtgtcggttacctcagcaaccaccgccctttcttcctgaccgccaagctgacaataaacagatgacccaacgttgcctaagttagaacatgcaccgctgctgcccaggctccaataagggcagggttggcgcgtgtgggcttctctaaagggaaacatggccagtaattttaaaatccatcccctcttcaatgatagcaaatataaaagcaacgggctgcaaggtacacgtatgtttaatgaaaaatggagggacgtggtgagtatctcctgctgaagagagaggaaaatttaagtactctgcatgtgtatattgaagcatcactaatttaggatattgatgaaactagcctatgcaattgcattttttttacaaaaaatgttaatttcatagaaactcttaaaaacatgggtactagccgataaaatgagtcaattaagactattgccacctgcagtaaaatggacctcacatttctcttgactacagttttgtcagatctaaaatgagggtagccttaagtgatttccaaatttctttccaggtcacattagatgaatctgtaccttgggaccaccacaccgttaatatataagactggattacaattaaaggatgaggaagctttctcaaagggtgctttgtatgtgtttactagttgtgcaaaccatgaacctcggtaatgtggttaatagaccatgaaaaggatgtggtttctgccctcggcttaaaacaaagacagcaataagactaaaagtacttcagggcacatgagagcaaatttcaatcaatacttataggagagggaagttaattttgcctgaagagaagatctggcctgcattatgcattaattagtattagctaaaaactatgtggacctagcccttatcattaaaataaaacactcaagggtttacaaactattgaaatttaagaaaatgtctttgcaatgaatgctactaagactcactgttattaagtacatacatatcaattccataaactcaatggaaaacattttactgtgcttgtaaaaagaagtgactcataaa

SEQ ID NO: 9169 - DNA, 6000 bp, Homo sapiens
gtagaggcacaaaaatcacttgaacccgggaggcagagggtgcagtgagccaagattctgccactgcacttcagcctaggtgacagagcgagactcttcatcaaaaatgaaaaacaaacaaaaccaaaaaaatttctacagggtgtggtggctcatgtctgtaatcctagcacttttggaggctgaggcaggaggactgcttagactcaggagtttgagaccagcctgggaaacatagcgagaccttgtccctactaaaaatcaaagaattagccgggtgtgatggtgggtgcctgtaatcccagctacttggaggctgaggtggaaggactgcttgaggagatggaggctgcagtgagcgatgatcatgccactgcacttcaccctgggcaacagtgagacctcgtctcaaaaaaaaaaagaaaaaagaaacacaggcctgtaattatggaggagtctgagtctgggccacagataaatttgggaggtacacggagaagagtaaaagccacaggagtcaacagatatttatagcaaagcaagtaatggtaataatagcaactaatatttattgcatgttgacacagtgctaggtactgcactcatcactttacatagatttgcacatttaatcctgaggtaggaatataaccatctccaggttacttatgaagaaacccaagcatacagaatctagataacatctgaggtcacatagctagtaagcaaacagaaagaggagaaacactaacatctaaacagtgggtggagagaaaggagcccctgatacagtggaaagaggaaaatgctgagaggttagattgtagcagggacaggtggtgtcttggaacagggaagttcaggaaggagaagcttgcagggtcaagtgccagtgggaggtcaggtgagagaaagactgggaaataacccctgccaatttggaggtcactggtgacctcagtgagaatgctaacagtggcgaagaagagccttgttggagcaggttagtaagccacagaaagcaaggaagtggggacttggaaagacaactggctgagaaggcaaggagacagaggcaagcaagccagagggagatggatgggcaatgtctacactgtaatagtgagtgcgaggccaggcgcagtggcttatgcctataatcccagcactttgggaggccaaggcaggcacatcatgaggtcaagagattgacaccatcctggccaacatggtgaaaccctgtctctactaaaaatacaaaaattagctgggcgtggtggtgcgcctgtagtcccagttaatcaggaggctgaggcaggagaatcgcttgaacccgggaggcagaagttgcagtgagctgagatcgtgccactgcactccagcctggcaagagagcaagactccatctcaaaaaaaaaaaaatagtgagtgcgaaattatcagaacatcaatggtttccattaactgaggactctaggatctgtacgttgataagctcagttgattctaagagggaggcggcatatgacaacactgaaggcgtgttactgccactgacacattcagtccttaccacaagagggtaacaagaatcattaccagcttatttttaaaatgaggacactgaggcacaaagaggtaaagtaccctgtccaggccatgcaactagtaagaacccaagtcagactatgatctctggtactctggcttttgactgctgctcaaaacctctgtaaatactggcatgcaaaggaaaaagtaaaatctatgcagagaaaaggttgtaagaatgaaattaagtgttttgttcacactaagtattatttctgatgtctattggaaaattattaagtcaattcatcaaatactaattaagttcctactgccaggctccgggagatacaatatgaacaacgacacaaggtcactggaagacacaaagaataagcaaggaactgggggccggtgagcatcgcatgacaagggagccccttgatggggtgagaggcagcactgaagccagactacctgggttgtggccttggacatgtcattaaataacctgtgcctgcatgtctcctttaaaattgataatagcatctgccacccttggccaatggaatgcacagagggtaggaccaatcagggaaggaaatggaggctttaggttcaagtcacaggctctggagtcagacaaagatagctttgaattccagctctcctactcacaggctgtgtgatcttgggcaagttacctaacctctgtaaaccccggtttcctcacaggcaagtgatgagggtgaaatgagctaattctcatgcagccgcacacaacaggtgctggataaataaatgttaggcattgttattgcagtgaagacagttctggctggaggtagggaaatctcagaggagtgggaggtaaagcccagaggacttgagggttaagtgtaagtaagcaagactgagaaagggcggagaaaggccaaggtcagtgggaagtactcacgttggtgaaaggaggcttgtgatgctggtactcaatccaaggagggacagccaaggtacggtttagcagctttgcaaatgccagagagcccaagaagtgatcggcctggttcccaaagcgccctggaaatggtacattgcgggtgaggtgaggcctggggcatggagggcatagagcatgcagggctcagaaaggttgtggagccaggggtagaaagtcagggataccaaggagaactaggggagctggcagcataagaacaagtctggactcttgggtctgatatccaaggctcttcaggtcctgcaacaactgcttccgccactccaggtttcttgctgtttccccaacatgctctacaattcccatccccacccaatgcctctgatcttgctgtccctcagccagaagagcttctacctctatctccattcacctgcacatggacgggcaactcgaatgcctcattcactgggctcctttcaccaatcccctgccatactcactctccctcctttacctcccaccttggctctgagctacttcagttcttcaattttcctcaagtatctttgctcacttcctggccttcgtactggctgattcctcagcctgtgaatgcctcagaagcaaggaccctgtgtgattccttttcttaatcccagcatggcacctgttcattcatttcacaaatatgattgagaggccacaatgtgccagactctgtgctaggtgctgggatacaggaatgaacaagaaggacaaggcctctgcccctaaggcactcacagttcactgcagagacactaaacatgtaaacaaatacatgaaaaatgttgataattgccagaaagagatgaaaaaagtttggtgatagggtaatgaggagattacttgggtagaggtcagtgaaatcctttctggtgacatttaggctgagatctaaaggatgggaaacagctggtcaggcagaaatggaggagaggattccaggcatagggaccgccacctgcagcagtgcagactggaagacctgagcatgtgtgaggaacgcaaaggagttaagtgtggctgcagctggaggatcagcagagaagggagttgtggagatggccagtggaggccacatcattcagggccctgaaagtcatggtcaggagtctggaagccactgggggccttaagatcatccacttccacaatgatgatccaccatacccatttcaactgtgcacctggcatggtctttagattctcccctaccctgctctctttattttcccttagtattcatcatcctctatgaaactatgtatttattgttttatgtttacccctttttgggtttgcttgtttcgagacagggtctcactctgtcacccaggctggcagtgcggtggcacgatcagagctcactgcagcctcgaattcctcggctcaagagatcctcccacctcagcctcccaagtagccgcccagataactcccaagggactacaagcacacgataccacgctctgctttttttttttttttttttttttgagattggattttcactatgttgcctaggctgatctcgagctcctggcttcaagtgatcctgcctcggtctctcaaagtggtgggattacagaagtgagccaccgcgcctggcctacttattctcaattgtttgtcttccccaactaaaatgaaggctctacaaggacacggagtttatcttattcactgcggtattcccagtacagagaacagggcccggcacagaataggtgccccataaatatttgctgaatcaatgaaaaatcaccaggagccagcgtgggtcagtgacatcaagtcctgccccactaactccatttactggaccctggactggcttagacctcaagcaagtcacgtaacctctcccagcctcagttttctcatctgtcaaatggaaagttggacacgttggcccctctgtgcccttgcaactaaggcagagaggagaagagcatgccccgtcccgctctgaggttctctcctggacctgtgaaggtgtctctgggcgcatctgaggagtggcttttcctctcccggcctcagtttctccatctgagcagagggcttgggaggccttacccatgcaggggcagtagagcaggtaaccggccgggtcccaggagcccgcaggcatccccgggagcggcagaagcagcagcaggaaagacacgctcagcggccgtgcccacgcggcggcgcccatgtcggcccgggaacccgagccagccgcggcgcacagtcggggagggaaggagggacgcgagcgcccgccccgctcccagcggtccctgcgcgccgcccgcgcaccgccccggccgctctagcccgcgggcgggcgggaccatagagatcccgcggcaccgccccctccacgacccgagcgcccgctcgcgcggctcccacaatgcaccgcacaatggcccgaccgccgccactaccggggcctgagggggcctggcggagcccgagcgcggcccggcccgcagcgtggggccccgagcgcggtgagtgccggcgagggccccaggggacggcggggagaggggcgggaggccgtctcgctgcgtccgcgcgccctgtacccggagcggcggcgcgcctcatctcgggcccctcagcgcggtcgcccacacccccgacccggggcccggtctgcgccaacccggccccagataggccctggggtgacgaaaactctccctggaccccatacctgtgtctgggggacccgaggaagccaccggtcccctcccttccgagacctggagacgcagtcctgagggtcccccattcccgacccctaggctccctggagacccagataaggcgctgctgaccttaccagggacccgggtctgggggacgcagataagctgcacctgctccctccctccgacacgcctacccagacccacataaccccctttcctgctccagatagcccgctctgtaccctgtttcattttccagacttacataactccctttgaggcttccctcaaatatctgggtctggagaagtcgaataagccccacctgtagttccctcctcagtggccatactcccaggctttcgacatcttccatcccgttacccattttgagaccctcttgaaattcagaggatacacttctgactatccccatccccccagccttccagcccttataatcccccatttcattcttgtggggatcccttagagacccaggaaagttgctcatgattccttcccatcctcgctcttccttcccatcccagagactccctccagacttctccctggatttcctttgcttctccagccctcatccactcccatctctcccaggctcggggaattgaacctttcccacaccacagtggggtgatctaaaagttggcctgggaccaggctgtggcccaccttggtggggagaaaggggcctgttaggtggaggat

SEQ ID NO: 9170 - DNA, 6000 bp, Homo sapiens
ctactttaacagggtggtctggcaaggcctctcaaggaggtggcgtgtgagcagaggcctcctgaagtctcagctgcctcatctgtagaatgagggaatgattagctcacccccccaggtgtggtatgaatgtcacaagtctgtaaagcatagtagctgctgaacagatgggaattgttactgtttggaaaactgagttcaaatcctgactggtctggccacccagacaaagggcctgttgtgaaccttggagattacccttactctgtaagggccggaggacatagcaggggctcggtaaggtcactcccatctcccatccccccaaccccacttgccttccagcctggtgagcagcaactcttggggcagttggttccctggtccaggctgcccaggagtccgtgctgtttttatttttattgttctggcttcacagctgagacctctaactccaaatggctcttcttgcccagaaaaataggtcgttggcagctccagcctcctggcaggcctgcctgctgacgccagcccagggttacgggaagtggggagcagagcgcgggcagggctggaaccaggtgaagctgggctgtgcaggtgccagcgtgccccacagggtggccctggtcaagtcgtgttctgtctctcagtgtgtttcctcacctctgggaacaccgcggagttgctgaggcttcagtgagataatgtatctcaaaggacctagaacacacaagggtgtcatctacccccctgcaaaggccaaactccagataggccctgccatgccatcgtggctgctttcacatccttgtcactactgacccctcgtatcagagtttgttatccctatttcacagatgaaaagactgaggctcaatttttttttttgcccaagttgcataagtcaaattggcaaaatcttggcttccaagcccctgatcctctccttctcatgcccatttgtcttcttcccttgacaacagggaaggaatgtgatctgacttctgtgcaaggattcctcgggctggtgagtgaggaatcgacagaaggcacaaggtggaaatagggcgcccaggtgagagcggtggaggctcagacgagggcggaagcagcggaggcgctgagaagtggtttggccctggttgtgatgagaaggcccagcaggcaggatttgctgacagattgtgccctctaggagtaagaggaagagtcaagcagcaaaagcagggatgcaaccacccctggcttcccatctcacctcctcggtgagaccttccttgatccgttttcaaaattgcaatctatccctctcatcagcactcctgggcctcttccctggctaattccccccaccccgtagcacctgtcccatttgacaaactaaataatttacttatcttatcggttcgtttcctcccactagaatgtcagcttcttgagggcagagatttttatctgttttccagctgttgcattcccagtgcctggcacctagcagatgcttaatactgttgagtgcgtgagtgaacatgtgtgaaggcagttagattttaacgcagggcagcacagacctcctgctgtgcgggtggctgattcatgtcaattatctgccataatctctctgtgtggcctcagacaagttgcccctcacatcagtctacccatggcccgtgggtctcaatggcttctcagccttgaggttggccaaggatgatttttatgtggacagagaacaagggtcagggccccctccagggggagaggtgagggaagccctgctgagcgcctttgccaaaggtgctatatataaatagcaggtggttcaattattatccttccctaatctccagtttcctaatcccccagcaggtttgtgagtgtgtatgtgtcttgaggaacagtgaacagcagagccttctggaagtccagggcaggaggctgcctcttctctgacttcatcagcagcccccatctccactcccaccccagatggagtctggtgacagattttcccaggagcctccctggttaccttcatggtctagacccgatgtggcctgaagagttggagaccttccctgcacccacctcagataccaggataaccccagaacaatctttctcattggtgcccaattccacgctcctctctctccagtccaccctccgcttgcagactggccttttagacacataaatcagacatggccctcccgtgctgaaaaccctctaggggtctcccaactgcagaataaacgcaggctctttacccaggtcttggagaccatcccaccctccccagtcctgcatactgcgctttctctcctccggcctagccacctggggccttcccctccttgtgctgggccctcttcctggaacacctttctccccaaatcttcgccttgctgaccctacttgtgattcagcaacccatgtctcagggaggtcttactggcccccttatctaaatacgctcacccctctccttctctaagttcaatcttccgttcttcattaattatttctacttgtccacttacctgtctcccctagtagaatataaattcctcatggacagggacctcgtgctctcccacacccagagaaatgaaaattcccttgcacttcaaatgctgcccagaaccctgtgggttctcaaggactgttgtcaaacacttcacttatttatcaaatgcttatgttgcacttggtatgtgctaggctctttttaacatgtcttacaaatattaactcatcaaatcctcacaattgagactcacgctggcctcgtctcagatgaagaagctgaggcacagaagaggtaaggcactttccagtccacccagctcataacagtagccgggggatttgaacccacggagttcagcccatgttctcaagtgtggcaccttccctgcccccctgcacaacagcagggccatgccttcaccaggaggctcggggcaggaggggaggcagtggtgttactttgcacaggtctttaacctgggaatcaggaattcaaatcttgtttctaccccaagctttgctgtgtggccttaagcaaacctattccctctccgggcctcaactttctgtccatttacagggttgggccttctctcaccttgtgtcattcctgtcctcttaaccgccactgtgtgaaccaaaattctctcccattagcagcggggtcttgaacttgtgttcctcccacagtgcggagccttctgccaggtgaccacgacactggcactccccatcactgacctggctactacaggaacggcgttccctccgggaaaaccggggttctgtcctctccaactccaggcctctggccccggctccccttcccctcatcttcctcagggcttgtccttctcccggaacccaggccttcagggccccgctctcccacacacgccccggcctgggcctcccacccgcccagtccgccctccaccaccgagacacctggccagggggcctccacctccctgggaaggccccgacccttcccctctggttgcgcgccacagcccccttctcgctccctctcctccccgcgcctcttttccaggcggcaccgaagtccttcctacacacacgctatttttgtaccatcatctcttcttcctctccccttccccctgcgttcacttacttccttcttttccttcacctcggcccggctctgaaaggatcgggcccctccggcccgcacccacccccaagaggggccttcagctttggggctcagaggcacgacctcctggggagggttaaaaggcagacgcccccccgccccccgcgcccccgcgccccgactccttcgccgcctccagcctctcgccagtgggaagcggggagcagccgcgcggccggagtccggaggcgaggggaggtcggccgcaacttccccggtccaccttaagaggacgatgtagccagctcgcagcgctgaccttagaaaaacaagtttgcgcaaagtggagcggggacccggcctctgggcagccccggcggcgcttccagtgccttccagccctcgcgggcggcgcaggtccgggcccggcagggacggggaggggcagagcgggaccggtcggggctggggaccagccgcgcgggcttctgaacgggcacgctgtcggagccggaggctcgtctagtcccgagccccagcgggccgcggcggctcgcggggccgccttcccgggacagcagccggggcccgggcgccggcgcgggggaggacgctgccctccccggccgggcgcgcagctcgcagccctcgctccctcccccggggcgcgcaggcgggcgctcgctcgcagagaaggtgccggcggggccggagccccgaagcctccccgggcggcgggaagacgggaggaggggaaagggaaggagggagggggtcgggctgccgggagggcgggggcagcggccgggactgcgggccgggagcgagcccagccgcccgcgccgtgtggagcccgggcggggcaggtgggcagcggcgggggcggctccgcgcggccgggctcggccgtgctgcccctcgcccctgctcgcgcggtcctctctcccgcgcggtctgtcggtctgcgcgccgcctcgctcctcgctcctcgctctccccctctttctccccctctcgcctctccgtgtctctggctctctgcctggctcccttgggtctgtttctctctcctgccgcctctctctggccgcccctggctttatttctcgcgcgcttggggtctctcccagtctccgtctctccatttctcctggggggcggggagggggggtctccaaaaaccgcggcggcggcggcggccgctccaggcgcccgttccggagtcggggggaggcccagccgggaggggggaagggggggagccttagtcatttccccgctccagcctgctcccgcccgagcgcgcactcacggccgctctccctcctcgctccgcagccgcggcccatggagcccgccggcccggcccccggccgcctcgggccgctgctctgcctgctgctcgccgcgtcctgcgcctggtcaggtaagcacccccccgctccccaccgctgcactccccaaactgcgggctcaggcctctcagactggcactgggaccccttcggctaatgccgagcagtaatagggggagagacgcctgtaaccagggttatagatgcagaaactgaggcccagagagggccagcgacatgcccaaggtcacacagccaagggtagaacccaagtctcttctatgagagtttgtctctgtggactctgactctgtgcactgtgctgggcactgagacaaaagagccgagttgcttcactcagcccctgcccggtccaatggggaaggctgactgacagtggctttcagagcagggccgtccggcttccccagaatctgtccccatggacatacgactttccacatgtttgacttcagggtgtgaggggaggaggtgagggcagaggtcctcccgatgctgcctggaatggaacagagacaagctgttgcaattagggaagagtgagccctccctctggtgcgcagagtaaaccggtgttagtgtgtgcctgggagagagggagccgggaggccgcggtaaccccagagcgagctgctgcgagcaacagatccttatgtaaaaacacggtggattgtccctgtggttgccaaagcctctccctggtggtcttgctccttgaggcgctcccagctcccccttcctcctgccttccccgagcttccaggcagctccctgcagttcaggtgctccgcggggatgttacctgtggctctgaccatgtctttctgttggcctacatcaaacacctggctgtcgccggcaggcgggctctgaaggctactgtgcatgttcaccaaagggtgaggtcaccattcaggagtcttgcttcttaaatgggttttgcaaaaccatgggtctcctgggagggca

SEQ ID NO: 9171 - DNA, 6000 bp, Homo sapiens
agtcagtagcagggctcagatcaacacccaggggtcttagcaccatcttagcgctaggccagggtgtgtgtctgcgtggagaggctcctctgacctctccccaggaggcacattaaattgaacctcggaggatgagtaggattcagacacaggaagacaaggaggtacagggagggcatttctgatggcaggaacagcacgggccaaggcacagagctgagagttcagctgagggcatggatctgtagaaaaccgtttaccaaacggagagaggccacatgctaacgggcatactacaaatcaaatgcctctcgttcataagttcagggaacactggagtaaatgtgacccagctcgggattctacattgcagggcttctcagggtctttggggtgctcgtgtggctgagtagccagcaaagctctggtctgcagggaggaagcctggttatcctgcagcatctcaacaggtcagcttgttggaaaacatgtggctggaaatcaggcctggcagggaggaagcccaggcctcacggcagctttgtgtttttttgttttttttttttaaagaaaacttggacccactcaacagttttgagctggggagtgacatgatctgagttgtgttgacaggccagaaatctgagcacatttaaaaagagagagagaggggggaaaccttccgtcagtccaagactacaaataagaaaataacctgtcgcacggagccattggaagcagcaagcgagcgcgtgtgggatccgtacaacacttttagactcccttcctctcgcacaccccctctccatctgtcgcaaagggcaccaggaagatgcagggaggaatattccagctctgggggctccagagctcagcagcccagatggggggctctcacaggagccacatcacctctcatgtgttgttactggtgaggaccaaggggctgtcagtatttccaccctcagcaggctttcagagaaatgcctgtgacttcatcaaaaccttctgcccagagaaagaactcttctacagtcctccacccaaggccagaaaggggcctctctcactccctctccagcttggactaaatcatcctgattaagtcattgagcttcttccctagaagccacccagcaggaaggccagcatccaaaatcctggctcctctctatcacttataagttagttccccagtttgggactcgattttctgcatctgcagaatggggagaagagccaatccatgtcttgcgggtgagacgacgcaggagcagcatccggcctggaacgccattaactatctaatgaatgttggttttcctcccttctctcaacacatggttcacaccagcactgcataggtgctgcatgactgcaagtacagacgtgaattaccgtgagtttccgaggggttggtaaaggccagaaagtactcagagaaaactatggctttaaaggaacttccaacagcctgatgtgttgagccaaagcactcccgccccgttttctcttcttacgaaagaggaagtgagattaactttaccatttaggaaagtacagaggagcccccagagtgccaccctctaccaaacggtgagaggttcactggggggccccgctgctccccagagcctgaactgcaacttggcttggcctcctccaggccagagagaagaaatgaatgggagtttatctgaggtcggcctggggggtgactcagaggtctcaaggcctacctggggccaagcaggcatcctgcgggttcagcgtcaggccctgctgacacaaaatcaggtgccaggtgtccccaggcctcagtcccttgcccttctcccagcctcagaatctccctcagtgcagttgttttaggaaacaggcctcacattgggtccaaaaacataggttggtgacttcactgggatctttttagaatttccctttggcagcatttgtgctaaaagcaatctttagaaacttcttctcttgcctcccccacccaggataattcacatgattggccccacccccccaaaacagtgatcatgtgaagacacaggaatcatgtgacacctcccaggctgacagttctgcctgagacactagtagtcattcaatccaaagccgccttcctaaacctgacattttagtttctcactcgaacaaatccattttcttagaaaattggacaactgcctccttgtaccttcctaccctcatatcctgtctctctacttctttgttgtaaattccatgtctggagcaatagggggaggggcctgaggccccatccttcagccaaaccaggtgacttccctgcccaggcccatggtgtgaccaggaccccgaagaacagatactgaaggataatgggagacttgagctatgatggtcgcacctcatcccttccccaccaccctcgaccaagaaattcattcttacctcctaagatttatttatttcaaagctaatcttggcccctctgctgctcccactttttcaggctattgatgctgaatggattggaacggaagttttatggcccaatctttaccatcttatagactgtttttataggcaaaagggggagatgtgctcacaagaaaggtgttggtgttcccagccggtgccccaggaaaggcaggctgcccatcggagcacttgctaatcagcgtcactgctcgtttgccagggactgaaccacagcctcctggtcggagaagggtctggaatagacatttagaaattaactcgggcccaattccctgcttcaggaaaattaagcacttgtgagtgacacttgtgcatttccaggccaggaaggatggcagggcaggaactcggacttttgcagggtacaaatggccagctcaggcaggaaggagcagataggagatgccactcactggagagacgtgaactgtatcagtgctcccttcagcccagcaaggacgcaactataactgaaaagaactgggggtggagggtggggtggggtggggggatgcctatgtgaattcctgggtttcaggggaaactgcagggcagagagaagcagctgtctaccccccatacttctccttccacccactctttgctagttctccctttctccctgctatcagatggttaccatctctagtcaaacgcaaaagggggtgttggacactgagctcatctttacctccctcctcaagggtgggaggtacagagagaccccactgcctacaacacagtttcaagacgacaaaaaacaagatccccatttttctctccctcccaactcccttaatgccatttctctgctccccccgccccccacccggtgccctcccaggagacccatggttttgcaaaacccatttaagaagcaagactcctgaatggtgacctcaccctttggtgaacatgcacagtagccttcagagcccgcctgccggcgacagccaggtgtttgatgtaggccaacagaaagacatggtcagagccacaggtaacatccccgcggagcacctgaactgcagggagctgcctggaagctcggggaaggcaggaggaagggggagctgggagcgcctcaaggagcaagaccaccagggagaggctttggcaaccacagggacaatccaccgtgtttttacataaggatctgttgctcgcagcagctcgctctggggttaccgcggcctcccggctccctctctcccaggcacacactaacaccggtttactctgcgcaccagagggagggctcactcttccctaattgcaacagcttgtctctgttccattccaggcagcatcgggaggacctctgccctcacctcctcccctcacaccctgaagtcaaacatgtggaaagtcgtatgtccatggggacagattctggggaagccggacggccctgctctgaaagccactgtcagtcagccttccccattggaccgggcaggggctgagtgaagcaactcggctcttttgtctcagtgcccagcacagtgcacagagtcagagtccacagagacaaactctcatagaagagacttgggttctacccttggctgtgtgaccttgggcatgtcgctggccctctctgggcctcagtttctgcatctataaccctggttacaggcgtctctccccctattactgctcggcattagccgaaggggtcccagtgccagtctgagaggcctgagcccgcagtttggggagtgcagcggtggggagcgggggggtgcttacctgaccaggcgcaggacgcggcgagcagcaggcagagcagcggcccgaggcggccgggggccgggccggcgggctccatgggccgcggctgcggagcgaggagggagagcggccgtgagtgcgcgctcgggcgggagcaggctggagcggggaaatgactaaggctcccccccttcccccctcccggctgggcctccccccgactccggaacgggcgcctggagcggccgccgccgccgccgcggtttttggagaccccccctccccgccccccaggagaaatggagagacggagactgggagagaccccaagcgcgcgagaaataaagccaggggcggccagagagaggcggcaggagagagaaacagacccaagggagccaggcagagagccagagacacggagaggcgagagggggagaaagagggggagagcgaggagcgaggagcgaggcggcgcgcagaccgacagaccgcgcgggagagaggaccgcgcgagcaggggcgaggggcagcacggccgagcccggccgcgcggagccgcccccgccgctgcccacctgccccgcccgggctccacacggcgcgggcggctgggctcgctcccggcccgcagtcccggccgctgcccccgccctcccggcagcccgaccccctccctccttccctttcccctcctcccgtcttcccgccgcccggggaggcttcggggctccggccccgccggcaccttctctgcgagcgagcgcccgcctgcgcgccccgggggagggagcgagggctgcgagctgcgcgcccggccggggagggcagcgtcctcccccgcgccggcgcccgggccccggctgctgtcccgggaaggcggccccgcgagccgccgcggcccgctggggctcgggactagacgagcctccggctccgacagcgtgcccgttcagaagcccgcgcggctggtccccagccccgaccggtcccgctctgcccctccccgtccctgccgggcccggacctgcgccgcccgcgagggctggaaggcactggaagcgccgccggggctgcccagaggccgggtccccgctccactttgcgcaaacttgtttttctaaggtcagcgctgcgagctggctacatcgtcctcttaaggtggaccggggaagttgcggccgacctcccctcgcctccggactccggccgcgcggctgctccccgcttcccactggcgagaggctggaggcggcgaaggagtcggggcgcgggggcgcggggggcgggggggcgtctgccttttaaccctccccaggaggtcgtgcctctgagccccaaagctgaaggcccctcttgggggtgggtgcgggccggaggggcccgatcctttcagagccgggccgaggtgaaggaaaagaaggaagtaagtgaacgcagggggaaggggagaggaagaagagatgatggtacaaaaatagcgtgtgtgtaggaaggacttcggtgccgcctggaaaagaggcgcggggaggagagggagcgagaagggggctgtggcgcgcaaccagaggggaagggtcggggccttcccagggaggtggaggccccctggccaggtgtctcggtggtggagggcggactgggcgggtgggaggcccaggccggggcgtgtgtgggagagcggggccctgaaggcctgggttccgggagaaggacaagccctgaggaagatgaggggaaggggagccggggccagaggcctggagttggaga

SEQ ID NO: 9172 - DNA, 6000 bp, Homo sapiens
tacaggcgtgaaccactgcgcccagtcggaagtaatagttattaaccaatgtgatggccgggtgtggggaccctcgcctgtaatcccagcactttgggaggccaaggagggaggattgcttgagaccaagagtttgagaccaacctggacaacatagtgagaccctgtctctacaaaaaaattttttaaaaattagccaggaatggtggcatgtgcctgtagacccagctactcagtagactaaggtgggaggatcgcttgagcctaggaggttgaggctgtagtgaactgtgaaacaacaaccaatgtggctacgtaatgaaatggggctgggcggggtggctcatgcctgtaatcccagtactttgggaggctgaaatgggcagatcacttgagccccagagttcaaaaccagcctgagcaatgtggtaaaacaccatctgtacaaaaaatacaaaaacttgttgggggtggtggtgcgtctgtagtcccagctactggggaggtgggaggattgcttgagcccatgagtttgaggctgcagtgagctatgatcacaccactgcactccagcctaggtgacagagtgagaccttgtctcaaacaaaaaaattttaaatttaaaaaagataaaagaatgaattggctgactctcaatccactgaggggtcagggatggatgttaaacatcctctacagctcatctcattgagaaactctacacagaagatccctgagaaacctgccgatgcccacaagccccagcaacccaccaccccaagtcacaggtggccacggaacctcacttgcacatgtcccattgtggcagctgctccgggatgttgagggccttccgcacgtacgggttgttgaggtaggtggaagcagctgttgtgttggtgcagggggggtccatgcgcactttatcccctgagcgcagcagtgcctggaaggcacagacagtgggtcagggcctctgcttccctgcccctccccctgcccccacctcaccaggaggaagcccacgccctcgcacacctgatgccacatccgcttgagtggcaggcgagtgaagatgttgcccaaatcctggaccacaacagtgtccttctcatacctgcaatgtgaggtgggggaatgggtgtggagcctccagatggggctggggttggctccaggggcacccagcagcacctacctaaaatggctgggcacccctccagcacacggggcatagagattgtagatgttgaggccagagttgcccacgatgcgggccacttcctgaagctgcaatgatacaccaagccaccatgctttacagatccccagcctctccacgaccccaccaagttgtcccaagatttactgctcttggatttcacctcttcacccactttttttcacaggtagggaaactgaggctcagtggcaggaatcttcccagacctgggtccaaatcctagcatcactgcctcccaacactgtgacttcagacagtgatttcaaaattcatagccctcagtttccttatctggaaaatgtgggtagtatgatctcatttgagggggaatcttgaagcttaaataatctacatagacacagttcagcacagtgcctgccacgttgcaggtgtttgataaatgtgaagaagtcctttctcctcacggaggttatgggatttgccaccataggaggtggtggtgggaatacacacttagacacatgtcccagagaacactaaattgcttaaaggtgcaagaaagcaatgagggacggagaacaaggagtccccaaggagggaatgtggtcctgttctcaggattagggatgggagagctcatgcaaagtgatggcagaacctcacattggtcacgcattccaggtctttgttgtcatagaagttacacttgttttgagagcagcagtgggtctggagagaagaccaaagcctgtaggagatgagagtgaaaagcgcatcagctgctggtgggaagaggaaggcagaggaggcgagcataccccccacctcccaccaacctccctgaccctaggagactgggaaagatatcacagggtgtggtctgtatgtcatctaagctagctcccaaagaggtgccccagggtcatacagacaggcctccttagttcctttaaaatctgatttctggctgggcgctgtagctcatgcctgtaatcccagcactttgggaagatcatttgaggccaggagttcaagtccagcctggccaacacagcaaaaccccatctctactaaaaatacaaaaaattaggcaggtgtggtggtacgcgcctgtagtcccagctgcctgggagtctgaggcatgagaattgcttgaacctgggaggtggaggttgcagtgagctaagatcgtgccactgcactccagcctgggtgacaaagtaagaatctgtctcaaaaaaaaaaaaaagaaagaaagaaaaactgatctctattctttggcctttcagcactaggttctttctgcaacccacctgctgctcataaacctgggctgggcctgtcatatcatgtgcctggaggacagacctgagatcatgtgacctgcctcaccccagagattgcccaactgccctatcccatacctgttccccagaaggccatggtagtaggcaaagtagaccagggagttgtcattctgctcataggaggagagtccattgcccacagccagcccctgtgaaacacccagggtgctcagctcatgtggagggcaaaaaggaagagcctccctcaccctaccacccagaccttcagcaatccggaagctgaaacccagggtggtttatgtaggccggtgggtatgagaggccactcaatgcaaaacacagagctggcagcctgacaggtgagtttcctgtgtgggaggcacacagacagacctagggcagccggtggtggggaggttatgcaggaagctgggttggatggggacattgaccagtcagtctgaccttgctaactgtaaggccacagcctcaagctacctcccttccctcctgcagctaccctgcacctgaaggttcatgctgggatcctgcatgaccagcacggccagggtggggatgtagatgccagcatagctctccccggtcaggaaaagtttgttgttcttgtactccggaaagaggcggaagaaatcttgaagggcctcaaaattgctctgggcgacctggggatggcagagcaagacagagggaatcaggaagctttggtatttgaactggaaagaacttcagagataatgacattaacccaccctatttgtgcaagaggaagtgactggccaccataccacaatagcatatgacagagcgaaaagtagactccaaggccatgctctctctcccagcatcatgccatggatggaggaccggggagcctggggcagatgggcaggcaccagactcacctcagtgtcattagttgcataaaacttgtcatcggagtaggagaagcccaccccagctggggactccaggtataacacattggcaatctagaggggagggaaaaattagctaaatgccaccccatccaagtgcccagacacacccacagctccagctataccagattccaagaataggggttgtactccagggtgacaccatctggctggacctgaggaggaaagagatggctgagtaagtcccaagggccagctgggtggagggaaagggccaccatgagaggcactttacatgtgggtaaaacctctgagaggtacaggcagcaaagccaatggcatagaggaaaatcccgaggcttagaaggaaggaaactttttggaaaatcacaaagcccctctctcgctttccccagccttttactttgggaactgtgctttccccctgctgtccactcaccaggaaggggccatgctctgtgaggagcccatctagtgagctgcagccgggacccccattgagccaaagcaccacagggctgttctcgggatccttctgggactccacaaacctgggaggggggtcagggcagggttggcgcagttggaggggccctttccagccctcccggctcccaggcatcctcaggggtctgcagaactaccccccatccctcatccgtcatctcttctcccaatcccgcccagaaggcagggcggcagaccagtagtggaggtgcttggagccggagcctttgaggtagccggagtactggcggaaagacggctgcttggccagcccggggaggcgctggatctcgtcctggtcgggggctgcctcgcctcgggacgcccaggacactagcagcagcagcagcagcagcagcaggaacagcggcggcggcgcggctcggatcatctacgggaggcagcagaggggctgttgactcgctcctcagcgcttccgtgcagcagcccccggggagttgctggcggcgcctccgcgagggaagccccggccccagcgccagctcccacccgcgagcctcctctgccgcgcaccgatcccgggctcggggatcccctccagcctccggtgccagctcacctctgctcccccgcgtccttgctctccaggaggcgcccggggactggaagtcatgtgtacgagtcacgtgaactccggcgccacgtgacagtcttcctcccgccccttctttggtccctacggacctggggggcggtggcggtcaatgccgggtcaaggtccgcgggcctcgcagatcgtagcccgggcgcacgcgatcagatgatcctgttgtggacggctaagttgtaggcgggatggctgagaaagcggcgctaggacccccgggcagaggctcggggaagggagtcaggggggaaatgccttacaaggtcgccttgcggtcaccatcattgcccgccgcccaaaatagcccccggcgccagctggcctgccctatggccgagagatggctgctgcctccgagcccgtggattcgggtgcactctggggactcgagcgcccggagccccctcccacccgcttccatcgggtgcacggtgccaacatccgcgtggacccctctgggacgcgggccacacgcgtggagagcttcgcccacggcgtgtgcttcagccgcgagccgctggccccgggccaggtcttcctggtcgagatcgaggagaaagagctgggctggtgcggacatctgcgtctcggtctgaccgcgctggaccccgccagtctggcccccgttcccgagttttctctgcccgatctggtcaacctgggccacacctgggtcttcgccatcacgcgccaccacaaccgcgtgccccgggagggccgcccggaggcggaggcagcggcccccagccgacctccaaccctcctcgtggaaccatatctgcgcattgagcagtttcgcattccccgggaccgcctggtgggccgcagccggccagggctctacagccatctcttggaccagctctatgagctgaacgtgctgcctccgaccgcgcgccgtagccgcctgggtgtcctcttttgcccgcgccccgatggcacggccgacatgcacatcatcatcaacggcgaggacatgggcccgagcgcccggggactgccagctgcgcagcccctctacgcggtggtggacgtgtttgcttccacaaagagcgtgcgccttgtccagctcgagtatggctgtaggtatccctgggcagcgacccctcctggctcagtgtggggactggaatctactagggctccgtagcccatgtgctaggccttcgtctgtccggcactagtttaagagtgggagaatctagcttcaaattgcacctctgcttgtgatcttgcacaagcctctacatggttttgggccttggtacctatcttggttgattgattaagatgccctacaagttcccttttagttttgatagtgtttcctgtattcacctagggcagggattctaaaccaattttagatattaggggcctctttgagaattg

SEQ ID NO: 9173 - DNA, 6000 bp, Homo sapiens
taaattctttttatgcgactaaacaggcaaggttatcccctgggttgtgcctttggaaacagcttttatttttattattttctacctgtgtttaatgtttcctggttctgttatttttggttctagcagttatttttgatcctgaagcttatctgttgttgttctttagagtttctattttcctttgtttttggtagtttaacaggtcatttatcaaacaatagtttaagatgatttacagtttgtcatccaaccatgcttgcatcttgaatcatcacatattataaatggagggtggtggtctgttggtaatctgttttaaaaatgtttccatcttagagaatgcatcatgtaagttttataacataatatgaatctaatttagttatgctaaggataaatttcataagctattgctcacatgcctttcctatccattcctgtaaatctttagcccacatggctatgtacacaccctgggtacattcctgtgcatgtatccatccaccccaagtgagtgcaaacacactgtcccagtcctcactcttgctgatggcaggttgtaggctccagactctgggttctgctgcttgctagttgaatgatcttagacaaaccacgtcacttttctgagaccatttcttttcaaccatattctttccaggattttgaaaaccaagcgttaatgttgtcacagcttgttaaatgaaaaagacactggattgaggacacttcattgtctcaatgtttctctgggtaaatttgtattcacatggcattctgagaaaacaaatgggaccttccagattctggagcctatgtctgctcatggcactcgggaaaggcccagggggaaagagggagtagcctggagacaggagacactctgcacgcctgtctccccagtgcgtccctcccccactccccgtgcaatccaatatgctgcctggacataagcaaagcaaccatgagggcactgaatcatagctggtgcccgggttacttcatctgctctttgaacacaagtttaggatctctcaggaatcattcaaaatgggcatcttgcacagagaatgctgagaaaccacatttgttcaaacctcctgccgacaacttcattattctaattctggtgacgtggttagagacctggtcagcctatctctaatgttttgaatactgctttgtagagattttgacaccatgcccctagtgtagtgatgccgggtcaagagctaaggctccaaaaacttctatcagtgcactgccccaaaatgaccttatgcaactttccactgatacaagaggctgttttgctagtcatttacccctagtgttctgctggtgttgtcaaattaacaccccacatacttcagtccttgtcacctttacccactcattcaaagaattttgctgataatgtgacatctgttcaaactatgggccacagcggtacatttactctgagatggagcctgcattttccaatgtgcatgagggtctgaaaggccaatgtgaggggcacagggtcaagctggagtcatgaaaagacaaggttttatttggggatgggtgacaggacataaaactgctcacctacaagatggttattcatcttacaaaaggttaactaaggacacctttaaatagtgcactttataaaggtattcaaaagtctgactgactcctctaagaacatcactgacaatttttaggaactgcttttatatacaggaaagcacagaggtgtgcagaatgggagggggctggtggagggagggcctcccctcccactgcctccagtgcctccctgcgtgccatgcctctccagacagtagaagtcacagtgaatatcacatctcagcaagcacagagccttttcagagggcagagcaggtgtgacctggaggatgaccaaacattttctaattagacaatgaaatgttcagtactctccatgaacctcagaatagcaccgactagtgcctcagatagaaatcttacataagaaaacaactttctattctctgataatagtaataactccctagaaaatacgatttaaaattaatgagaaaaataactcaagtctggtagagcacttttaatttatctcaatgctaaatgtggaagaaattaattgcttataatttttgaactgagttttaaagtttttatcaaaaaaaattctcttgcctatcatggctcaaccagaatcgtgttcacgcccttcatgaattagaatgagtctgttcctattgctaacatatctgtcttcccaggatccggacttgtctttccttcttcaatatctcacccctgtacgcctcaagtaaagttggcaggttttccttttctaccctaaaatgggaatggagggggccttcatttttattttaatatcacctatactctaatggggttattaaaaactgacatttctgataggtgaacataaaatgaaatgtcatcagctggagatacagagggatgtgtttagaggtgaagtgagtttggaatggtttttttatttttttgaagtttacatcaaagtgattttgtatttttactgaattggtttattttatcagatattaacaaattataattgtgtatgtttatggggtacaaaatgatgctgtgatatgcgtatacaatgtgtcatgactgaatggagctaattaacctactatccaatacttagcattttggaatgagttttgaaatacttcatcaaacaaggcttccaaaactctgtggcctccaaaactctaccaaaggtaactgcaggtggtgactgggtggggggtacacaaagcttcagtgctattctctgtctgtcactgtgtacaactgaaattttccataataaaaaagtttaaaaataggtttctccatcttttctttcctttttttttttttttttaacaaggccctcttgattatgaggattccgttttcaggcaggaaatggggacagggtgagagagggcgccgatcagctactgtcaggcttgctccttgcaaaggggcgggcggtggagagagaggggagggaggaattaaggggatcgcgcttcctcagggcccacaggcctcatacctgtggtgtggacctccaaaagaacgggccacaccaccgccaaacacagagcacgcaattcaactaaaaattcgacttcagtttcttcctgtccgcgccagaacggacatcagactgccccccgcccgcctcctagcagctccttttcacttcggctgctgccaggatttcgcgacctagacccctctttgaagaccacttccgatccccgacgcggcagcccttgaggtcgcagcctagcacggagaagttggccggctctgggggctatgaggctgctcaccccacaggcgcaggtctacgcagcacacacaccacctccttctttggactcagaccaaacacgctgggctgtaggagggagacggacagatacacggactcgcgcgcgcacgcctcaccaactgattccaaccagaaaacggagccactgtgtaacgcccagcccccctcccctcgacacccccaatcagccaagccttcggccggtgtctgctgcactaaacaccaggacgtggccagggaaggcgcaggcatcggtccgagccaggagcgccgcggcgccagcgcatctgacgtcgcaggaggactgtgcgcacctgaagtctgggtgccaagcgcccaagcctctgcgtgcaacgaaacccccaaaggaaaacaggactaccagaagaccccttcctctcgtctttcagaaacgccaagcggcccctctggccgcctcctcaaagctcggctgccagagccactctagtagggtcttgcaaaaagcgcatagggacaaagccccttccctaagaaaagtgcccaactcatccagtgagccattccttcctcctcactgcccagagagtgcacatgaagaggcagaaatcacgactaggaaaaagcgagattcaaattggaaccaaaaaagcgtatgtgctcgctcccatctcggcgccagggctgtggctcccagggctgcaggctgtcgcggctgccaggggccagacagcttttgaaggcaggtcttgtcctggctagaggaaagaggctccaggagtctctgcttccgccacggtcgcccgtcgggattccccatcccaagcgcgcttgcaccttgcctgccgctccgctcggagaattagtctgtttcccttcctactcccaaacagacctaggtccccagctccgtggccgcccggctcaccagccctggctggtctccttcgggtcactccgaggggcagcccgaacccgcagagccttggcccgccgcgcgccctcatggccctgctgggcagcctggctccgctacgctctcagttctcggtctcaccagctcccatcgaattcgcacagcagccccttcgcgtctcccggggtggcaaggcaccaaggtgcagcccaggccagcatcgaccccttcctgggcattttctctgccggctcagctccccctcccgccctgcgaccccgtgtctcccaagtctcgtcgcggcgaccacccggacttaccgcgggcgccacgccgccgccgggtctgcgcgctccgaggcggagccaggactaggacacccgccagcgcagggcagcctccagctcccgccgccagctcgcggcccctgccgcgaccccgcccactgcgggcccctccgcccgcccccgcggccgggaggtctggacttacctccgggacaaggtgacccggcaagtgcgcccaagcggccgcccgcgactctcccgagcgagcgagcgtgcggggcggtgcggcgcccgcctctgctcctccgctgccaggctctctcctcctctgccctcccctcagcgccgctctgctccccacgcctctccccgccctgcgctctccgcctgcgcccccggctgccccgagcgccgggcgcggggcagcggcggcagcccgagcggcggggagtcgggagctgcggcgccggggcggagcccaaccctctcggcccccgggagaggaaggggtgcggggagactctcgtcgcgctcgcctggccggcaggctgggcgaggggcgccctggggcgagccgctcctcttcgcttgccgagcctgccgacgcgcgtgctggaggcagcgggcgcgggccccgggggaggagggcagggaagagaaggagggcgcagcccgcgcgaaggtggccaccaactttggcccagaccagggaggccctagcgggggatcgcgtccagatggtggcccgcggccagtgtctgacaatgtgagggccacagaggctgggggcgggggatagctgcgggggactaggaggacaggaatttgctgcccgactagaggaagggatggctcccctcggtcctaaaggcctccccaggctgcggttcggttttgaggttaaaaatgacccaatttatggatccggcgaatgttcaagtcctgaccagctaagccctggaggagcaagcgggcgcggagttcagactccagagaccccctcagccctgagccagcctgttgttggcccatggcgggcccgccccagttggaattggaaggaaactagggcggtggtaagacagtctgcgttctaggagcggaggaggtggtgtttgcagtgtagatttcatagagaatcaactctgaaaaaaagatttaccagaaagggggtcaaaagttatttagaaaagcatctgtgcgcccccgtttcaacactaggcagaggccccagtcctgccacccgcaggctggtacactggtggtcagagaaggttaagctccagagttccatggctcccaaccttcctagagccctccctcctgcctggtaacccaccattgcgctgcgtcttgcccaggtgtcctggtgggcaggggcaggagttaaaggtggtgccaggaacaagaggtccttcctatattccttt

SEQ ID NO: 9174 - DNA, 6000 bp, Homo sapiens
tagggctgaaggattcattcccaccatcttagagggaaggggtgagacagcaggacattttgtttcccagaaaaagctcaggtcaaatttcaaggacaaaagttagcacttggtctgggaaagaaaactctgccaaatggaataaagggggagggggagaactccagtgaggtcattccaggtgcctgggggtgtggagagaaatcggaactctgattctccctgccaggatctgtccggcaggatatgggtatcgccgcctcatcacccagaagtactcagaccaccccctacatttcccctctgtccaaaaatggggagcggggcgctgtggtactagtttttggatcccatccactatcccaccccgcccccagcccaacagatttggtctgagcggaagagggtggtgccaggaagggctttccagcccagagatgtggcccaaaccgctaggagagggactggtagctggctggtgttgccatggcaacctcctccctgcgctggatcgaagcttccatcctatgggcaaatcagagctggctgctccagcttctccgcccttctcccaggcgggagggggagaactggacgctgaaaccacttggtcaggctcaagaacaccaggctcaattccagaccctgatgtaacaaccccctttggcatctgttggaaacttgagacaccccagctccccagctaggccccaaggcagagtgtcagggctgggactgtagatgtgattggtgcaaatgaagtggtcaggaagagcagggaaccagtggctgaaatcctccccaccctcttgactggcaggcgagtctcccaaatccctatgtttaagccacttcaaagaaggagggcccagctctaccttaataactgtaatgatgcaataagattagcctattaaaattataaagctagcattttgagaatcagccttctcccctccccaaacccacagattcttttctacagtcatgttcagaaacaactctttctcagtaataagatagataacagctaacatgtagtgagagcctacctcatgccaggtactgtactaagacttctgcacagcacaaacagcataatggttgattaaaagcatagatgcttaagtcagattgcccaagttcaaggcttcattccctcacttcctggctgagtgaccttggatgaattaatatgtctgtgcctcagttttctcatctgaaaatggggatgttaacaggatagcagttttataggcttgctatgaggaatgagttaatatttttaaaatgcctgggaatatgtctcgcacaaaggtaatcatttgtaaaatgttaaccctatgcagtccatgttattatttttcttcttccttacagatacgaaaccgaggccacgtgtctaactcctccccgattacaaacccagtgccaacaaggctgggcaacaaaacacacacacaaaaaaacgcctccaagcacatgtttccctaaagccccagcatccttgtgaaagagggcaaaaggagcatctcaagaagtaagttcaaagtgcacgagggaagatgccccttgagaggaattctgggaaccagtaatgaccagcatcctgggcccacggcgggctagaaagaggtgtgaagaaggctcagcttcctgtgcccaccccaatggccaaggatcccaagtccaaatcaggaatgtgctctgccccagttaaggctaatgagaaaaaggctccttctcacaccatttctcaggaaactagcaaaaggatggcaactaaactctgaagatggctctggctcagtctagttggaaaaagatgcatttcaacatgagttggaagcagcaacaaaggggaggctcctagatgagccggaggcctgtcagggacacacttctgagacggagccagcagagacagacaggtattaagaaggccaggggagggaggggagaagaggcaggtagagccacgcctgtgtccagtatgggagagaccattccattgcttttagaaatcagttcagtgcagtgctgttctaaaagaataaatccaaaaaggcttcttttaggagaaaattaatgactttaaggagaacaggagaaattaagcaccaagacaacgctgcctacttctgactttcaccagacattcattatttttccggaaatgaaagttgactttctccctccccctcccaaatttgaagcatccctcaagaacagacagtgagcacaagatgcccaaaccaaactcttggtcgccagccgcacccccaggcctcctcacctgggaaacattttctacacagtaaggtctggatttcttaaaaatcctctttcagagggagggctactggtttaatggaaagagaaccataaacctgattttagtctcagctctgtggctgcctcactagatgaccttggcatatatatgtgtgtgtgtatatatatatatatacacacacacccattccagggcttcagtcacacacacacaaacactcacacaaatacacacacacccccatccatttgcgggcaaaaaggggatagacaagatgatttctaggtctcttccaagtgaaatactaaagaatttcaagaaggctgctggaaaaaacaaacatgagtggacctttaaaaatatcattaatactacttgaagttatctgttctgacttaagtgaaaccagagcaagttgcctgcagcctgcaataaccaaggtgtttgacccatgacacacagcatgactttgaagaaaaactaaaccgctcctgcctctgatgctcctacaaacccatgctcctgcccagcctggctcttgagatccaagtggactgctgaccactctactgtgttggggagccccctacttcttcccaccttgccttgtccagaataataatacaacctccctcagctacatgaaggcagaagttaaacctctgagcctcagttgtttttttctgtaaaatggtgattataaaaatggtaaaatgtctctgcagtaatcatctttacccttacccccatccccacctccaggtcaatagaaagacaggtctattggggatctgcctcacctatccccattcattcaccagtcaacaaattcttctggagaaagggcaggaagacatgcccaccacttcatcccatgatggaaccttggtggccaggttgatcagacaagggtccccaaagactaagtctaaacctgggcccaggaacttcctaaaaccgtaggctacattttgtggatggtgcatatatgcacttcgggagagatagtccatgttttcctcagagacttgaaagtgcccatgaaaccattttgctcctcaagcacatacactcctccagcacatacactcctctgttttgttcccccattgaattcaaagactctcggattttcaccttataaaacactgaactccaccctcacaccatacagagctttgcatcgatacgatgatccccatttcagagatgaggaaatccaggctcagaggtggcatgacttgcccaaggtcacagctaagaagtagagaatgaagactggaacctgattccgattcccaatctggcattctttggggaactctcacccaagccctctagctaccccacctgttggtggattcccttcctcaccccagaaccaaatccggagctctcatgttccttctgccgggtcccagggccctaaagagtaggtttccctacagctccccacccctcgctctggctgaggttgtgcgcaggcctgggaggaggaggttcaagccgctggctggtggccggcttcagcccaccaagaaaggcgactccagggacaagagcacctgaggtcaggggcacacaccagcgggcggacaagtgtagagttggcgccgccctacacctctctccgggaagagaggggaggaaaggccgtcacctggccggttcccctccgtctgccccaggcgtataagaagcaggagtctggagccccagcccatgagggaaggagaggagagataaatgggggcgctcaaggcctggggcgccgggcaggggtcttgggcagggatcctctggatgtggccaagacaaagatggagaggtaaggtctgcgcgccacctccaatggcggggggcgcgtcggagccccaggggtgggacggccaaagcccagggcttgaagagtgggcacattcaggagactcagggagggtggcaggtcggctccagggacgaggcaaggggcctccaataggcgcgggtgaggagggagatgggtcctggcgacccaaagggcccacctgcgggaaaggtgaatgcagacaatctcggggtccctgggggagaaggccagaaggtagcgcatcctggagaccctggggtcccgtgggtgcggaaggagaccctgggggcgccttcccaggggattgggggtggggaggagggcgcacgggtcggggagggggctaccggacctggatcccgggacaccccgggggtctggggggcgggccgcgcgcttacctgcgtcctcgtcgtcgaaggagttcatgcacgggaagtagatggcgagcgcctcgaaggaggcggacagactgaggcggctctgcgagcgctccatgcccgcgccggcgccgggcgcctcggccgcggcggcggcggcggcggcgggcggcttgggcagcttggccgccccattcttgacgcggagtacggcgcgcggcgtggtggcggcggcccggggccgggccgaggctccgctgcggggctggcgggcgcggcggggccggcgggcgggccaggagctggcggcgcgcggagcccgaggcgcgctgtgctgctggcggcggcggcggcggcggcggtggcggcggcggtggcggcgcagcgcgctctggtccgcggcgccccccgccggcagcgcgaggcgggcttggagcggcgccgcagccaatccgtgccgccgggggagggggcgccgctgcggggcgtgggagcccggagggcgcgggctgcggcctcttctagcagcccccgggcccggcaggtgcgcgcggggaggcaggcgccgggcgaggttgtctgggccctggtccgagggctgttcccgaccccgcctcggcccccaccctcagccggccgacttgcggagaggccggcgtccagtccctcacccagacaggcctctcccagagacactggcgcgctcggaggggatgcgctcaaagggtcccgcccaggcgggtcggcactcggcctcccacacagagaccctcggcttcacacctgcacccacagagaagctcaaacaggcacccacacctacacattcactctgcaacatgccccgcagacacccggacagatacacccacagacccaccccctcacagatgcggggacagacacgtccacggacacacgcagactcacgcagagacctgcaaacacactcagggaggtaggcaggacatccctggtgcccggcctccctcacggggagactctcagatgccacaaaaccccacgaagttcaggtaggcatacacagtctcatgcattcacacttaccaaagacaccccagaattcatacacacattcatacactcagatgaacacacaagcccagacccagcacacactctgtgtcgcctccccctgtgatcatctcagcactgtcaaacactctgactgacacggccagatgcacacaccttcaccctcagacacactagagtagcacacacacgccaagacacagccacacagactccatccctcccagtgtgggtgcatcccgacggattgactgacaccctcagactcaggtacactgagacacacttggcaggctcacactcacagactctcccattatcaccctcggcgacccgcagtcctcagacacacacgggctcagacactcacagccccaggacagagacgagcgaatcggaaacccgtgttccattccctg

SEQ ID NO: 9175 - DNA, 6000 bp, Homo sapiens
ggaacagggccaccctgctcctgggcctgatcttggcctgtccctgtcccaccgatggggtcacacgctgcaggtctggcgtgtcagcagtgtctctcgtcggctgacgcaggtgagagccccaaacccgtgtccacactccttcaggttctggagcctgatccccggttgtctcaagggaagcagcttctttgccttggctcctagcatcctgtcagtgctggacccaaatccatacccggctgacctctctccagggcacttggatggctggcagacatcgtgcacccaaacgtcctgacagaactaggcccctgggctcctcccaccccctttcccgactgccccctggccacccccagcttgcccgtgggtcagctgacgccaccttggatccagaagcgctgtcctctcatcagccagggcctgaagcctgaatagggccaggcttctgcaaggtgtgaaaacatccaccagctcccctacactcctaggaaatctgttaccatctgggagccccactcccaccctcacagggatgcccagagacgtccccgccaccgccccctgctcttcttcccccacgcatgctgtccgggaagctcttggccatcgccccagggccagcagttcccttattggggtctctgttcaaacgtccctccaccccacacactgtatggggtctgtgcctgtctttctttctttctttctttttttttttttgagacggagttttgctcttgttgcccaggctggagtgcaatgacgcgatctcggctcaacgcaacctccgcctcccaggttcaagccattctcctgcctcagcctcccgagtagctgggattacaggcatgcgccaccacgcctggctaattttgtatttttagtagagacagggtttctgcacattggtcaggctgatctcgaactcccgacctcaggtgatccgcccaccttgccctcccaaagtgctgggactacaggcatgagccactgcacctggcctgtgcctgtcttactccaccgcaggcccccagggcctagcctgggctggctcacagcagcatggataaagcacatgccgcgtgaacgggcacatgcatgtacacagcacacggacacacccttggcaagacaggtacgagagccatacatgagctccctggggccaaggcaccggccactcatcaccagggcccaacagaccctggacaggacagtgctgtgaggtggcaggggcatcctgcctgcggggatgcctcggaagccaccactgggtcccctcctgggtctgcttggccccatgccctcgaccccctcgccagctgggcaccccaggccctactcaccaggagcagctacagcagcagcaccagcacaggcagcaggggttgcggctgggggccgctggagaggctgtatcatgactggacattgaagggggccggtccgcctcctctggccctgtgatctggggaaaagtggggctacctcagctttcaggtcagaacccaccagactctccacctctcccccaccttcccatgggtagccctgttcccaggcacatgacccttctggcctcccgggtgttcagggatctcccagctccttgtggcccctcagcttgccccaccccatctcccccaggggagcagaggcagagggggaggtggcatacctgcttctcagcctcatgcggggtgggcatgggtgggcggaggaggttgcccaggctccgtggtaccagctctcagaccctcaccacagcctgggggtctggggagaggggccaaggttctgactgagaacctgaaaccccagcccctgcctaccccttaggaggggtcctgagagggtgtctccctagcggggcctgctcctgcctctggacccagctctgcctagggcttctaccccgaccccaagcttacagcagggctgggagggggtccaggatcattgaggagggagctgcagcagcttctggcccctcctcccaggctgggccccagatgaggcccccactggaggttccgagacacccccatccgctcactccctgggaagccggaagcctgggttcctctttcttggtttccggctcccagcccctcccaaaggggccccgagagtctggggctaccaactggtgcgtgcgggtggtggccagactggcttctagggtgtctggggtggggagtgggcagagtggcttcccaccaagagtccaggtctgtctgtgggtcccagaggtctcagccaggggcagcaggctagacctgcagcagtgaggatttaagtgggactcaggctggacttgctgagggtgtgggaaggggggcagggccccggtgaggagggacatgccccccaaacatggttctttggtcctgctacctcccacccaagacttccctccctccttgcccactgcctctaggctgtgaaactgctgtggaaccaaggccctaccacagggtgcgccagccagggaagtgggggtggcaggggtggggggcaccctgctccccagtcgaagcctcggagtccctgaggggggtgtggtgtggtgcatgtccctcccagcatttggttgcaccgtctgcaggggaggtgcaccaggagcgccaaagctgtgagtggccctcatgccacctaagatgccacttcgaatcccaagtctccttgggcgatggtacaggggggccaatcagtgccccggaggcagttgtgaacacctgcgcccacttctgcccagggcagggaggggcctccgtgcacatccgccaccctcctcatgtgccgccaccctccctggccaggaagctcacaacttgattctactttattttctcaatcttcatccccccgccacgcctcccctagctcgtggcctttgaatgcttgtttctggctggttggcttctcttggcctcctgggacggtgtgtgaatggccctcagaagagacagtgctggagttctgcactcttagggcccccaatacccccgaggcctgggcatgcagaggccactgccctggcccaagtctggggcaggtgcagcatcccctgggaccttggcccctcaccaccggcccagtttcctctgagactgggggtcccacgggctcctagcaagtagatgaggagaccgaaagtagccctgcagctgggctttctttcaggggtcaagtttctagggaaaggaaggggcgtggcaacctgaggtttggtagctgtacccagacggggctgtctgtggcttccccaggcagcagttcttcctcctctctgtccccacccagggtcctcccccacactctagcacccctgagactgtccccctgggctaccatctccaccccagctctgaactggaggaggggacgtgtttaggggtgcagggccggggtgctaggggctgcatttgctgcagagcagggagccagccccttctttcccagttgcaggccctggacctggtcacctgtccctggacctggcttcctgtacccttctcaggtcaactggggcaacccatgtccccaggctaccctccccccgtctctcctgggggatacagagtctcaactagggtcctcctgcttgtcaacctggcattggggacccccttccccagcctcccaggctttggcccccaagtctgggatgggataggctggataggcggcacgtctgctctctggggatagaggatcccttgggagtggctgccgctttgctccacagaaggaaaaagaacgtcccagagcctgcccagtccaaaaaaagaataagaaaatgtgacaatcccagaaaaaaatgtcataacctttgggaggggggttgaagaggggctccattctcagtccttagctcctacccagggcctttcccatctgccaccctccacatctggctggtgggcgagccctggcctggcccctccagggaaggccagctctccccacctctgaaatggtggtggtggcccacccaccacgctcctctctctgctgttagggtccagtctggagaagcctgtgttctcctccaggtgcctctttcttcagcctctgacgcccccacccctacctcaaagctccctactcaccagcgacccaaaggcggggtgggggcaggaggggccaggttgggtctgggccccaccctggctgccgaaggggcgtgcactgcagcagcagggactcaagtcagacggcaggagggactcctgcggcgctctggagggaggctagcgccaggagcccccgatcggctggggccgggggcgcagcgcctcccctacagctcgaagggctgagtggctgccagatccagcggggtgggggcgggggcggacagggtgtcccgccccggcccctcctcaccgggctgagagggggagggagacgcggaaacctgggttcttccggcccccacctttgagcaatcacttccccaggctttgagctccagaaaaaggggaacccggctgcggcgccccctcccccacgcgcggggggcgggctccacttccactgcggcccagggtccacgtggacctggcggcgggagcccttggggttcgagtcccgtgcgccggctcccgaagctcccgcccagcacggtccccgggcccgggccgggaggggcagggccgctgtccccggcgctgcgcgcgcgcactcaccagccgcgctcccgagccactcgcgccgccgccggcccgcgcgctccaaggtccggcccgacagtcggggagggggcgcgggggcgcagtgcgcaggcgcctcggcggcacttccccaaagccaggggccgggacttcctcgcgccggcggtcgccgggcccgccccgcccgccgcgccccgccccgcgctcggccggctccgcaccccacccgccccgcccgcgcgtcggcccccacagtcgcctgggggtggcccggagagtcgaggtgctcatagtggagccctggctcccgggcggacggagccgcacggtagtagatgggggtgtggccgtggcccccgactctgctcggcggggccgttcctgctttgccatccgtgtgggacttccacgacagtggaggcacgagagctgggccccatatgctgcttgcccagcttgggaaagaggaggctgctgcaaaggaccgatcggcgggtacgccagcccggcccacccctcgcctccgtgagccgcgtctgtaaaactgggttaagagccgcctgtctgtgctgtggggggttcccaaggaagggggagattcctgtgctgcggggctggggagaactgggggtgcgggttcttgcatccggagtcatgccgaatgtctcctgtggggcctggcagagtccctgctgacccgtgtgtcccaagatgtcctaaagcttaaggccacactgtcccctttgccacgaacgccctgtccctttggccgactcttctcatcctttatgactcggtacagacgtgggttaggcttctcatcgcagcatgctttggccctgtgtcagggtggccctgaccctgctctggaagtgtctgcagagcatctgtgccccccgcccctcccctggcccggctgtgtgcagctcctgtcctccccagcacaagcactccacccggatagttcccagtgtcgggatctgttcataaaatgccttccagttgcacaggtcaggtgcacaccttacaccttcacagaactctgaggggtgcaaaggcagctggagattctacttgtattcctcattcaacggacaagtatcagtatctgggtgcccctgtgggccaggcagtaggaccagaagccagcaacatagatcagcctggatcttatgctggggggcgcagagtgagttgtggggagcaggcagggaaggcctgggtgagaggggggagggctgaggaggggagggtattgcgctgctgagcgggggcgggggcccgaagggggaggtcagaggtcagagggccctgg

SEQ ID NO: 9176 - DNA, 6000 bp, Homo sapiens
cgtggctctgcctctggcacagcgagcccagccctggctggacaaggtggcagctgtaggctggggccgggaagggaggagccagctgggcttttggaccctccctcctctgtcacctgccctctaggctctgctccccacaaccatctaggcctcgaagggcaagagcgagctgtctggtgggagaccctgactgtcggggaccgcagacataggggcacaacgaaggtcccccaggcgtcacctagagctctccatgtggcagggcctgagatcaacccagtggggtctcagcattttctcaattcaaacagaacagtccatcgggtaggaaagatatttcctacaactgagttgatcagaaagtcctagttgactgcaggactgagcaggatcagccgatggcagagctgctggggacgtgcgcttgggagagggagagcgcctgggcaaagctcagaggctgggggtgcggaactcaaaaccgactgcggagagcccagcgggcgggagctggggcgcacgttggggccctgccgaggggcgggcagggcccggtgccagccccggcaccgacgggacgccctcctccctccgcagggcgggaggatgccgccgccagcgaaggagggcgggcgcaagggcccgcgggagcgaagcgggaagagcgcgccaggcacggcgcagggtgaggagcgtgccaagggggcgcccgcgacagagccccccaagccgggctgggccctgacgccgcagggactggcggccatgctccctgcgcagcgccaccgccatctgctcttcggcgacctgctggaggacgtgggcgcggcggcctccaccttcccgtgcgggtcggtggaaccggggtaccgcatgcccgacccgcgcccgtggacgcagtcgctcgagctgcccgccgagcgccagaaccggctcctcggcgtcctcaaggcagcggaggcccgcgggcgagtccgcgccctgcggctgcgctacacccgcatgcgggtgaggcgagggggtcggagggcagagggggcgcaccgggagcgttgagcggagccggccggggcggggcggggcggggctcggcgcgcgctcagctacccgggccccgcaggccgaggagatcgcgctgctcatccagcggcagaagtccgcgcgcgccgccatccggctggagctgttcctgccgccgcagctgaagcccgcgcggatcccggaccccctggaccgccaagaggtgcagacaagccccggtaggggcggggaaaggggaggggccctgcccgcctccgcacacgccggaccccagcctctctccccggcagcggaggcgcgtggagaccatcctggaggagaacgtggatggcaccatcttcccgcggtgacggcgactgagagtgtgcgacgcgccccagcctcccacataaagttataattctccgaaggctcgctggtctttttgctgccactccccaggaccccgagggaagcggggagtatggacgctgcctctcccatgcacctcacagacatcagggtacagagagtggggcctctcccaaaaaagtggggagacgcaagtgggtgggtgtgaaagtaacaggtcagggacacgcctacccctaatcccgatctgccccccactggcaacctggcgttctgtgggtctatgggaggcccccagtcttggggaggacggagaaagagcctgtttcagcagaagtcacccccagatgtaagggtagcctcaggctgcagtggtctcgagtgcgagtcatcccaccagggggccagggagagggcagtgctgtgggcagcggaagtgacctaagctggcctttgaagaagcagcagctgtgcccaagaggaccaagagactgggcaaggggaacccctgcggcccccagacaaaaatcccaccctctggccttcctttccatcctgaatagcctcctgtgacccctttaatgccccatgccacacccccacacccacccccccacacacacacaccccacacacactcacgcatgcagtacaaaaggaagccacccctgtcccattctgacaaacaggcccacgacctacaaaatccctggactctgaaaagccccgaggtttctgggcagaccttacttttctccccgacgtgagctctttgcagacgctggggcttccctaggcccccgcttccttttcctccctcccagccccctgcccagcaggctgcacagaagcgggaccgcaggaactcagacaaaccgctcctcctgctagggggctccagctgactggaaggaggggcagaggtcagaactggggtccagaagggatcctgctccatggcagccagtgtttctccccagccccggccagggggtggagccctgcgcactcgcccctcagccagcccttctccccgtgcaccgagcactttactctttctgggctgttgctgcccttggccttgacccaagcccagactgtatacagagctcagaagtcagctgacaaggaggggacagagagatggcaggaggggtttcaggaagggaagggtagagaggaaggaggccagggagaaggggcttgagcaggggcagacagacagggaagggaggcagtctgtccaggagtggcagccactcacaccctgatgtgcttgtgacatgtgatgacagccagccctggtgtcgtctggccaaactccctgcagcctggaccccaggattctgtgtcttggggattgactgagtgcctagaatgagttcatctactgggagaatcacatattatttcaccatttctctgagactccatttctttatctttaaaataagggtcttggtgcagtaccccacagcagcaagtgctccaaaggggatgggtcactctgcatcagacaggcaagagggaagaggggcagagacaggcacagcagacccagcacccagagaaggccagcaagacagtgacctcagtgactgcaccagggtcaggccggcactcgggccctttgatccccatgaaaaggcgcagggggtgctggatgtgcaaaggaggctggggaatggggcctggagggacgcctgcctgtagaaagctctatgggaaggaaggcatgtggtccaaagcccaatatattgagggctgtcagggcgcagagggtcctgggttcaaatcccagctccgccatcaactgcccagctcacctggccccacccatggacttcaggatgctgtgtgccgagaggcagaagccagggcggtggagagcaggcccaaggggccagaggagacgggggaatgactggggggttgtagagtgacccgagggggcagggagggcactgaccttcaccccctgccagctgcccacagctgcattttcccacagcagagacaacaggccggctcagcggggtcagcctggttgtgtgtggcctgggccaggtgctggcccatcttcgttgagcttccctgacctcacctgtgcccaccgctcaggagtgttatgtgggctgaataagtagcagcctgcctcttgtccctgtgggcttcctggcccctgcctttccttgcctggcctgacaacatggcagtcacagggttctgggtacagcttcgagaggcagcctgtctgtcctccagggccctctgacctctgacctcccccttcgggcccccgcccccgctcagcagcgcaataccctcccctcctcagccctcccccctctcacccaggccttccctgcctgctccccacaactcactctgcgccccccagcataagatccaggctgatctatgttgctggcttctggtcctactgcctggcccacaggggcacccagatactgatacttgtccgttgaatgaggaatacaagtagaatctccagctgcctttgcacccctcagagttctgtgaaggtgtaaggtgtgcacctgacctgtgcaactggaaggcattttatgaacagatcccgacactgggaactatccgggtggagtgcttgtgctggggaggacaggagctgcacacagccgggccaggggaggggcggggggcacagatgctctgcagacacttccagagcagggtcagggccaccctgacacagggccaaagcatgctgcgatgagaagcctaacccacgtctgtaccgagtcataaaggatgagaagagtcggccaaagggacagggcgttcgtggcaaaggggacagtgtggccttaagctttaggacatcttgggacacacgggtcagcagggactctgccaggccccacaggagacattcggcatgactccggatgcaagaacccgcacccccagttctccccagccccgcagcacaggaatctcccccttccttgggaaccccccacagcacagacaggcggctcttaacccagttttacagacgcggctcacggaggcgaggggtgggccgggctggcgtacccgccgatcggtcctttgcagcagcctcctctttcccaagctgggcaagcagcatatggggcccagctctcgtgcctccactgtcgtggaagtcccacacggatggcaaagcaggaacggccccgccgagcagagtcgggggccacggccacacccccatctactaccgtgcggctccgtccgcccgggagccagggctccactatgagcacctcgactctccgggccacccccaggcgactgtgggggccgacgcgcgggcggggcgggtggggtgcggagccggccgagcgcggggcggggcgcggcgggcggggcgggcccggcgaccgccggcgcgaggaagtcccggcccctggctttggggaagtgccgccgaggcgcctgcgcactgcgcccccgcgccccctccccgactgtcgggccggaccttggagcgcgcgggccggcggcggcgcgagtggctcgggagcgcggctggtgagtgcgcgcgcgcagcgccggggacagcggccctgcccctcccggcccgggcccggggaccgtgctgggcgggagcttcgggagccggcgcacgggactcgaaccccaagggctcccgccgccaggtccacgtggaccctgggccgcagtggaagtggagcccgccccccgcgcgtgggggagggggcgccgcagccgggttcccctttttctggagctcaaagcctggggaagtgattgctcaaaggtgggggccggaagaacccaggtttccgcgtctccctccccctctcagcccggtgaggaggggccggggcgggacaccctgtccgcccccgcccccaccccgctggatctggcagccactcagcccttcgagctgtaggggaggcgctgcgcccccggccccagccgatcgggggctcctggcgctagcctccctccagagcgccgcaggagtccctcctgccgtctgacttgagtccctgctgctgcagtgcacgccccttcggcagccagggtggggcccagacccaacctggcccctcctgcccccaccccgcctttgggtcgctggtgagtagggagctttgaggtaggggtgggggcgtcagaggctgaagaaagaggcacctggaggagaacacaggcttctccagactggaccctaacagcagagagaggagcgtggtgggtgggccaccaccaccatttcagaggtggggagagctggccttccctggaggggccaggccagggctcgcccaccagccagatgtggagggtggcagatgggaaaggccctgggtaggagctaaggactgagaatggagcccctcttcaacccccctcccaaaggttatgacatttttttctgggattgtcacattttcttattctttttttggactgggcaggctctgggacgttctttttccttctgtggagcaaagcggcagccactcccaagggatcctctatccccagagagcagacgtgccgcctatccagcctatcccatcccagacttgggggccaaag

SEQ ID NO: 9177 - DNA, 6000 bp, Homo sapiens; identical to SEQ ID NO: 3357

SEQ ID NO: 9178 - DNA, 6000 bp, Homo sapiens
tgatctcaaactcctgacctctcaaagcactggaattacaagtgtaagccactgtgtccagccagttttataatgcatttcgaaacttttttgaaataaagttggtaatacaaataatgtcatacatgatgatggctagccagtccacaaaagcctatttaatgtagccttctgttataaaattattttccagttctaatttgagatcatctgaataaatcctcctctcctctatcaaaactaacaatgtagtatcaaggagagctcctcttctttgtccatctgctgagggaggagaatgaaggaaggacgtccaattgtcagcccagagcagagtattctgcagggcagtcagaggggtgtagagcagagatcagaaaataaatctgtgggggtacctacagccttctgctagcatgaaacctgagcaaagctatgacttctacatgcttctggtcatatcccagttccctgggtcataacaactggtccagtttccctctccactaggaaaaccaacttttttttgcagatctgagtattcctctttaccacaatacatagaaaagtcatctcagatctcctctcctttatttctatccctaaagcaagcactcagctctttggaaatttctaagggtgtttctttcactcttaaaaaccaagagtacaaagtatcccctcctttacttccctacaactttcgcttcctccttgaaatcatatgaaaaaaaaaaaaaaaaatcccatatagatgctaaagacaaagtcctcacaaaaagtaccacgtcaaattcatcttgaggttttcctcccaaggaaaagcaggctaaggctatgctatttcggtttagtagtacagaccaggatttggaaggagagcaaactgggagtgcatttacaacttaccaaatctgttagtccagctaaagcaaaaactcctagtgcaatattaaaatcttcttcaataatcaaatagcccagaactggggccaagccaattctcgtcattgacaacatattcgggattgtccatgggttttcatactgaaacacaaagacaacaaaatttaagtaaaatactatgaattcatactttgaataactatatacatacattagaaaaatatacttcatcaacttcagtcagaagctacataaactttaaatttagtacattaaattgaattttaaaatccattctgttctttttacagatatctccctaaaatcttctttcaagaatacagaagatggctgggcatgatggctcacgcctataatccctgcacttcaggaggctgaggcgggaggatcccttaagcccaggaattagagaccagcctgggaaacatggagagaatcccatctcaattttttttaattaaaaaaagaaaaaaaaagaatacaaaagatgaagatgtatcatgtaccgaaacacagggtaaggtgtcttacatattataggtttccttttctctttttttttttttttttttgagatggagtctagttctgttgcccaggctggagtgcagtggcacaatctcggctcactgcaacctccacctcccgggttcaagtgattcttctgcctcagcctcccaagtagctgggattacaggtgcccgccaccatgcccagctaatttttgtatttttagtagagatggggtttcactgtgttggccaggctggtctcaaactcctgacctcgtgatccacctgcctcggcctcccaaagtgctgggattacaggcgtgagccagcatgcccggcctattataggttttcttaagagagggaagacagaacacatgtattatctgccatataagctaagcctttaatatataacttcattgtaagaactcagaactttcaacactctgcttttaaaggtgaaacttcaggaagatcttgtaaatagacaaacagtgtctacttacaagtaaaagtgtcaggaaaaaaggccaaattatcaactccaggcattcagctttaaatactgcaaagaatctccctcactcccttacacatatctaaagaatgctaaatgctatatagagtgtatggaggtttgaatgaagagaacaaaaacagatttaattctataacctcatcactaagtcagagaactgctagaagaaaatggagataggaatagggattgtgatatttggaaatcgagaaattgtgtaaatttgttcaaaacagtcatggaaatgttaagatcctcaactaaaaaccaaggactttcacagctcccatctgggggctttgcaattcctagacaactcatttggagccaagctgtttgaagttggcactaacaaaagagctctttggcagctgtctgaagaacatccccttcttgccaaacagaatctgactcatgagaggatatttcagctttgaaaagcctcggcccagcggagctaagacaccttgcacaacagggtacagaaataacaacaagaaaacgcctttccctgaagcctagattttttttctccgctgtgtcaagactgccaattccactccatgggactttctcttctctagaaccccttttaacctctttcttaatcagtactagccaacttgcctgaatcttaattttggttgtaaaaaaggtggcaaaggccatttctgaagattcttttaaaattccatttctgaagattcttttaaaattctatgaactatcctgtaaaaaaaaaaaaaaaaaagtattctctaaagacactatgtctgtgtttataaaagaaacccagcaagaaagcacctcagcttggagggataattaaatagttattgctggggtcaggtggcagaatactgtcattgaaagctatagaaaaacttcaaattatccgaagagcaatcacaaaacaagaagcaatacaaacctctactctgagatcttttactgaaagtaatccacattatacaatgaaaacattcttggaatacatcccaaattcaagttcaaatatcagagtgtttcagagtccaaagaaaaaagataagtctgttgaccatactatggtagagaataagtcaaatactgatcaaaggttacagcaactcaaagggaagagtgggaggggagaaggctgcacacggttgcaaaaaagcagtaagcaaaagatcagaaaaaaggtccccaaattaacttcagaaattatccacagggcaaaattaaagacaaagttgtaaacagaaacatcatttcatttggcgaattaacaaacagaactcaatgttgctggaacagtgaagggagttctttttagctccacatagaatatttcagttaaggtgtctcattaatttgtaatcattaaatccgtaaaagtttcaaagttaatgttaggagagctaatctcagattactcaaccagataacctgtggcatactcgaccaactactgccgttctgggaaggacttcagtcaggatatggcaacttcaaagtatccagcattcaaaccccaacatgctttagctatcagtggagttgagacccctgccaggatctggccacctcaacccatgctgtacaactgatgaaagcagtacaggggccactgaagacataacaattgaagatgtaataattgcatgagtcttgctaacatgacatcaaaagctctcccacactcatgctcgggtgtcttctgtctgggtagcatatcaacaggtaagtggacaaatacttccctccgttacctcaagaatagtttaaatctttttctataattaaaggttaaaagatcttttaattacgacctaaattatttaattaccttcatcctataatgtgtaaggttaccaaaggtcaaatgatggtgaacggaacttgcacaagcaaacagaagggcctgtatacctttctaaatattcccaaagacttgccctaaacactggggattcacttcaaaagaattaaaaataggcttttagtaagacaagcgaaggctacctttatcaatgcaatatgcagaggcggcccttccagcaacgggtgcagatagaagggggatgagaggatttctaacttgaccacagagaccgtaggtggaccccgctggtgaccctgaaattcatcccgaccgaatgacctgccagtaacttcttttcagggaagagtctaaaagttaggaaacggaagcgtccgagctgcaccacccagagcttgttacctgagtgcaggggcggcgaccccagcccagggccggcccgccgccgcctcatcggtacgtaccaggctgggggtgctcgccgggccccactggccgcccggggcttcggcagcggcgcccgctccggccgctggcctgggagccgccttccccgcgcccgaacagtggttccgctggccgatcccgggcagccgcaagccaagagcggccggacgcagcctccagcgttcggccaggcagcccaagcagcagggcacgggcggcagcagggcccagcaggcgcgtcgcttactcggccgcgttcccggagcccaagcggcgccgcgcagggccccccacgagccgcgcgccacgcgcaaggctagcatggccctgcggccgcgccgcggggtctcgggcggcgagagctcagcagcctgggacactggcgagccgcttctccatggagacccggcaaccactcagacactgggctaccgctgcctccatactactttacacaccccagcacactccacttatacaggtggcaggaagccgccaagggcggacgccttcgcgacgcttttacgacaccgtcgtcgtcgggcttcccggcgcccctggcacagcggaggcgcgcgcatcaggctcagtgggttttgggaagcagcgggtacgcggcgctctcttctcctggcccgcagccgggagccaaggcccgggggtgggcggggaaaggggagaaacgaacaagataggatgaccgcgcagccgacgtagccgcgagggggccggagccacctcaggccctggcctgaaaccctctgaggcgggtggccggcagaagggccccctccaaggtgcgtgcggcgccctacggttcttgtgggtggtttacagtatctagtgcagaagaaatgattaataaatattggctctgtaattctctcctctttgagcattgaataaagatgcatatgctaaaaatataagcattagtaaatgttagtaatagcaatggctgattgttttgctgaaaacagtaatactatattatccagaatcaatgtttacctatgagaattgtctttttaaatagtttttattttaaatttttacattgctagtacaaaagtttcaattatactatataaccaggctatagtgcatcatcccgtttaatcctcccaacgactgcaagatgagggttccattattacttttacagataaggaaacttaggtttagagaggttaagaaacttgcctataatatccgagacagttatgaatcagctcaccattaattagctgattaatatattcagattagtatactaaacatattgatacatcaatatttgcaatgttacagaattttttcttgttgaattcagtgttgaactgaatttgaatgattattgccgcctctccactatcgccccactaaccccatctatgatggctgaactaccttacagttgagtttaaagtcttaattcgggtagttaggaaagggaaaggccaactgaaagtgagcaacattgtagatgaagcagcgggtatttatccaaaaaaaatctatttcttacattgaaatcctgacattgagagaaaaatggaaacttctgcaacagcaatgtaaaaattttaaaaaatttaaaaactatttaaaaacacagttctcataggtaaacattaattctggataaccctggcaagagggagtgggcaggattccagtctctcccttcctttcatgagattgcctttattcactctccgcttcctaagacactcattgtgtcttgg

SEQ ID NO: 9179 - DNA, 6000 bp, Homo sapiens
acctagcattactgaaagtctctgctagaagcctgaaaatttgtcaactttttacctctttctgtattcccatccattagaaggttttcagagaagacttgaggtgtgacagacctgagttactcatctgtgagacagactgaaagaattcctagaactacatttaccatgtagtaacacagttcctttaaactcttgccaccaagacctcatacaactgacactcacctctaagtagaaagtatttctattactgagatttatcaagaatatttagactgagtggcttttttttaaaatgattaatttaccatttcttgaactgtaaataacaataaaggttctcaaagggacttctttctctataccaatggttctctactggaggcaaagggtaatttttcccctaaggaaatatctcacaatatccaaacatttgcagttgccaagtggggaggggggtttctagtggcatctagtgagaagagtccagatgcggtgctgaacatcctacaataaacacgacaacccccacagtaaagaattaatctgtccacacgtcaatagtgccaagactgaaaaactgtggtctgcaataatttgtgaatataaattataaaagagctcgagtatacataaacatttgtaaatacaaaccggtaaccaaaaataaaattcatgaagccattataaaataaactctatatttgcctaagtaacttctatattagaataacaagtttcaaggtacagtgggtgaatctaaagtttaggactaatacagtcaatctactttcacaagactattctatagactaaaaatgccaagtactctaagaagtcattaatgtttcacaagaaaacagtaactttttctacctacacgctcttaatttcaggcagtattctctaatgaaagcatgagaatacttaccgaaagggagcaagaaagattaagacacacacacactaccaattataacccaattatataatattccttgtcaattcagtatcatgctttaatttttgcccttcaagaaaatttatctgcagaattagttataaacagagttcatccaaaagctcactctttgctgtaaaatgaccactgacccaacataccaaagatatgtaaaattttacggacaacaaaaatgcatttaaatcccaaatgcgtaagttgctctttatcttttcagtttctaaacaaatagattgaatttaagcattgttcatgtctcatctttcccctacataatcacaattcatatcacagaaaaatgttcttataacttacaattctgtctgacccatagatcttctccaactgttcagcaacatcccttgttccatctgggcttccatcatctatgattataatttcatagttgattccactaaaaaaattaaatttgtattaatgactgatgacagtgttctcaaatttaaaagtaatttaaaaattactaattccttaaaagtataaatggagatgtattgctatattaatcgttgaggaaaacttcaattatcaaatgaaataaatgtcaaacatttagtactttacctccaaacccagtatgttgctgaaacatgctaatgtcctgagatattaaagaattcctacacagagaacaaactttttagttcaaaagaaaatcacgtaatgacctatgtatcatatgaattttttttgttttgagatggagtcttgctctgttgccaggctggaatgcagtggcgcagtctcggcttacctctgcctcctggcctcaagcaattctcctgcctcagcctccggagtagctgggactacaggcgcccaccaccacgcccggctaattttttgtatttttagtagagacggggtttcaccgtgttagccagcctggtctcaatctcctgacctcgtgatctgcccgcctcagcctcccaaaatgctgggattacaggcatgagcctccgtgcccagccatatgaaattttattacctatttggaaataatattctgaaccttaatagcaaatcttagttacataaaatatttcaaaagtactttacatggtaactcaaaccaaactgagtaactcagtgattattcttgttaatctgatccaaatagaataatcaagtataaatctgatttaatttcatctttaaaaaaaccgattttagaatggtgacattatcttaaaccacaatttcaaatagttgtgcctattacctcacattatcaaattaaaaaaacaaaagcagagtagcattacaaaagattccactgtgcttcagaattaacatctgttacttcccattaatctcaggtggtagtttctagtctaaaaacaaaccaacacaatacttggtggataaataatacctacgacataacattccgttttctcttggtcctgctttaagaaacaaatacaagaggctgggcgcggtggctcacacctgtaatcccagcactttgggaggccgaggcaggcggatcacgaggtcaggatatcgagaccatcctggctaacacagtgaaaccccgtctctactaaaaagaacccgggaggcggggcctgcagtgagccaagatggcgccaccgcactccagcctgggcaacagagcaagactccgtctccaaaagaaaaaaaaaaaaaagaaaaagaaaaaagaaacaaatacaagaaaatcaaccagaaaacatattccactgttaaaggctttaacaagtcagccccagcaaactttgaagacaagaaagcaaacccctgtgttatctattctccaagagtagaacaatgactttggcttcccactgtgccttaaatctgggcactggtgcctttacatgccaaaatatgtaaggtgattttaatagacgtgctgaaagagaaattccataaacaaaatggggtcgttaaaagcaaattactgtcccctaccacttcaaagcagctacaccacctgagggtgaggcagctcaaaggtaccaagctgggctgacttcaagtaatttgattgcatctgaaaagttttgtttcctttatcaaacttcattttgatcttaaaagattgattcacaaaccattaaaaggaaacataaattgtactacataaaaaaattaaaacagcaaaaaaaaaaattgcaaaattagaatacaagccctgaacgagatcggttgtatgatagttactttctttaatttagagcttatagaaatcaaaattaaaagattaaacaggaaaaataaaaattttaaaactctgaggggcaaggcatatgaaggcagttattcaaggaaatacaatcaaaacagcaatggttttcacaaatgagtacttccaacaatgttaagtctaatgctcaggcgggctggttgatagggaaacaggcactctgaagaatggagagtccaaacttgtacaaccttttttttctttagagcaatttggcagtaactgtccattttaagcacatttctgtcgacccagcaatcctacctcgaagaatttatccctagtacacaagtaaaagtatgaacgcgtctgctgccaacactgatgcaataaaggagcaccgctatgtgtcaagcacttttctaaatttagctggaaaatatggtgtgaacaaagtccttgttctcatcgacaaagcaaaagccaaaaaacagaaacaaccaaaaggcgctggaaataatccagttcattgccatgacctgattaaataaataacacagccatatggaatgttacctaacttccaaagtaatttgctatgtttgtacatgttaatatgagaaaaagtcttcaaagatttcacagcatgatcccatttgtgcaatcgtaaaacaagttacttcgtactgactccaggattttttgcagtttttaaaaacactgcattaacacttccaaattcgaactccacccaccccccatcccggttctaacaatcacaccaaacatccaccagtgatcagcgaagatgctcttctgctttctcctttccagaaaggttatcgtgcccagcaatagctccctaacccacacacaccaaacctcatgcttatgtaagcactcggcaccggagcggagagtgagagctctcgcttggactcccggctcttgccgcagatcctgaccgcctagagggaggagtgggatcacgctttcagcctcgcttccaagtaaaagagtggccaacctttctacggaaaggcgggggacgggagtactacataataaagataaatgagagtctcacaaaacccaagggcaggaatgagaacccaggacacgaagaaaacccaacaagcatccgcctctgcttccctcgcagggtggccctctccccgggccttcctgtgtgaggcaaagaaggctggacagggccgcttcgcgcagccagctgccgacacccgggccggggaagccagctcatctcattcttcggggagggagacctggtgcgctacctctcggagaagcttttcaccagcagccacacgatgagcggcaggttctcgcgctcgttgtaggtaggtaaaagcaccgaatatttgttctgtcgtggactgcgcacttccagctcccgccgagacctgcgaggactacgactgacttccaaggaggccatggcggaactgagccagatgccggaagcggaattacgtaatgtggcgcggaaaaggacgggtcggaccgtaccaaattcggaagcgggggatgacctgtgtgattgatcgctagttcttctagggccattgcgtggttcaattagaaatattctggatttatacatctttgaagtttaatctgaaggtttcttcaggaagtaaatatctattcatcaccttttcccaagctccataaagttttttagtttatcccagtcgctaggagacagaagacggaagcggaaatgcctttcacgacaacttccggaagaggtcgccatggcttcccgggaggaggtactcgccttacaagctgaagttgcccaacgtgaggaggaattgaattcgctgaagcagaagctggcgtcggctcttttggctgagcaggaaccgcagccagaacggctggttccggtgtcgccgctgccgccgaaggccgctctgtcccgagatgagattctgcgctatagccggcagctagtgctgcccgagctgggcgtgcacggacagctgcgcctggggaccgcgtgcgtgctaatcgtgggctgcggtgggctcggctgtccactagcgcagtacttggcagcggccggcgtgggccgccttggccttgtggactatgacgtggtagagatgagcaacctggcccgccaagtgctgcatggcgaggcactggctggccaggccaaggccttttcggccgccgcctcgctgcgccgcctcaattcggcagtggaatgcgtgccgtacactcaggcccttacgccagccactgccctagacctggtccgccgatatgatgtggtggctgactgctcggacaacgtgcccactcgctacctggttaatgacgcatgtgtgctggcgggtcggcccctcgtgtctgccagtgccttgcgcttcgagggccaaatcacagtctaccattatgacggtggcccttgctatcgctgcatattcccccaaccacccccagcggagacagtgaccaactgcgcggacggcggggtgctcggtgtcgttaccggggtcctgggctgcctgcaggccttggaagtgctgaaaatcgctgcgggtctgggcccctcttacagtggcagcttgttgctctttgatgccctgagagggcatttccgctctattcggctgcggagccgcaggctcgactgtgcagcttgcggggaacggcccactgtgactgatctgctggactatgaagccttctgtggctcctcagccactgataaatgccgctccctgcaactactgagcccagaggagcgtgtttctgtcaccgactataagcgactgctggattctgg

SEQ ID NO: 9180 - DNA, 6000 bp, Homo sapiens
ttcctttcctacaaaatgtcttttcattatttctcaaaagaagatatacaagtggccaacacacacatgaaaaaatgctcatcatcactaatcatcaaagagatgcaaatcaaaaccacagtgagacaccatctcacaccagtcagaatggcctttgttaaaaagtcaaaaactaacagatgttgcagagaaaagggacacttatacactattggcagggatgtaagttaattcagccactgtggaaagcagcttggaaatttctcaaagaaataagagttgaggccgggcgcggtggttcacatctgtaatcccagcactttgggaggcccaggcaggcagattaaaaatacaaaaattagctgggcatggtggcacacaactgtaatcccagctactccgaagactgaggcatgaaaatcacctgaacccaggaggcggaggttgcagtgacccaagattgcatcactgcactccagcctgggtgacaaagtaagactcggtcttaaaaaaaaaaaaaaaaaaaaaagaaagaaataagagttgaaataccattcaagctagcaatcccattactgggtatgtacccaaaggaaaataaattgttctaccaaaaggacacatgtacccatatgttccttacagcactattcataatagcaaagacatgaaaccaacctaggtgcccaccaatggtgaaatggacaaagaaaatgtggtacatacacaccatggaatactatgcagtgataaaaaagaatgaaatcatgtcctctgcagcaaatggatatagttggaggtcataatcctaagcgaattaacacaggaacagaaaacgaaataccacgtgttctcacttataaatgggagctaaacattaggtacaaatggacataaagatgggaacaatagacactggggactaccagagggtggggagggctgaaaacctacagcaatgcttgctacctgggttatggcctcaatcataccccaaacctcagcaccacacaatatacccaggtaggaaacctgcacatgtacccccaagcctaaaataaaagttgtaaaagaaaaaacaaaaaaaaggtcttttcatatcctttgcccatttttcttctgggttactgttctttttgttactgaattgtgaaaactatttatttatttgatatttacatattagggaattttgataccctaccattcatatcatcttttgtcaatagtcacccaacttctcctaagaattatgggcacatacattaaaatgtttaatttggtttgacagtttaaaaaattgtatcagcttttaagctaaaggagaacacagataataatacatatgcttagttagaactcttggtctaagcagcacaggggtcataacataaatgcagatagtttgtacacatttcagttattaaaatatataattggttaaaaaaaggcaaaaattggaatttcaaagtcttttttacacatctatttgttcatatgttttacctgtgaaactttccttccttatgttaattatatatgtgtatgtatatatatgtgtatgtgtagatatacacacatatttaagattttgaagaatacgtattagcaggatatacattcactgctttatttcttttttctttttcttttttttttttgagatggagtcttgttctgtctcccaggctggagtacagtggcgccatctcggctcactgcaacctccgcctcctggcttcaagcaattctcctgcctcagcctcccgagtagctgggattacaggcattggccaccatgcctggctaatcttgtatttttagtagagacaggaggctggtctcaagctcctgacctcaggtgatccacctgcctcagcctcccaaagtgctgggattacaggcgtgagccaccaggcctggccctcactgctttatttctgtagttagagttgagatttattttcacattactatatgccaaaccctgtgcacctcatacatacacgaacctatttatcctcacaatggctctaagaagtagatattattattcctgtcttacagtgaggtaacagactcaaaaaggctaagtaatgtacccaaggtcactagaagttgtcaaggcagggattaagtctccaacctgtctgactggaaagcctgtatcagtaggtcaaatttattataccagctaaataatgagcatattggaaaagtttggggagcaccgggacttttttttttttttttttttttttttgagacggagtcttgctctgttgcctaggctggagtgcactggcgcgatctcggctcactgcaacctccatcacccaggttcaagcaattctcctgcctcaacctcctgagttgctaggattacaggtgcccaccaccatgtctggctaatttttgtatttttagtaagacagagttttgccatgttggccaggctggtcttgaactcctgacctcaagtgatccacctgcctcggcctgccaaagttctgggattactggtgtgaaccaccgcacccggccagcaccgggacatcttaccttggctaaggtaagtcaagacattgctgaaactatacaaatgaaaggttggtcaaagctaaccattttaatctaaatgtataccactctataaaccatcaatgtacagcactgtttcaaattttagaagttttacaaatttcccaaaaagctgagcaaagagtgagaaagcaggcaaagagataaaccagcaaccagataacacaagaaatatgacaatgttattttaaacaatttcaaacatatgtgattcttacctgatttcatttccaaaagcgtattgttatcaatttcatggttagcttttccaggctgaggcactcgtaatggtatgatctgagggacacacactgaaccagcagtcattttctctctctctctctctctctatatatatatacatataaattccaatgtacacaaaagctgaagagcagcacttaatttaaatgcagcaaaactagttaaaacgagagaatactgttaacatggcactacaaatattattccctttttaattgaaataataattacatttcatctgtatttgctgttgaggtcttgtgtggggttttgattatctaaatacctcacttctgcgaaaggagcatgaatgaatgagatggggaaaagaaagaagttactttaaaaggacaaattaaatgagtaaggcaaaacagagactatcactaacgctctgacttgagttccctgtaaatcattatcgccttttcctgcctctggtgtgtgtcagctctcttggcttcagggcaagtcatcatacaaggggaacagaagtaattctgtgtgtaccacaaaatgttagttagagctaacttttttgggaaagctccgggttcacagccttgccattatcaccagagcagttctagtatttgaaagctgcaaagacactttagaaggactgcagagtactacttctcagtggaaaggaagtttgcaagaatataaacagtgaccaataaacacaagcctcccgtttcatctactgtatttataaatcctggtattaataattaactaccagtatgaaagccttactggtctttttggaggtgagggtggggaggaaggttgtcataattaatgcacagaaggtttcagggggaaaaaacgctcaccttaacacaacaaccatttacatctctgtattgccttttcaaatttcattaataatccatagattttgcccaattataatctacatattcattccatttttatagtctacttcttgcattctcactgtattatttagttttccctgtacttatttatccatttgtggctgggcatttaggctatttctagtttctttttagttttgcctgttgcagttctaataatgctgatctgaacatgtctgcagtttgagctttgtcacagactgtattctcaaaaatggggtacctaaatttaaggggtgaacttaatgccttgttggatagttccggatctagggccaagaatataaactacagatactgacagcacaacaatagctcctacgggagtgtggctggacttgagacttgcccatagtcgcatttccatttaagtgaaaggcagataaaataaaagtagttgaaaaattctaaataaaaaatatgtaggagaggaagtaattcgcgagcgtcaactagcagctgcccttaggaagctggggtggccagtgggccccacgcaaagggaatcaagaaaaaaggcggatccgccaggcccaaatggcaacgtgcagtcaacaggatccccagacccctcaactctcccaacgtggaccgccccctcgcagcccggatccggaatcccgtttggttgttcccgcccatcaggggctgccaaggacacctgcatcctttcggctggagtaagggaagctcttcccctcctctagccgccctcctcttcctctaaccgcggggcccgggatcgggacccctaatgcatctctgccgcgcccaacccagtcgccagcctctcaccgcctcttgcctcctccttcgccgccgcccgggttaccacagacgcggcgagccgcgccccgcccactgggtgctgggcagatgattggtggagactcagcttcttagcaactagaccggcccctgccgctccgcagggagcctggtacccgcctggagttcctttcccagtgctttcccataggcatctaagaatattccttcacagagttgccaagtgctaaaagttggtttcccaactcagaatgaaggaaccaggcttgtgcgtccgatgggcattgacattctggaaaacaagaataagaagctgtagcggcgcctgtaagtgggccggagcaggcgcagcttggccacctcccgccgaaaggcaaggaaggaccggctgcgacacgaggaagaaggcccctcggcctcagcagagcgctatcctccactggttccccgggttccccggcttgctaccgggctgctccgtgcatctttccccccaggcgtcaggaactgcgccctcatggcggaggtgaaggtgaaggtgcagccgcctgacgcggatccggtcgaaatagaaaacaggtaaaccagtgaggctccggcttggcactccatcaggcgcccagtcatttgggcagctggaccccttctccgggatcccttgggagtggccggagcgggttaggtgagcacgcgggaaaaacgattgcggggttctggacccacttgttccttcccatcctgggagagcagaactcaagaagttcaaaatgggtttgacagcttgcaactttgtgtagctggctggctttgccctgatacttttggggaagttgtgatgacgtgctgccttcctactttgacgcgatcagtgctttgagaggagccctcggctttctttccctgtagaacacttgtgaatacatgttctgatccaggatcgctcttgtcactaagggaacgtctatgacaaaacgtttaggcggagttagggcgcagttggtgattacgaagtaacattaagccaggtggtttcagtgcagtattgaactcaagacttttaggacacccaaagcctctgccacttttatttttatttgtttgtttgtgagacagagtctcgctctgtcgccaggctggagtgcagtggcgcgatctcggttcactgcaatctccgcctcccgggttcaagcgattcccctgccttagcctcccgagtagctgggactacaggctcgcgccaccacgcccagctaattttttatgttttagtagagacggggtttcaccatgttgtctgggatggtctcgatctcctgacctcgtgatccgcccgcctcggcctcccaaagtgctgggattacaggcgtgagccaccgcgcccggcccagttttatattttaccgaggcactgccactcttagattttcacgtagttttaaaa

SEQ ID NO: 9181 - DNA, 6000 bp, Homo sapiens; identical to SEQ ID NO: 2955

SEQ ID NO: 9182 - DNA, 6000 bp, Homo sapiens
catctcaaggttgacattgacaaaaaaacggatactctcgccagacacgatggaggagttggcagtgtcgaaggcctcatcccccaggatctcctctcgggcttcgaaggtgtcatctgtgtcacacttgtagtagcctagagacccccaagagcaagagggcctggctgttaaagtgccacacacaggaaggaggggctccaagcccagggagcagggacccctggactgtcccactctcgggccgtggtgggagaggccatcccataggcgaggaaggcagcttctagtcctgccccagccccacacaggacatggcagctgccacaaagtgagtctccagcattccctagccgctgagaccaggaccctgcgcagctttgacccttcagcgtgagaaaaacatgtccactccagacacattggggcaggcacggagtgcaataatgcagatgagactgcctggcccctgccctcccaaagtagggaacacagggaaggcagagaagctgcagtatccacgtctctctctctctctctctctctctctctcacacacacacacacacacacacacacacacacacacacacacacgctgccttgtgggcacagggtcttagagctccgcctccccaggagggcaggtggggagaagcatcgaggctgagagacccaggacaggtatcagacaaggtctagggagcaggaaaaccagggaaacagagccaggggctgacaggggagaggaccccaaggcctcatgtcagccctgcccccatcgtgctcctcttcatgttctgggggccctgggtaagggcacatggagagtgagggtgtgtaatggcacctgtgggatgtgggaccccagaggtgagagcctgctccccttggtcctcaattcctgcagctggccagcagcacacccctcttcctacaggaagatttcctggtaacatgcaaatattcctctgccctgagccctgcagtggctccctgcagcctacagatcacagcctgagccagccctgctccccctgccctgaccactggctcctcaggccatccggtcagcaccctaggcatgcaaggtcctgtcctccaagctgagggcttccctccctggagggcctttttcaagactcacttggaacctcctcctccaggaagtcctcctagatccctgcctcacccctggccactggcagcccttcctgtcttgtgggtcccctaaggttcctcacttgtaggtactcccaggaaaggggcccttatagcccagaccccactgatgcctgacagacacctgtgcagaaacaaggatgggtcagcagcacgcctgcacctgccagggagtgactcaccctgactcacttctactcccgccgccagtttccttggcacatcccaggccctgttcccccagtgtcctgagtttagcctgggccccttctgggtaggaagccctagtgcctcctgcatcaaagtccccagggactggtgactcccaggcccaggcctgcactacctccagagcccagagaagaaatattaggtcaaaagacatccttgcctttgggaggccaaggcaggcggatcacgaggtcaggagatcgagaccatcctggctaacaatggctaacatggtgaaaccctgtctctactaaaaatacaaaaagaaattagccgggtgtggtggcgggcgcctgtagtcccagctactcgggaggctgaggcaggaggctggtgtgaacccaggaggcagagcttgcagtgagccgagatcacaccactgcactccagcctgggcgacagagcgagactcaaaacaaaacaaaacaaaacaaaacaaaacaaaagacgtcctcactgctttggttctggagctcatgataaactccttcctccccgggtcaggcttgccttgtttaaactgtctggttcccctggcccgaacttgtcccagcctcccctctgcccctcaaccagcacccactagtcccctccactgcccttcacacagccccgttcttcccccattcttcccctgatgccctcagctctaccttagacttagtgctcaggtcccctagattaaggacctgcccagctgacactaccaggttcctggggggctcctgcaatgccaagtcctagtcccagccccatacgtaacctgcccaccagcagcctagcacacagagccccatgtcctgagggctctgggtaagggaacatcagccctgtgtctacgcactgctctacaaacaaccctcgaatggtcaggtcactcatggggctaggcacaggacacagcctgaagccagcccagagacatgaggaggaagacagctggactggtacaagcagggacagcaggaaggtgcccgagggactgcagcacagaggccttatatttctttaaagagacaacgacagatattccctccagggctgggtgaggacagagggacaggggcacacagaattcttggcccaaggctagtcagataacaggccattgtcacagaaaaccttgggtaagaatcccagagggttcacctggtccaagtagcccaggagaatgggcagcctgccctctcaggtccacgggggatccgcccatgtctagcttcccgaagagtggaagccaaaagcattccagcactagagtggcccagataggcgagcaaagccacaggactctggtgggtaggctatgcaccctggaggcttttgcccgacaagctctctctgcacacacacactccccgagaggtactcacttgaatcctcgaagtatccattctgcgacatggtgggagagttttctgcaagggaagcagaaaggtcaccagccccatggaccaagccctggacctcctgtgtgcacctgtctccccgccccccgacctggctcattccttcgctcttccgagggatgcaacccacgccaccctagggagaaagggaagcaggggacagtgctcgggagggggccccatagcaggggaagccagccttaatctcagaaattcaattgcttagcccatctgctaggggctgcccaggcgggccagaggcgaggaggagagacgttccagggatgtcttcccaccgagttagtaccagtaccatgttcgctaatccaggttttcctgagaaaaccctgccccgctgcagcgagaggaagggaccgggcccgagcgggcctctccccctctctcctcggatgccaaggcgggggatctctctgcacatccctcttctcactctcagaccggtcctgggggccataaacgcccattgcaggcgcagttcccccgacccccgtcacgcgccccgggtcacacgggggccgacaggcaacggtctccagtcctgggaccgcgtcccggccgcctggaagccagagccgttggtccaaaagggagaacaattgggggtgggaggagtatctgagggacacatgggtcgggggaggctgcgccctccctgggccggtccccggatggtcccggctgtttgtgcctcgctgtcggaggaaggaagcgacaggaggggccgcgtgcacgagaggaaagcgcctccagactcggagaccccgggggtcggggcgcaggatgtgaatgcaggcgcggggcgggagccggggctgcatcctgaagtggggggcgggggcgctggggcgcgtcccaggccgtgggcgacgagggtctgggagggttgggccggtgcacactccgcttccgtcccggcggcccacgtgcaggtaaagggtcgtacaaacctgggtcctggcggggacccagggctggccctcccgtgtcagagcaagggagaaaccgctgcggccgcgcagggcacggtcaggggtcccgggactcccaaaactccaggggttccggggctcccaccgcggcgccggacgggaagatgcccgggcggaaggtaaaatgagaccttccgaggcggcggcccgccaggctcccaaaagctcggcgctcggggcgctgggagccccacagctccgccctgcccactttcgagctccccgccctcgacccgctgcatcagctgttcaaacctggtaagaaattcaagacggcgacagcagagccctaatgaaaccaagcgcgcggtggccgcgaagccgcgcccgggcctcccgcacccgcgccctcctccccgcggctgggaatcccgcagccctctcgcccaccggccccggcccgcgcaggcagacggcatccgcgttctccccggggtccccgacgggagacggtggcggagacccgggcggccttcccgccgcgcccccgggttcaggcacccaccgcacggctgcagatggaacacgcgcctggtggccgcggccatggcacactcgcgcactcacggccgggctcctcacgcggcgctccggcgcttctggaccccaaactcggcgactcgggcgggccggcggcgggagccggcgacacacccccacgccgcgcctgggtcctaatgccgctcagacgccgcgcccgggcgcggtaggcagagctgccgagggctgggacccggccgcccgccccgcgccctcacccgcgggaggctgctccagccgggctgggctgctccccgccgcccgcagctgctgggccaaaccgagtagacccggctccttcgagcctgtgcgcgccggacccagcagacccagcgtcgcgagtttaggggctggacggggccggggagcttctgggaaaacgttcgactgcgccacgagcccaccgagctgtgcgactgaggcagaccccgggagggcttcccccgcgtccgctttaagtacgcggccggcccctgtctcctcctttcgaccggggacctccgcagggccacgcccgctggctgccccgcctcctgcatttatcccggtagctccggccgcaagtccttctcctcctcctccaggaagcgcgccccgactgactagacggacctccgtgcattccccgggctacgccctcgcccgctgagacggcgctctccgagctcggctgctttgggttttcgctgcgagcctcgccaacttatctgccagcctcttcacgtcctcggccttctatgaggtcaaggtcatggttcgccccctttttccttccccaaatggcccttgcgccctgtcccctttcctggaccggctgcgacccgcccggggacgcgccttttcggggcgcttagtctcctgcgagtagggcgtgtgcgcgtgtgggtgcgcgtgctgcgatgcgatccggcaaatgcagctgacgaacccctggcctgatccacggtggctcccagtagaaggctctacagcccttggaaacggaacacgcagctccgtaaagcgctaaccaacctcccgacccctccggccgccatcgctttccggctcagccgcgctgggacggagtcctcggccactgtgccctaaccatggtagaggaacggggacaggccggggcaagcccacctctgcgaaggaagggcttctggcgcgttggggaagcctcatgcatagattgggtgagtaaggctggcccagttctcctcccggcaagataagaacgcattaggagggaagcgctggagtgctcctcttggcgacggatggcctggggctctgcgacagactgagtaccccaccctcccccagcgcgactccaggaggccttgtggaagatcccaacaccatgacctgcaactgacttggggctggccacatagtattttagcaggggtgactctggagagacaccaggtcatcctgcgcaccccttgggacctttcctagacgccctccagctagagctccagtccaggcactgactcccgggtggcgggtggaggctgaggaagagctgaaggacacaggcggatgtcgcccccggagcatggctgcataggtggcatgcaggctggatccctgaaaagccaccttgccacccccagtctcccccatctgggaatgcc

SEQ ID NO: 9183 - DNA, 6000 bp, Homo sapiens
atccacctgcctcggcctcccaaagtgctgggattacaggcgtgagccaccgtgcccggcagcctatttttatttttaatgtttttttagggatggggtcttgctgtgttgcccaggctggagtacagtggctattcacaggcaccatcccactactgatcagcacgggagttttgacctgctctgtttccaaccttggccagtttaccccttcttaggcaatctggtggttccctgctcccgggaggtcatcatattgatgctgaacttagcgcagacgcccaggcaacatagtgcactgcagcccagaactcctggcctcaagcgatcctcctgcctcagcctcctgagtagctgggactacaggcacgcgccaccacacctggccagtttactagtttctaacaaagctaaacattgtcttaacgtataatctaacagtcacactcttaggtatttactcaaacaagttgaaaacttatgcccaaacaaaaacctgcacacagatgtttatcatggttttcttcataattgtcaacagctggatcaagatagctctcagtaggtctattagttccctaagcctgccataacaaagggccacaaactgggtggcttaaaaccacaaaaacatattctctcaccattctggaggctagaagtctaaaatcagtgtgacagcagagtcttgctccctttgagactctgggtagaatccttccatgcctcttcctggcttctggtgctgcccagcaatccttagtgttccctggctcacagctcatcactccagtctcggcctccattgtcatgtgttgtttcccatgtgtgtcctgtcttcagatggcattttcctccttctttagggcaccagccacgttggattaggacccactcgaatgacctcattttaattgattatactgcaaaagcccttttccaaataaggtcacatacacagattccaagggtgaaagcttcagcatatctttctggaggatacaagtcaatccttaagaataggttaatgggccaggtgtggtggctcacacccgtaatcccagcactttgggaggccgagacaggcagatcacctaaggtcaggagtttgagaccagcctggccaacatggcaaaaccctgtctctattaaaaataaaaaattagctaggcatggtggcacacaccaataatctcagctacttgagaggctgaggcaagactcacttgaacctgggaggcggaggttgcagtgagctgagatcatgccactgcactccagcctgagcaacagagtgagactctctctggaaaaaaaaaaagaataagttcatgcataaacacaatatggtagattcatacaaggggattttttaagcaatcaaaagaaataagttatcaaatcataaaaagacatgaaggaaacttaaatcacattacttaataaaacaatccagtcagaaaaggcgacatatgtgctgggtacaatggctcacactttattacccagcactttaggaggccaaggcaagaggattgcttgagcctgggtgttcaagaccagcctgggcaacatggcaaaaccccatctctataaaaaatacaaaaattagctgggtgtggtggcacacgcctgtagtcccagctactagggaggctgaggtgggagaatcacttgaacccaggaggtcgaggctgcagtgagctgtgattgcactactgcactccagcctgggtgacagagtgacaccctgtcaaaaaaaaaaaaaaagaaggaaggaaagaaagaaagaaagaaagaaagaaagcgagcaacatattgtatgatgtaactatatgacattctagaaaaggtaaaactatagtgtaaaaggtctgcggttgccaaaggttggggtgaggggagggagtgagggatgaagagttgaagcaaagatttttaggacagtaaaacttttatttatatacatgacattatgcatgtgtcaaaacctatagaactatgtacaacataaagaatgaaccccaatgtaaactacggactttagttaataatgatgtattaatactggctcatcaattgcaacaaatgtaccactctaatacaagatgttaataataggggaaattgtgtggaggagggagagggaatgtgggaactctgtaatatctggtcaatttttctgtaaacctaaaactgttctaaaaaattaagtctattggccaggcacagtggctcacacctgtaatcccagcactttgggaggccatggcaggagaatcacttgaggccaggagtttgagcccagcctgggcaacataatgagactctgtctctacaaaaacatttttaaaaattaagtctataatttgaaaaaagattcactgcagtatataaggctctagtatcacttctttaaggaaatctttcctgctctcccatcatattcccaagatgggttaggtgctcttctcccaagctcccataataccctgcacatatatttatttctatggttgcacctaccacattgtattttaacatttatctgtatcgctgtcagttcatagctgtggtttgctgacgcttggcctagaatgcagagatggtgaaataagctaatccattgaaccctttaacaggcacctaggaatgcctgacaaagggcacttctgttccctcaatgcactgttgatgtcatttgtggtataatcattattagccctctggtccattaggctattttctggatgacggcataaggcacagtcttgtgacattaaaagttacttagcctgagtagtctctagattactggtctagggtctgccaaagacgatcctcatggggaagtttttgcactaacctctccaggattcaaatccaatggttttgacccaaaaccatgctgtttacgttacacaacacgttctcaatcttgttcaacttaaaaggtggcacagtacaggggtcactggcacacatgcctacatgacagataacataagtgacaaaagcagactcaggtcgagaagggtccctggcatttgggaaagtccatgcccagtctagaacaggcagccactccttggcttcagccaattgttgccacacagaaatgtggacacagtgttaccagacaaggcagagaggcagatttctgttcacacagaaacttttcagtttaaaaaagtgttggcaactaagtcaaactgcttagaaatactggagatggcatattgggagggtaaggaatcatccaattgaattggggtatttacgatgggggagaaatagcagctaaaggataagggcagcttttggagaaccctgattgtcacactcaaggaacttatatattgtcatctaggtctgagtgcacactaaataatttaagcaagaacaggacacgattagaatggtatttttaaaagatcacttggcagttgacgggcgaggctgagaccaaatggtgaattagaagtctgtcatttagctaagtaagggtaaaggcaagacggcaaaggcctatttacttggctttttctcctacccgactgcaaactccaagacagcagggccccacctgccttgttcattgctgtgtctccagcactaagcaaaaagcctgttcaacatttgttgaaagaataaatgaacaggagagagggaaggcgagaggcattttgaaggactgagtttaaaaatcaactaccttgaagccggtcgaggtggttcatgtctgtaatcccagcactttgggaggctgaggcgggtggatcacctgaggtcaggagtttgagaccagcccggccaatatggcgaagccccgtgtctactaaaaatacaaaaactagccgagagtggtggcatgcacctgttatcccagctactcaggaggctgaggcaggagaattgcttgaacctgggaggcagagattgcagtgagccaagattgtgacactgcctgggcgacagaaagagactctgtctcaaaaacagaaaacaaaacaaaacaaaacaaaacaaaatcaactaccttcagaggagtagaatgttggtaattgtgagagcagtcatggaggggaggggagccatggaggcctgtttccttccctgaacttcctcaacgagggggcatcttaaagaagaaatcatgtacacagatttttgtgggttttttttggagacagggtctcactctgtctcccaggttggagtgcagtggcatgaccatagctcactgcagcctacaactcccggcctcaagcaatcctctcacctcagcttcccaaagtgctgagattacaggcgcgaaccactgcgctcgaccctacacaggttttttaaaaagacgtttgtgcattggattcctggcacttcacgtggcctcttcagtctaccaaagaaggaaaaggtaagtaccctgaaggattgaaaggattaaatgaacattgagggatgagcaatttctgttcttccctggctccagcattaccaaagcacacagtaagaggactgacatcggcctccgacccagtgaggattactttcggggtggagggggaactgctaaacctcgaatctccgggactggccctggcgcgtttccagtcccagcagaaagggcaatccccatccagaccacactcctagtcctccttattcccacacagcccgtatcttgaccacccccagctccgccctctctcctcccacctccttttcccgctcccccgccccatttccttcttctccgcccacctcctcctgggtccctcccccggccatccgccctgccccggcccctgcaaccctgcctttcgctcttcttcctcctcccttccgtctgcgcccctcccgtggggccgtggcaaccccgtgcctcgcttgcccaatgagaacacggtttggggcggggcgcggccaggaccggagcggaagtggcgatcggagcggaagtggagctaccgccaccgccgccgccgattccggagccggggtagtcgccgccgccgccgccgctgcagccactgcaggcaccgctgccgccgcctgagtagtgggcttaggaaggaagaggtcatctcgctcggagcttcgctcggaagggtctttgttccctgcagccctcccacggtgagtgcggcgcggggtccgaccggggcccccgggggcccaaactcgaagcccctctctggctgctgcgacgacggcggcccagtgggtgggccccgtggggtagcggcgcgctgcctctttcgctccgcgcggccgccggcggcgaggccagacctcgcagcggcccctccctgtttccggggccgggccctttacctcttggagaggctcgggccgcctgaggtcctgccggccgggcggggtgcaactccgtactgtgccgtaagggacagcggagccggggatcccggaccctccctcactatctgcttcgggccccacgcgacccctccctgcgtcttggtcggcaagaacgtccccttcagccctgtcacctctgctccgtgctttctggtttccagaaattaaaatttaatcaaacgcggatgagttttctagccccagtccccgtgtttggctcctcctggatgagtaaggggtttaaccttgggagacagcagtgggggaaccccctcccattttgcagtaaaaccatttcatcatccttcactggttatggagcctggcaggacccaagattccctaggaagggaattgggtttgaatcaagaaaatctgtttgttggagccggttactgagtcaggccggatccccaggaaaaaatatcagggggtgagaatcggagtattttctcacagtatttaccgtcatttaatgccagattcttttgtgtctttaccccaaattcccccatattgtgtgttagcacgtttttcggtctgaaatttgcccggtggcttcctggtcggggggtggggagcggagggaagaagaggtgggaaggtgagtgcatcttt

SEQ ID NO: 9184 - DNA, 6000 bp, Homo sapiens
cggcgggagccagttcccacgcctcccagcgccaggggatcccggctggtacgaacacacaaacccgacaccgggccgcgcaagcctttgtctcttctttatttgcggatataattatgtaccgcactctaaattagagatagatttttttctgatatacatttcatcttattcaccacgagcacaccacacgcacagtagaacagttccacacctgataaattgcacaagatgagagtttagattcctgaaaaccggcaggcaagctggccccgccgcggcttctcgccttccggcttcgttgaaggaaattgcccacccaaaatggatttcccagtcagcctttcccgctgcagggttgaaacgtctccggaatgggaagcgctcttgctggaaatggctggacgctgtagattccgagctctggatggatgtgaaatattcccccaaggtcaagttgccacgcctgcgagctgcgccccctctccctcccttcccaaccccctcgatgactggaaccaaagtgtcggggccccacttggaaggacagagaaccctgcccgcaaatgcaccccgcctccccccaaaaccagggtgttgtggaaaagaaaggacaacagaaacgcagacgcgatggatcgtgaatccctgtcccctcccatcccccccatccccgaataatcagaaactaggaaccagagatgtttaaagcttggcctcccaagcgcggcggcagggcgcactgggctggtgggggcggggtgaggggagaagggagagagcgcagaagcgcggcgggggctcgcccttgcgccctagtcctccgcgttggttcggtaggcttcgatgaggccctcgagggagtgcacgaagccggacacgctgcagatgccgccgatgacgaagatggcgacgtcgaagaagacttggtgccacagcagcttgcgccagagcaggcgcaggtgaaagaggctgggcagcaagaaacagaggccggcgcccgtgaggctgccggtgaggcccatgagcagcgcgaagtgcggcacataaatggccatgagcagcgtgaagacgacgagcgcgcagcgcagcgtcagcccccaggacttcaggcgcccgtcgccgctgtagcaggccgggaaaaaggcgcggctgccttcctggaagagcgacttctccagcacctcgacagcggcaaagaatggcagaggataggacaacagcgccttggccaccagaaagatgttgaccacggcgcggatggagccgggcaggttatccgtgatgacctccttggtctcgtcggcccaggtgaggtaggcgacgagcgcgaagaggcccttgagcacgcaggctgcgatgtgcgtccagttcatcatgcagtggaactcgctgggctgctgcatattgccctccagcgaaggcaggaagatctgagacgtgtagctgaacacgatgatgccaatggagatggggaacttcttgacgtcgatgtagaacttgaccttctcccaggcccagtcgcgcgcccgcgatagacagtaggctatgaccaggatattgatgacgaagtgggccagagtgcacagcagactgaacttggacacggccttgaggttcttaaggaaggcgcaaggcagcagcacggccgtggcgataatggaccaggacttctgcgacacgggcagccccgggaagctgttgtacatgaggttgccactcaccaccacgtacaggatgcacgtcatcaccagctcgatgatctgcgctacgttcaccactcggccgcccagcgttgggaagcgcggggcgcagcaggcgttggctatggccacgtacgagtcccgcacgcgcaccacctcgccgtcttcattctcctcgtacaggcacgcgatgaggatcttgccggtgtagcagcacacaacggcggcgaagatgatgagaaacaaccccaggtagccgccgtgcaggatggcgtagggtaggcccagcacgaacatgccctgtggggcggagaggcaaccagacgcggacgctcagcgaacttggcaacggatgaggggcccggggggcgtggcttaacgctgtggcccgaagggggcgctaaggacactgagaattgggtctgagccgccggggaggagaggttaagagcaggctgcggggtggatgtaggggaactaatagtgagcccgggtgtcgagccagagatggagagggagggatgtatggacggatctgagaaggaaaggtgcgctaatggctggtgatagcgagagggctagggtgggagagggctgagaatagggagaagccacaggagggaagggagatacttcgggatggtttctggggacaggaacagaatgaggagttgggggaggagatgagaagggacagaagggagcgtagtcggaaaggggctctaagaaaggtagtgagctgggcctgggccagtggaaagagtgggcacgggatttgtggtggggctggaatggggcacgggagctaaagaggaaaactcgggcgtctcaggctcagaccagaggaggaaacgttaaaggctgcagttgtgaggcgaaaaggaaatagggtagagagggagaggggctgaaggtggggcaaagcccctgggaggcaagaacagagacaatgtgaagacgcttggggagcagcgcgcggggaggaggaagcagggctggaaattgagagtcttaggacaaggctggagttagagtgaggcgagggcgagacctaaggaaggggactaagtggaggctggggaggcaagcaggaggaggagcttggcgggaaggcgccagggaggccagaaagccgaaccgagcaagagtctagaaccagaagcttcagggtcaggcggacagggctgtagggtttagaatccacacggggactaagagctaacgaaatccagggtcccggaggcctacgagcctccagcctcctgccctggcctcccttggggcctatcaaacggagccttgaaagacgccccgggaagtcgcggggcacagcgaaggcgggagcagccccgggtccgtgatccagcaaggccgtctcgccgggccccggagcggaaagcgccttgggtcgggccatctggtgttcggggcccggtggagtcctgcttaccccgatacatggaacaacccctgggaggcctctgctcccagaaaacctgccttccgtggccccagtgatagtgcgctccagggacgccgcggggccaagctgtaagggaccggggttgcctagagctgaagtctccttcggcccagaaagctgcggcctgccagcccctgctagctcggaggtcgttgccaagactccaaacctgctccctatgtaggagtcctgcgccgcctggtggggagtggggggttaggaataaggggagagggcctagagagcaggggccattcttagcctctggagagggcttcgccagggtcacacggggaggagctggccgcctctttgcggtgcagccgggatttcgggcgagaggggcgagtctgtgcacaggtaatgctggattattgcggactaaatgtgtttgtgtgggagcatgtgtgtgctttcgtgtgtgtatacctgtatgtctccaacagggccgcacccaagggagcaggctggttcctgtctgcatgcatctgtgcatgtgtgtgtgcatatgttcaaacgaatattcgtgtgtttggtatgtgcaggtatatgcttttgtttgtggagctgtaggggtgtacgcaggtgcatttggggatagtactgtggtctatatatagatacatgtcgtgtgcgcctgtgcctgcgcctttgttcgtgggaaggggggctgtgggcatgtggtgtgcctgcctatatacgtgtgcgtgtctatgcgtgtgtgcggggggaggagactccgacctcagcgatttccccttcttctttcctcccaaaaatgcagctgtgaatccgttccagagtccaagaccaaaccgtgccctccaatcctgattttctttctttctcatcgcttcctgctccctccccccatttccttcacttttgcagtgtctccggacaggtgtctcagaccgaacttcagcctagcggtcttgcagctggtgccgttgggagggagcgtgggttagggcggaaaacaccgcctgggggcgtaggtccccgcgcagggctgggagggatggagaaagggagattcctgggtacaggagggggtctccaggccgagatcaccgggcgactgtcgggggcagagcccggcacgctgagctgggaggggggaggacaggcagaactgggaatcccgcgcttacctggatggcgttggtcacgttccagcctgcctcccacgccgtgattttgggcttgtcgtggcccccgaattcgccaccacctcccacctggtccttggagccggagggcggcagaggagctccgctgcctcgctgataatggatgtctccctcgacgggcgcttcagcgccctcgtccccgcagggctctccctcggctttcaggatgtccatctgcaggccctggcggtgctcaaagtcgaggtcgtcgcaatgcgcgaagcccaccgcctcctcatccgtggccgcctgaaaacccatcctggcgaacatgccgctcatcttggcctgggacttgttggacacggacgtggccacgttggacagcttgctgcggagcaaggtggccatggcggcggtggggacagcggaaaggacagaaggacccgaggatgcggggaacgcgatgcaagaaggcgagggctggggggcgcaaagtcgctatctccgcttgctctccgcgcggcgccccggggctctctggctcatgaccctcgcagctggcgttcgaggctctctcagggctggaccgggcaagctggcagcaggtctggcggagcggcggcggcggcggtggtggctagtgcactgcggagctgccgcggggcgcgagctgggctgcggagggcggcggcggcggcggcggcggcagcggcgtcagagcagctacgcgaagctggcgcggcgcccccacccgtgcgcagcccaatgcgctcccgcccctcggaatcaggcggtgcgggggtgggggattggagagaggaaatacccggaggcaggggacgtgaggaaggggctaggagaagagaaagggggcgccgagggattcagacgtgagctgggggcagaagaagggcgcccttgggaaggaggcgggagggagcgcgtgaaagagggagcgccgagggcaggggaggtgggggggcgaagtgctgcatttctaggggaggtgctaagctcgcatcctggcccttcccacctcgccgccgcagggtgggagggggccggcgtgggctgatgctcgcagtctcccacccccggaccaccccctccagggtccgggagctgtgcagccccagatcctctggctaaggactggtctgggcgccccgaaagcccgcaggactgagttgtcagtctctcgcggagcgggtcgtctataagtcagtttccctggcacccatccttcgcgcgtaaacccggccgcgagtcccccttgaaggtagaagtggctggcatggatcgctcccaaggaagctcagcctcaggctcagtcacccgggttctctccgcccgtccagggacgccgcgagggaagcgattgtgcggatcgctcgccaccagccgctctccaaatgcgtgcagaatggaggcgaaaggttggcttttctctttcttttcgtttgggggtctggaagaaggcaggactctatgaggacacctctcgtcagcctcctagcgggtctgcgaatgcccacgccgagaggggcgcagacggggccaggcgcggaggaaagaagggctcgcggcgctgcaaggcggaggaagcagaggctcgcggtgcgctggggccctgctccgacggccgcctccaggctgtgaaagcttgggctgtttgtgt

SEQ ID NO: 9185 - DNA, 6000 bp, Homo sapiens
tgcagctgggccactcaccccagccccttccgacccaccccacccacctccttccacatccccacaggaccacgtccccaccgaccacatctccatggaccacatccccacagaaccacgtccccacaggaccacaacccacaggaccacatctccacggaccacgtccccacagaaccacatccccacaggaccacattcccacaggaccacgtctccacggaccgtgtccccacaggaccacgtctccacaggaccacattcccacaggaccacaacccacaggaccacatctccactgaccatgtccccacaggaccacgtcccacagaccacgtccccacagaccatgtctccgtgcagggccatatctccccacaggacctcatcccctcaggacctcatcccgtgtgtctgaggaagctccagggtcctcagaaccagcttcacgtggccaggcctggccctcctgcccagtgtcgtgccctacccccttgcagccgtcattctcagtcgcccttgaagctggagggcaggtcaacactgcacatttcaccaccactcagcactggcctgggctggttggaaaagcactgggtcttccagaccctcctctgcagccagtcctggggcctgagctcacacgtgcagctcacaagccctcccctccaggacagaccctggtgatggcacctataacaagtatccgagcccgcaaagggggcacaggtgaatccccagcccctggtgggacgggcagagtgggccagacacaaggcagccccttccacatacacgtggtcctcagccttaggccagcacccaggagcatcaggcagccccttccgtgcacacgtggccctcggccttgggcacccaggagcgtcagcacccacgtgtgcatgttcgtgtaagtccttagtcggctgcagggtggagagaggggtgggcagctctgggagtcttggttctgggtgtgctccaggcctcaatgtctcctgggcaaactggggactctgtggtggcgtagggagccatggattgagccctgagaagctcaggtaggcagccaggtggggggtggcagacccagagccttgggcagctgccagcggccgcctctgccagctatcactttgcagccgtgtttgcaaacctcagcaggcttgccaagcctgtgcaacccgcattgtcttctggctgggcctccgccagggacactccacaggagccactcaagggcagctccaggacactgaggctggaggtctgggtggccaaccctggacggggctggctgactggagtctccatgcgctgccctgcatgggcaactgccaccactgagcagcctgtccgcgggaatgtggctgcagctccccacacctcccaaaagcccctggggtgtggcccactcagcctgggatagtgaagcagctctcaccccgtttcacaggccccaggcccagggttacccaacacgcacggcaccagcctcccaaagagaggaaattctcccgcaacccggtggctcctccctcagcggcagacccaggcttggcatcctggcaaggtgtgggctgggcctctacagcatacaaatgcctccccatgtgggggtgccctccctggaccagcgagctgggatttggcagcagggctggagctggcggacttcagtgtggaagacgagcccctgcagctcagctggccattggctgcccactcgcaagtgggccagctcccagagaccatggcctgcccaacctgccctcctccatggtggcagcccccaggctatgcacccccacccagccaggtaccctgagggatggtctcaccccatttggagtggctgagcctggctgggaaacgtggaaatgtctctgctgccccttacccggcccctccagggccgccgagacccccagacagtctggctcaggcctgggtaggtaaccaagcatctcaaccgagcacaaggccgagcctcccgcagctcagttctctcagcctcgaagcctcctggttcctatcctgccttggggctccatgtgcactggcccacgctgcaggggcctggctggaccagtaggcttcctcccagcagccttcttgggccccccaccagaaagaacatatcttcagacaaacagacttcgcccaagactcccccaaaccccacattccagatctgtgggtgaggggcctctggggccagctaaggttggggtgctgccgggacaccacagtgcctgctcctgccccggcccctgccccggccggttgtccctgttgctccgaggtcacagcgtgccccgccacccccaagcaaggcctttgctgttctttgcttccgaaggtgcctgggctctgtactgagaacctggccacttggagtgttcccacgtcaagggggaggaaagggcagggcctggctgggacgctctgaatcaacccttggctggggctcaggcggggcagagctggtggctgtcgttctgacgtaccagcccgggccggacactcacagccacggggagtgttgatggctgtgtcccctctgcccacccagacccctgtgctccttgcagggcgacctcagtcacagtgcacgatggccacgccctcacctaccacgtcaatgagctgagcgatggacaggccgaagcggacgaggaccacgtccgagatgttggccacgggtcgggaccacttgttgtaaccggagaagagtttcttcaggagccgctcctcggcgtgggcccgggtctccacatggctgctggctgcggggagaggcaggccagtggctcaggtgcaggcgggacaggagccgggagctgtccaggagctctccaggctgccccagccccctgcccagcacgtccacttcctttcagctcctcacatgagcccttcccaccccaggacctgtgtgtgtgccgggcgtgcgctctgtgtgtgtgtgtgtgccgggcgtgtgctgtgtgtgtgtgtgtgtgtgtgtgtgtgtgtgccgggcgtggcgtgcgctgacctctcttggcctccggctctctcccacccctgggtgtaattgtgatttcctcggggaagcttcccaggcccctcagcccacggaggccttcccagcaccttgaccgcaccacaaaaccaggcggcggatgggccgaggactgctttgggtctcctgtcacactgacttccagggaagggctgtgtctctagcagctggcgagtcagaggacactcgggggtaacagcagcaaaggagggagtacagggcagcggggccagcccaggcaggaagagggaggaaggggaaggaggatcgggcccccacaagcgcccgcttcctacggaacctcccctggttcatcaatcccctgatgcccgaggagtgtttcagatgcagaccccaacgaggtgccagccccctccgcaccccagcctgcccgtgctgttgggcagacccagaacgcccctgatgagtcgctctggaggagcacagccctaggtccatctgtgctccaggtccggggccccaggatctgaggcattccccgcctgtcctgggcgctgccataaggggcgggtctgggcggagggggagacctccacctccctggtgggtcccgctggcctgagagcgcagacaggactcggggagggggaggggtcagttctacacccctgggagccttgactcccagcccagagtccccacccgcgaccttgtccttcctgcagaaaaggtgggtggcggccgccaagggcagaggccacccctctgatcccctaaaccggaggaagcaggcatgggggtcttcagggaaatttagctggatggatgggggaagggcgaaggtggccccacctctgctcaagttcgagcttttggggccagccctgaaatagcagcggaaccccccacaccccgcggaaagcccctttcccagccctccgcattcgccggcggtcaactccctcctcgcctggctcagcccgggtgcgagcgcagcctgtgcggctggggatggggagcctcgcggtcgcccagtcgcgcgcacccgcggcttgggaccgcagtcaggagcctgcctccctctggctctgggggtcccaggccatccgaacgcgggcgaaagggggcccatcccgcgccccgtaacttaccgcgcaggaggccggtccccagaagcagcagcagcggcggcagcagccgcggcgctccggggccccctagctccatggcgcacgcacctcgcgggctctagatgcgggcggctcccggctccccgccgcttcgaggcccgtgcgcgcccaacttcatgcctcccgcgcctcgcgggccgcttcggccgccgggcccggttcgtcttctcctgtggggcgcggtgcggcggcggcgcggcagggagcgccgggctgtgggctccgtggcgcggccccgcccggccctgcccgcctcagccggctgggagggggagcaggggaggggggaggagggggagcaggggagggggagggaacggagagtgaaaagggaggagggagcaagggccagggagaatgagcagggatggaccgcgcgcccagggggacggggaggctgcgctgggccccgggcgggggtaaagtttccttgttctcctggggttcgagacgtgcctgagccggggacggggaccccggggtcactgagtgcgactggggggtcccggagtcagtctgacctccctccccacatctccagcctgggcgcccgctccctgcctgcaggggtggggggcacatctaggggatccggcgcaaggaggggcacccctagcacatctgggttactccatcgcgccagccggtgtctgcagcctgaaaatcgcgtctctggtcttgttccccagcgagccgttcaggactctctgtccgcctgcagcccccgccttccctggtacctccgcagagacccaagaggcgtccagaggggagcccaggcgcacggtccccagggaggggccccgccctcaggtgggtgccgaggtggccgcccacagagcagcaggtgcgttggaggaggggcgccttgtgcggctgaatctcgtgtgcaggaggagagggcgaggctctgcagaaacatcagacccggccatccctgtagccgcgcccctggcccagcctcaggctctgcagctgggacacagcccccgaaaacggagatttccgtcgtcggtaatggaaggcagagcagaaggggctggagaggtccggtgaccctccgcattcacgcccctccctccaaggctgcaaggctgctggtcgggcgagggggctccgtcaggagttccctgcagcaaccccctctccagcacaggcctctggagccctacagctcctgcccctcccatcgctctcccatctcccctgtccctaccccctaccttccttctcctcctccccccagcttccctgagcagccactgctcctgcccacccctctcccccctccctgcccacctctggttccaggttgagctcatggctcctcatacacctgctttgggacgggcaggagctcttcctcactggccagagctgtctgtccgctctgtgggcagtgcctacaattagagctttcagaacacacagccgctgcacagtggctggtccaacgacgacactgccctcctgaattgcctggtccagcgacaacacctgccctgcttctgtggccttcccacatgctggtccaagcaagctggatgcagggaccccctgcacttccacggcccccttgaggtggcctcttcaattgtccctacgttaccaaagagataacacaggtgcggagaggccgagcgacttgccgaagctcacagtcagtactgggattccaacccaggccatctggctttagggtctgcaccccggcctcctgctggcctcagatgtagttttgggctgacgtgccctcactgggacagcctcctgggagatccc

SEQ ID NO: 9186 - DNA, 6000 bp, Homo sapiens
gccaggggtctgctggggtccaggtcccaccctgggcttccgacagtgattctgtgcctgatttcccatctgtaaagcagggatcgtggcagcacccagatccctggctactgaggggatgaattcgtgaaggcgttcagtgcctggggccccccaatatatgcagctgctccttcaagcagcctcggaaaagcccctccgtccgaaccagaattctagatgtccaggcagcaaagaggtctgaacccaggggtctgggttggcatttgtggggtgttcagtggtgtccaggaaaatatgccaggatggtgccatgggagccgccatcctggtcacctcaacccacctgcccataaagagggccgggcccaggactcaccaccatgacatagcgcagccggtactggatggtgccgaagagtcccaggatgacgatgatgatgtggacaaagttggccaggatgggcgcccactggtagcccaggaagtcaaacacctgcctctccagggcggcgacctaggagcagggcgggcgccatgaagggtggacccgagggaggccccaggcccgccagccaggtactgggccaaggtgacaggatctcagcagggacttcctccccacacccgcccaccacacctttgtttgacgaaggacaccagggctgtaactcctgctctgtgaccaccaccgagcaggcactgagcatctactgtgtgcttggctcttccaagaagaatccccaaatgagcctgacaggcccccttgtgtccccgtgtgtcaccgtctgtccccggtgagcgttcctcccttgagtaggccccatcccctctgtccccagtttcctcatctggagaatgggaacaccaggggctgctctaaatcacgaactgtggggccaggtgacagacacacagcccagaaaacgccactcgggggggtcggatggccgggagggacggacgcgggttcacaagagtactggacgccgaggccccagcctgctgcctgcatctcggccttggggacagggctggtgaggctgctctctggcaggcaggcagcctcccctccacttcaggatattacaggactctgttgaactgccctctacacagggccgagagagaaccaatgagggggggagggaaaggtgcctgaggaatataaagttggtattttatatttaggagaccaagaaaacctgagcaaagccatgaccaggacgctaactgcagggactggcgcactcggcaccacccgtcaccagctccttcccacgtgctggtgaagcacaacccagagaagagaagatgctgtggaacccaccccatcccccaccccagccgccctatcccccaccccagccactccatcccccatcccccatcccagccaaaagacacctgggcccgggggaccactaccaccaagacgcagagaccagtagtggccctgaatgccaggctgtgctgatatttattggatacaagacaaaagggcagggtaaggagtgtgagtcatctccaatgacaggtaaggtcacgtgggtcacatgtccactggccagggggcccttgcctgcctggcagccgaggcagagagagaggagagagagagagagagacagcttacgccattatttctgcttatcagagactttcagtactttcactaatttgctgctgttatctagaaggcagagccaggtgcacaggatggaacatgaaggcggactaggagcgtgaccactgaagcacagcatcacagggagacggttaggcctccggataactgcgggcgggcctgactgatgtcaggtcctccacaagaggtggaggagtagagtcttctctaaactcccccggggaaagggagactccctttcccagtccgctaagtagcaggtgtttttccgtgacactgaggctaccgctagaccacggtccgcttggcaacgggcgtcttcccagacgctggtgtcaccgctagaccaaggagccctctggtggccctgtctgggcgtgacagaaggctcacacttgtcttctggtcacttctcactatgtcccctcagctcctatctctgtatggcctggtttttcctagattatgattgtagagcaaggattattataatacgggaacaaagagtaattgctacaaactaatgatgaatgatattcatatataatcatgtctatgacctatatctagtataactattgttgtattatatattttattatactggaacatctcgtgcccttggtctcttgcctgggcacctgggtggctagccgcccacgaaactcttagtctcaggcctccccatcgtgcccggaggacactaacctacgaggagggatgtctgccctgccggagccccggggggaaggtaagcgagccccccaaggggagcagttcttgccctggcccactttgcctacgccgggcacagttctgtgaggtctgggctggcggctgggacaagctgcacatctcggctaaggggtctcggcctgaggagcagcctcaggtctggctccagaatggagaccctgcagcacagaggggctgggggcgtctttttcatctcgaagccaaggctcccagaggctcagggctccatgacatgtggcgacatgcatgagcagggaggctcatgccaccatggaagcaggtgaccctggtggccctgccaggacccagccccaaaccccttcctgggcctttggctcccagggtctcctcaatgcagcagggcagagcctgggaattggacgcagcacagcccggctcagagccagcaaagttcacactgttctttggggagaaaggcgctcagaagagatgcctgggccctttgtcctgtagcttggtaacacaaaattctcacacttgtcaaaaaaaaaaaggggctatccaacaaccccgcccttcctcccgggccccctacccccatgcagtgactagagctgtggtcaaggactcttcttccccaaggcagaggaggcacagtgggctgccagattgccaacccggccaggacaaaaggcctttgacagctccctgctgcggttcagcagtgacccagaggctggccctgagaggacacggctctgcccagtccctggagagtccccaggtctgctagtgaagccctgcggccctcaagccaggatgactctttccctcttggctgcaaccaaatttccaagggcctgcatgtgcgcccatctgtctactgtccaccgcagaggtgaaacgggaacatgaccccacccgcccctctgcaccctgaggtcacatccgaccagcacagtcgtgcctcaccctgcacctgagactgaagcacccatttctcctgcccaaaccccagcaccatcaaccccagcacatcctcacaccaccttcaacagatggaaaccaatgtcactagtgtcccccaaagcagcctcacttcctgacgctcatgcatcaccagctgccactggccatgctccaaactggggtaccgtccaggctggtgcctgtccttcatgaggtcatccgacgggcactggagtcttcgagtgcccacccttgctctccccattcctgcttccagcccctccccaccagtctcctaagggactcctgccattgaggagccactcactgaaagataccaactgttccaaggcctgggatggtccttgggcccccagcctgttgcaggacctcaggttatctccgcggccccagcgagcctcccaggaaagcgccggaagctccttccttcctgcaggaaggacacgatgcctccgccgtccctaggtccgcccgcaagcctgtgcccctaagccgagcacaggacacccaagctgcacagccacggactccgagggtttcgctgctcaaaactctgaaacagccccttctggcccttctagcttcaagaggaggaggggggcgcgcggtccagctgcgctccgcagcccacaaagcatcgtttcctttttaagacgggagacccagggccaattagcatcgaagcaaagcagcttccccagcctggacaggcgaggcctttgtttagccccctcccccgagggcaccgggctccgggaaagaatccgccccccaggcgtcccagggagcttcggactccggggcagaatggaaacttggccgagggagccccgaccaatcccgacaccgaagacgcccgcgctgcgccccgggcatcggctccagccccttctcgcctccgcgtagctccacgccgggcggaatggggggcggcgggggcgggcggggccggtttgctcgcgggtgggcaggacgttctcaccccccgccccctacactcgcaaactcgcaggcacagcctccgtcatcgccccacccgaatctcagaatcggaacttggccgctcactcggcgcccggggccggctgcgggaaacgctcgcacagacagagacaggcgcgcacccgggggcgcacccggggccacacacgcctccccaggcgatggggtccaggcggccccgcccgaaggcttccgtccggccagcccatccagccgctgccccgcacctgtccccgccgctccggacccgcggccgccccccgcgcacgcacaccggggacgggacccggcgccgcgactccccacgccccgcaggcgacgccaccttcggccgtagcagcccggggtccgaggcatcccccctcggagctggcgcgggacccagcgaacgggccccggggcggagggacgcttcgggaccccacagccgccgtgggtcgggcaccgggggctccaggaggctcgcggaggggtcgccactcaccagctgaaaagcgcagaggacgacgagcgcgcagcggccggagcaggagcccatggtgcccgcctatacaggaggcccccgggtgccccgcgctcggcccccgcccccgctccgcccgctccccacgcgccgcagcctggaccccgccccctccgcatcccgttcccccctcctccccgcaacccccggcccagccccagccccgggtaacagctgcgctgcgtctcccctcccacccccgcctgcggcccctgggggcttcgcgccggccggagagggggaccgttcttaaaggggcgatggcgcggcctctcgggtagcgaggggcggcgccgcggccccaggacagacctgcagctgaggggagcccgccctggacgcggcagggatgaccggcgtccgccccctcctgcaggatgacctgcccagcacctgctcccgccgtgcgccctccggcgtgagatccccatcaaccttccccgtgtggggtctgagcgacccgcatccgcgaggcgttttctctgagagtctcagagattccttggcttggagaagtcctggacccgggtccagagctcagaggtcccctccacgggcgggcgggccgaggactcaggaggagggagtgagccgggctcgcccacctcccacagggagctcctctgctggaaggctgagacctgaaggccaggtctgctccaactgcctggaccggcctcctgcctgcgcgggaggggcctagggagcctcgggttgggacagcctgaggccttgtgcacggtggaggcaggacccagctgcccagggcaggtcctggggtctggatggggctgaaccccgtaaagcctgcgcttccggaagaagcttgcgctggaggcagggaagggtcccagccaggcccgagaggagcaggacgtggatacagtgagccagagtgtcagccggtcggaaagcccatgggggcagaacagcgggagatcagggcaggtggccgggccagggctgccacttggtctttactcagtggcagggcaggctccctgactgccacccaccgcctgaggagcctgagatgggtttcccatggcaacctgaattcctgccccactcgagattttatgaattactgaggattcttgccttcctaattttggttgtg

SEQ ID NO: 9187 - DNA, 6000 bp, Homo sapiens
gagcaggatcagccgatggcagagctgctggggacgtgcgcttgggagagggagagcgcctgggcaaagctcagaggctgggggtgcggaactcaaaaccgactgcggagagcccagcgggcgggagctggggcgcacgttggggccctgccgaggggcgggcagggcccggtgccagccccggcaccgacgggacgccctcctccctccgcagggcgggaggatgccgccgccagcgaaggagggcgggcgcaagggcccgcgggagcgaagcgggaagagcgcgccaggcacggcgcagggtgaggagcgtgccaagggggcgcccgcgacagagccccccaagccgggctgggccctgacgccgcagggactggcggccatgctccctgcgcagcgccaccgccatctgctcttcggcgacctgctggaggacgtgggcgcggcggcctccaccttcccgtgcgggtcggtggaaccggggtaccgcatgcccgacccgcgcccgtggacgcagtcgctcgagctgcccgccgagcgccagaaccggctcctcggcgtcctcaaggcagcggaggcccgcgggcgagtccgcgccctgcggctgcgctacacccgcatgcgggtgaggcgagggggtcggagggcagagggggcgcaccgggagcgttgagcggagccggccggggcggggcggggcggggctcggcgcgcgctcagctacccgggccccgcaggccgaggagatcgcgctgctcatccagcggcagaagtccgcgcgcgccgccatccggctggagctgttcctgccgccgcagctgaagcccgcgcggatcccggaccccctggaccgccaagaggtgcagacaagccccggtaggggcggggaaaggggaggggccctgcccgcctccgcacacgccggaccccagcctctctccccggcagcggaggcgcgtggagaccatcctggaggagaacgtggatggcaccatcttcccgcggtgacggcgactgagagtgtgcgacgcgccccagcctcccacataaagttataattctccgaaggctcgctggtctttttgctgccactccccaggaccccgagggaagcggggagtatggacgctgcctctcccatgcacctcacagacatcagggtacagagagtggggcctctcccaaaaaagtggggagacgcaagtgggtgggtgtgaaagtaacaggtcagggacacgcctacccctaatcccgatctgccccccactggcaacctggcgttctgtgggtctatgggaggcccccagtcttggggaggacggagaaagagcctgtttcagcagaagtcacccccagatgtaagggtagcctcaggctgcagtggtctcgagtgcgagtcatcccaccagggggccagggagagggcagtgctgtgggcagcggaagtgacctaagctggcctttgaagaagcagcagctgtgcccaagaggaccaagagactgggcaaggggaacccctgcggcccccagacaaaaatcccaccctctggccttcctttccatcctgaatagcctcctgtgacccctttaatgccccatgccacacccccacacccacccccccacacacacacaccccacacacactcacgcatgcagtacaaaaggaagccacccctgtcccattctgacaaacaggcccacgacctacaaaatccctggactctgaaaagccccgaggtttctgggcagaccttacttttctccccgacgtgagctctttgcagacgctggggcttccctaggcccccgcttccttttcctccctcccagccccctgcccagcaggctgcacagaagcgggaccgcaggaactcagacaaaccgctcctcctgctagggggctccagctgactggaaggaggggcagaggtcagaactggggtccagaagggatcctgctccatggcagccagtgtttctccccagccccggccagggggtggagccctgcgcactcgcccctcagccagcccttctccccgtgcaccgagcactttactctttctgggctgttgctgcccttggccttgacccaagcccagactgtatacagagctcagaagtcagctgacaaggaggggacagagagatggcaggaggggtttcaggaagggaagggtagagaggaaggaggccagggagaaggggcttgagcaggggcagacagacagggaagggaggcagtctgtccaggagtggcagccactcacaccctgatgtgcttgtgacatgtgatgacagccagccctggtgtcgtctggccaaactccctgcagcctggaccccaggattctgtgtcttggggattgactgagtgcctagaatgagttcatctactgggagaatcacatattatttcaccatttctctgagactccatttctttatctttaaaataagggtcttggtgcagtaccccacagcagcaagtgctccaaaggggatgggtcactctgcatcagacaggcaagagggaagaggggcagagacaggcacagcagacccagcacccagagaaggccagcaagacagtgacctcagtgactgcaccagggtcaggccggcactcgggccctttgatccccatgaaaaggcgcagggggtgctggatgtgcaaaggaggctggggaatggggcctggagggacgcctgcctgtagaaagctctatgggaaggaaggcatgtggtccaaagcccaatatattgagggctgtcagggcgcagagggtcctgggttcaaatcccagctccgccatcaactgcccagctcacctggccccacccatggacttcaggatgctgtgtgccgagaggcagaagccagggcggtggagagcaggcccaaggggccagaggagacgggggaatgactggggggttgtagagtgacccgagggggcagggagggcactgaccttcaccccctgccagctgcccacagctgcattttcccacagcagagacaacaggccggctcagcggggtcagcctggttgtgtgtggcctgggccaggtgctggcccatcttcgttgagcttccctgacctcacctgtgcccaccgctcaggagtgttatgtgggctgaataagtagcagcctgcctcttgtccctgtgggcttcctggcccctgcctttccttgcctggcctgacaacatggcagtcacagggttctgggtacagcttcgagaggcagcctgtctgtcctccagggccctctgacctctgacctcccccttcgggcccccgcccccgctcagcagcgcaataccctcccctcctcagccctcccccctctcacccaggccttccctgcctgctccccacaactcactctgcgccccccagcataagatccaggctgatctatgttgctggcttctggtcctactgcctggcccacaggggcacccagatactgatacttgtccgttgaatgaggaatacaagtagaatctccagctgcctttgcacccctcagagttctgtgaaggtgtaaggtgtgcacctgacctgtgcaactggaaggcattttatgaacagatcccgacactgggaactatccgggtggagtgcttgtgctggggaggacaggagctgcacacagccgggccaggggaggggcggggggcacagatgctctgcagacacttccagagcagggtcagggccaccctgacacagggccaaagcatgctgcgatgagaagcctaacccacgtctgtaccgagtcataaaggatgagaagagtcggccaaagggacagggcgttcgtggcaaaggggacagtgtggccttaagctttaggacatcttgggacacacgggtcagcagggactctgccaggccccacaggagacattcggcatgactccggatgcaagaacccgcacccccagttctccccagccccgcagcacaggaatctcccccttccttgggaaccccccacagcacagacaggcggctcttaacccagttttacagacgcggctcacggaggcgaggggtgggccgggctggcgtacccgccgatcggtcctttgcagcagcctcctctttcccaagctgggcaagcagcatatggggcccagctctcgtgcctccactgtcgtggaagtcccacacggatggcaaagcaggaacggccccgccgagcagagtcgggggccacggccacacccccatctactaccgtgcggctccgtccgcccgggagccagggctccactatgagcacctcgactctccgggccacccccaggcgactgtgggggccgacgcgcgggcggggcgggtggggtgcggagccggccgagcgcggggcggggcgcggcgggcggggcgggcccggcgaccgccggcgcgaggaagtcccggcccctggctttggggaagtgccgccgaggcgcctgcgcactgcgcccccgcgccccctccccgactgtcgggccggaccttggagcgcgcgggccggcggcggcgcgagtggctcgggagcgcggctggtgagtgcgcgcgcgcagcgccggggacagcggccctgcccctcccggcccgggcccggggaccgtgctgggcgggagcttcgggagccggcgcacgggactcgaaccccaagggctcccgccgccaggtccacgtggaccctgggccgcagtggaagtggagcccgccccccgcgcgtgggggagggggcgccgcagccgggttcccctttttctggagctcaaagcctggggaagtgattgctcaaaggtgggggccggaagaacccaggtttccgcgtctccctccccctctcagcccggtgaggaggggccggggcgggacaccctgtccgcccccgcccccaccccgctggatctggcagccactcagcccttcgagctgtaggggaggcgctgcgcccccggccccagccgatcgggggctcctggcgctagcctccctccagagcgccgcaggagtccctcctgccgtctgacttgagtccctgctgctgcagtgcacgccccttcggcagccagggtggggcccagacccaacctggcccctcctgcccccaccccgcctttgggtcgctggtgagtagggagctttgaggtaggggtgggggcgtcagaggctgaagaaagaggcacctggaggagaacacaggcttctccagactggaccctaacagcagagagaggagcgtggtgggtgggccaccaccaccatttcagaggtggggagagctggccttccctggaggggccaggccagggctcgcccaccagccagatgtggagggtggcagatgggaaaggccctgggtaggagctaaggactgagaatggagcccctcttcaacccccctcccaaaggttatgacatttttttctgggattgtcacattttcttattctttttttggactgggcaggctctgggacgttctttttccttctgtggagcaaagcggcagccactcccaagggatcctctatccccagagagcagacgtgccgcctatccagcctatcccatcccagacttgggggccaaagcctgggaggctggggaagggggtccccaatgccaggttgacaagcaggaggaccctagttgagactctgtatcccccaggagagacggggggagggtagcctggggacatgggttgccccagttgacctgagaagggtacaggaagccaggtccagggacaggtgaccaggtccagggcctgcaactgggaaagaaggggctggctccctgctctgcagcaaatgcagcccctagcaccccggccctgcacccctaaacacgtcccctcctccagttcagagctggggtggagatggtagcccagggggacagtctcaggggtgctagagtgtgggggaggaccctgggtggggacagagaggaggaagaactgctgcctggggaa

SEQ ID NO: 9188 - DNA, 6000 bp, Homo sapiens
ctcccagctctgccttgcctggcctttcaggagtcaatagagacctcaactccctctgtgggagccgttcagggtccagcagaaggccgtggcctccccagtccaggtgttcacaatctcataatgtgttcccttgaacttcttgtgtgttctgtgtcattctgccctgacatgttcataaccatagaacccaggacagcttctccctcccttgtgcctgcggcaaacccccagcacagaccctggcatgctgaacagcctaggccccctgcgcagaacctgccccccacccacatagacccctagcccacggtacagaccttgccccctgcattgaccctgcgcacctgcctgcacacaacctgtcccccctgcaaagatcctgcccccttgcaaagaccctggccactctgcacagatcctaccccttgcacagatcctggccactctgcacagaccctggccactctgcacagaccctggccactctgcacagaccctgccctccctgcacagatcctgccctccctgcacagatcctggccactctgcacagatcctggccactctgcacagatcctaccctccctgcacagatcctggccactctgcacagatcctaccccttgcacagatcctggccactctgcacagaccctggcctccctgcacagatcctggccactctgcacagatcctggcctccctgcacagatcctggccactctgcacagatcctggccactctgcacagatcctaccccttgcacagatcctggccacacctgcaaagatctagtgcccccaaaacctggcacagaccgtgcccccaccccacatagatgctatccccgtgcgtagatcttggtccctctgtacagatcctgccctccctggacgggtcctgtcccccgactcccttgaacagacactgactcccaatgtagatcctacccactgcacagatcctggccccactgcaaagatcctgcacgctgcacagatcctgttaccccctaaaagtcctccccgcagagactcctgcccccatgcagagatcctggcctcaatgcacagatcctggcccatgtgcagattctggccccttgcatggatcctgccccaccccagccagctccagtcctacctcctccaagaagcctaccccaggacccccagccctgggaaccttcctaacttggccattattcagtaatacggctgccaggctaggcctgtgagctctggtctcagcagatatcctctgagagtgtggtcagcagagccccgcaggaggcaggcacctggcccctcacaggcgcagtcttagagtgaaagacaggcctggtcacctggctaggggattggccaggtgtgacactgacagtgctccctggggttggcaggggcccagccctggacccagaaacgctcccacggaggagaactggtggtgcagatgaaatggcccaggtatctctagacccctaatagagtcctgccctcccccaacctgccaagggtggggtggtccctccagaagggggaaggtagaatcagggtcctatatagaacatatatgttacacaagagatagcaagaggcacatgttatatgagagagcaagacaacctcaaacacacatgttctgggcaggcgaaacaatatgcaaggatactagggatagcccaagacacgaacgatgacacgcgaatgacagcacagagcttgtgtgcgaggatactagggatagcccaagacacgaacgatgacacgcgaatgacagcacagagcttgtgtgcgaggatactagggatagcccaagacacgaacgatgacacgcgaatgacagcacagagcttgtgtgcgaggatactagggatagcccaagacacgaacgatgacacgcgaatgacagcacagagcttgtgtgcgaggatactagggatagcccaagacacgaacgatgacacgcgaatgacagcacagagcttgtgtgcgaggatactagggatagcccaagacacgaacgatgacacgcgaatgacagcacagagcttgtgtgcgaggatactagggatagcccaagacacgaacgatgacacgcgaatgacagcacagagcttgtgtgcgaggatactagggatagcccaagacacgaacgatgacacgcgaatgacagcacagagcttgtgtgcgaggatactagggatagcccaagacacgaacgatgacacgcgaatgacagcacagagcttgtgtccacagattaaagcctgacacaggctgctcttggagctcctgggtatttgggcaggcctgggttccggggtgagattcacacccactcagcaggcaaatacacacacctcactctcatccagtgactcagaatcagcaaacgccagacggcagctggaacactgtcttttgtcctccccactcccacccccagggcaggcacagtctaccctcctccttccacaggctcaccaccctgggctggccaagaacaggaatcaaggcagagggtctggcagcccctcacagagcagccatcccccagggaagccagtcaccaggccgcacatttgtgctattaaaaaagtgaaagaatttttaacaattctgagtttcatcaaaataaattactttgtccttgtgattttaactttacaaaatctatatacaatgacaaaaaaaattgagttgtagcttctcaatatcatgttaaattttgtagtcattaataaagcttactaatttgacttgaagtttcatcgtcaggccttggcagcaataaacatgcttttagatctcagcatttccgttagcccttgaaaaacacgtgaatcctggggacagaaacagatgggaggtgtcggcctgctgggtccctcacagttgctggaccccaaacacacagagaacacctcccttcttgcagaactgcaaacgtgtggagaaacagtaggggtgaggaatgtgagccaggtaggccctgggagtacctgctgcaaattatggactagggggtgtcaaggttttccagtcctataaaaagaggttacaagccccttcttgcagaacagaagaatattcccctactccctgcgtgactcccccacaaacgccaagagccagaaagtgccccacccatgtgtccccctggcctggacccagggaagctgagaggatggcccaggtccctgtctcaaaggactcacccctatgggagcacaaaggctgcccagagaaagcggctgctgggtgagcatccctaagcagtcactgctgcttctggagaccagggaccttcctcaagccaagctggtgctgcagcccaggcaggaccccaaaggcacctgcaggaggggagggaacagcaccaggaagggccttcctggggagcagcaaaagcttgagggctggaaggatgggcctagctgtgggatggggtgccggctctgggacatagggctgaatgtcaaaatttaccctcttactgagaggccagggcagtctcccaaaaacaatgggaacacccaacagcctcctgccaaaaggccagaagctcagctaagaccctgctcctcagctgggacagccctactcccaaactcacaggttccaaactcccagcaaggtgtcccagcggcaggtctgtgaatatagagagagtacagacatctcgtggaagtaatagatacgtaacagattggactttttgcactaatttttgcctaatttaaactgtggaataagcacgtgaattaggaaattctagaacacacttatgagtgcctgaagaaattataaaatgattaagtagttaattgagaattagttacaaaacaaaggaatgcacaaatagatttccaaaatctagtatctaggacccaagatcccaagacacagtgttcagcaaaacccagctctagtcctggggacaccaggacccctgagaccccaaacttgccctagaagaggtgaggggtcctgagttctgccccattatccctttctgtgaacaccagtggctggggccagagccccctggccatcagaagggaatgggccttaaccacaaaggtctcctcatagccgagggccccacccacaaaactaaccccaaagacccctcaagccaggaacctgggcccacaacccctaggatggcgcgtctgcggccgcctggaaaggacgctcacccaagctggagaagccggctctatgcctctatgccccaatgacccctatgaggggcgcgtccacgcccagactctaacccagggccctccggaggggaccctgccccccgccacgacccgccccacctggtcgagggaggggcaggactcccggttgctgggcaaccgcgtcaacaagcccaaagagtctgggctacggcggaggttcttccgaccagagaaggcagcaagcagggggtgtagggaccaagaggtgggggctgggcctcggctgcaggagctaaggaggggcgggggcgttagccgccgctggggctggccgtggctctgcctctggcacagcgagcccagccctggctggacaaggtggcagctgtaggctggggccgggaagggaggagccagctgggcttttggaccctccctcctctgtcacctgccctctaggctctgctccccacaaccatctaggcctcgaagggcaagagcgagctgtctggtgggagaccctgactgtcggggaccgcagacataggggcacaacgaaggtcccccaggcgtcacctagagctctccatgtggcagggcctgagatcaacccagtggggtctcagcattttctcaattcaaacagaacagtccatcgggtaggaaagatatttcctacaactgagttgatcagaaagtcctagttgactgcaggactgagcaggatcagccgatggcagagctgctggggacgtgcgcttgggagagggagagcgcctgggcaaagctcagaggctgggggtgcggaactcaaaaccgactgcggagagcccagcgggcgggagctggggcgcacgttggggccctgccgaggggcgggcagggcccggtgccagccccggcaccgacgggacgccctcctccctccgcagggcgggaggatgccgccgccagcgaaggagggcgggcgcaagggcccgcgggagcgaagcgggaagagcgcgccaggcacggcgcagggtgaggagcgtgccaagggggcgcccgcgacagagccccccaagccgggctgggccctgacgccgcagggactggcggccatgctccctgcgcagcgccaccgccatctgctcttcggcgacctgctggaggacgtgggcgcggcggcctccaccttcccgtgcgggtcggtggaaccggggtaccgcatgcccgacccgcgcccgtggacgcagtcgctcgagctgcccgccgagcgccagaaccggctcctcggcgtcctcaaggcagcggaggcccgcgggcgagtccgcgccctgcggctgcgctacacccgcatgcgggtgaggcgagggggtcggagggcagagggggcgcaccgggagcgttgagcggagccggccggggcggggcggggcggggctcggcgcgcgctcagctacccgggccccgcaggccgaggagatcgcgctgctcatccagcggcagaagtccgcgcgcgccgccatccggctggagctgttcctgccgccgcagctgaagcccgcgcggatcccggaccccctggaccgccaagaggtgcagacaagccccggtaggggcggggaaaggggaggggccctgcccgcctccgcacacgccggaccccagcctctctccccggcagcggaggcgcgtggagaccatcctggaggagaacgtggatggcaccatcttcccgcggtgacggcgactgagagtgtgcgacgcgccccagcctcccacataaagttataattctccgaaggctcgctggtctttt

SEQ ID NO: 9189 - DNA, 6000 bp, Homo sapiens
aactgttctcttgttctgccttttaaaatgttcatgtagaaaattaatgaactataggaatagctctaggagaacaaatgtgctttctgtaaaaaggcagaccagggatgtaatgtttttaatgtttcagaagcctaactttttacacagtggttacatttcacatttcactaatgttgatatttggctgatggttgagcagtttctgaaatacacatttagtgtatggaaatacaagacagctaaagggctgtttggttagcatctcatcttgcattctgatcaattggcaagaaagggagatttcaaaattatatttcttgatggtatcttttcaattaatgtatctgtaaaagtttctttgtaaatactatgtgttctggtgtgtcttaaaattccaaacaaaatgatccctgcatttcctgaagatgtttaaacgtgagagtctggtaggcaaagcagtctgagaaagaaataggaaatgcagaaataggttttgtctggttgcatataatctttgctctttttaagctctgtgagctctgaaatatatttttgggttacttcagtgtgtttgacaagacagcttgatatttctatcaaacaaatgactttcatattgcaacaatctttgtaagaaccactcaaataaaagtctcttaaaaaggccacaggagatcttcatttttcaaatgttttaaagttacagaaatttgagaacagaattagcttcttttagtctcaattcagtacttgcctcttgggaaaatgttccgagtctgcggaaacttgccctcacgttgtcccccatgaattcctttattctattagagtctagccctgtgtattttagaagaatgtatcaaaactgaggggtttaccaaaaagaaaaggaaacagcctggccttaaaacctgggcattcttggtctcctgcattgtctgggcatatttatgaagaaattttcaccatttacaatacatacttaacaaaatggcttaacttcaaactggtttccaaaattgatttatatattaatatattaaataaggtgcatatattactgtattaaggggttttgagctttcatactagttgggaagcaagctgtcaccatttatactcaattctcttcaactgtttatctcttggtaaatcttttgagtaggaaatgctgctcctagcttatcttcaaatactgagttccttacctcatttgttcaacttttttttttgttagcattgaagcacaagttttacaggcttattcagaatttcatatcagtcgttttgtttgacatttatcccaataattgttctagtgatttaatttgtatggaaactcccaaggttcaatttctttttctttttgagatggagtcttgctctttggcccaggctggagtgcagtgatgtgatctcagctccatctcccaggttcaagcaattctcccacctcagtctcctgaagagctgggacaggtgcgcaccaccgtgcccagctaatttttgtatttttagcagagacggtgttagcccggctggtctcacactgacctcaagtgatctgtccgccttggcctcccaaagtgccgggattacaggcatgagccaccgcgcccagcctcattgaaaatttacttttcaataccagactgcagagttctttggggcagagacactctgtcagtgtgctctttttccaaagtatctcctgctatcagtttttccccttgaaccaagtcttcctaacaaatttgttgtgtcattgctttctagggaactggaccagcaaatgtggcctttagtggttaatctcatctgtgccaaaatttagttgctaccagagtgaaatttggtgtgtaaataatgttcagaggaaatgtggttggagtgtagtaacttgaatagtgtcgtgcatagaaaacagctcattctgagtgaaactgtttatgtccaatcagttcctgagtcagcatcccactggttcgaaaatctgtaactaatctggtaatgtccttaatttcctcctgcctgtcagtgttccaaagtgttcatctagttttcttttatctttataataattactaccatctttgaaagttctgtttaagaaatgcttaatgggcaatgcgggttagtaactccagggtctgcgtggcctgggcaggtgagatggacaactgcctcattacagaagctttttatcatcaaactagtaagttttgtggagggcaagctatatagattgttgatgagtggttagaaaatcatctggaatttagccagttgagaagctacagaagtttctatttttttttacagtggatgaactgttttgctttttctgataaagccactaggtatatctaaataacaacctcgggctggacgtggtgccttatgcctgtatatgtgaacactgggaggcggaggcgggtggatcatgaggtcaagagtttgagaccagcctggccaacacagtgaaaccccgtctctactaagaatacaaattttttttgttttgagacagagtctcgctctgtcgcccaggctggagtgcaatggctcgatctcagctcactgcaacctccaccttctgggttcaagcgattctcctgcctcagcctcccgagtagctgggaatacaggcgcgtgtcaacacacccggcttaagtttttgtatttttagtagagacggggtgtcaccgtgttacccaagatggtctccatctcctgaccttgtgatccaccagcctttgcctcccaaagtgctgggattacaggcataagccaccgcgcccagcctaacaatacaaaatttagctaggcatggtggcacgtgcctgttatcacagctactcgggaggctgaggcaggagaaacgcttgaacacaggaggcagaagttgcggtaagccgagatcgtgccactgcactccaacctgggcgaccaaggaaacaaccaacctcaggatgaacattgctttggaaataatgcaatgtgtgaccttgaggaaatttcggcttataaatccattttttgaagtagtttttctcctttaaaatggtgaccgtagtaacaagcacagagttgtactgagtaattagttgaatagtatctatggaaaatactagacactcccaagttttccaattttggattaagagaggcaggccttgtgaaagagatactaaccctagtcattacgttagtccatctctttagtgcagaagatccttggcaaagctggataataggctgagagaagaatattcctttaagagagggacactgactactcaaagactttcttttattagtacatgggctgggattgatgggaagggacagatgtagttggcaaccatggttagcatcggatgcccatcccaatggccatgaatgtgccaaaggtgccgccactctgcatcatggttttcccaatgccgcccatcagctctcgaccccgcattccgatcctgaggaggaaaccaagatggagctatttggtaacaaaaatatcagaaagagtattaactgctcctttccaattttttgctaacactagtctagcaacccctacatctgattttccacttactggatattatatcttactacctggggtgggtaatgagaaggaaaaagatccatctgggtctccagggtatttttctggtggatgtcgtattaactgccttcagtttgtgggaggcagcagatgcagtgtaaaatacatagagaaaccagcttttttgactggtgttgcctgcagtttaagacccaataaagacatctgtcttttagtttcttggtgttaatgattttggagtaaggtgggggttcaagagtcagctctacaatttacacatagtgtcaagtgtaaaatgggcatctcaacattatttacaggattttgaaaactacagtatttagcacagtgcttaacatagagtaagtgctctgtaaatgataatttacaatctagggatatggcaataacagcctctaaatgtgaaaatgacctttagagtgtaaagtttaactgctttatctctgtatcctgtatccagaatagtaaaaccgctgaacgagtttctttccttatgcgcaattggaaaaaaaaataaaagcaacagtagtaactagttactgagcacttaatatgtgccagatgctgtgcaaagtgtgctgatcgaatttttacaactctataagttagatgctactgtcttcattctacacttaaggaaacccagtctccaacttgcctaaagtcaccgaaccagtaagaaaagggccagaaagcattttgactctaaagctcaaattcttaagcactgacgcttccaacctgactttacagattgaaggtggtttggaatgagtctggctcgcgaggggacagagagggaagtcgaaagaaggaggctgtgttcaggctccaggccgaatggggcagggccggaaggtctggttgtcctgcccagagatcaccgcccgcgcccctcacctgagacaggaaaaggtgccgaagagcgccccggccgccatgcccacggcgcaacccatcacgaagcccattttgacacggtcgaagcagcttggctgggactgtccgtagggacccacggccaccggcatctgcgggggataggaaagtgtgggcccaggcgctggcccaagagtcgggcggggacggaagcggtaggctgggaagtgggcccaagggctcaggggaagtaagggaaggaaaatcagtgggtagcccgactccaccaccctcttcgcgttccggccccgcgtcgcccggcgcctacctcacctcgctcgcgggctgggtcgctcagctctacgtctctcacggaaaacgacggggagggcgctcgcggcccgatgaatcgcttccggagcgccgggcagcacttccgggagcctggggcccaggactgcagcggcttcggaaggtgggctctgccagcgggaccatgctgctccgagccgcttggaggcgggcggcagtggcggtgacagcggctccagggccgaagcccgcggcgcccactcgggggctgcgcctgcgcggtacgctcgggtcccgctctccgggaggcgcggacctgtcccctccgcgcggcgacgcaactgaatattccggagccttcctgtccaccctgctgcccagaccctctgacccttctctcaaatgacacatccctcaaactttcttaggcgggtccccgaacggttgaccccggcgcaccacccctcgcaccctgcgcgacaggcccccagagccgtggaggcgcgtccttcagaccgctcctggccaagttacagatgctgctccgggctcccgtgcagaccgttaccttcggtcagaagggactgcacctactctggctccacgttccttctaaacgtctttgccctttagagccttccttcctacgataccatttgaatatcaactcaacaccccctccaggaaccctctctccctctcccttacctccttttacagcgtgtcaggtatctggtgttgttttctttccattgagattcgaccctagcatcccttacacttatctcacctccagccagatttttccttctgccctttggatgccatgcgttcatagttgccttcggtcttacttggctactccgttccattttttatcagttggagaccgtgctcctcagtctgcggttcccgcagatacagccgctgccccggaggtggggccagtgctgcgacctctctatatggatgtgcaagctacaactcctctggtaaggatgaagcttttcccaaggctgcttataggaagtaaatgatgggcgtgatcacgcaaagaaatggctgaatccctggagaagtgagagccgtgaaggtgtgctggaaaaagcactgagcgaggagtcgggaggcttaaattcgaggccactggcattggctttactactcactagcaattgaccttggtcagatca

SEQ ID NO: 9190 - DNA, 6000 bp, Homo sapiens
ttttggaaatagggtctttgcagatgtaattaaggatttgagatgagaccatcctggatctaaggtgggccccaaatccaatgactggtgtcctcatgagagaaaggagaggaagacttgaggcagggacagagggaaaggccacatgcagctgcagagagccagagcggcggaaggagcccgccctgcccccacctgcaagcgaatctggttctgctacatcaggccaccccgcttgcggtcctttgtcgtggcggccacaggaacctcacacagagccagtcgccggtcaccaccacagccggggttcaagccccggtgccaccatcatgggcagttctgaaccttcagggtcttggtttctttgtcaacaatgaggggctgcaccgactttgcagggcaagaggacgatgtggcaggaatcccacgtgggccccaaaggcggtgaggtccaagcacggatgctgccgcaatgcccacgcagagtacatgtgcaccactatgatttccacgctgggcgtggaccagaaacacccactgtgcctcctggagtgtcagcctggctgatggccctgagcctgcattcagggagtgaggctgttttgactcggtgcaggacaaagtggaatgcgagggtgtttataaggagacaccgtgtgctcccccgctacaattaacatggacgcatgcgctgctgaggccaactctgaccctctggatacggctcccgctggctgtgctgagcccaggggatggctgcgtgtggagggctctcagcctgctgctcccagctaagggatgcatccaacacagcaaagagagagtctggggacggctccctgggaaagtacagcagccccctcatccgcagacactgagacccctgtggacgcgtgagtctaagggtagtactaagcccagccaaggaactacaccttctcgctgaaggaggcgcctccggcttcccattggcagagctgaacggcggcgtgagtgctccggtgctttggggccatgattaggtaaataagagtggcttgaacatggcactgtgatatggtgatgggggatgtgggaaccacaccggctgctaagtgatcaacaggtggtggcatgaatagcctggacacgctggacaaaggttatgtcttatgaagtcaaatggtcaatttcctgatgctcatgtgcctttgggcttccccaaacaccaccactccctgagcagagacgcgcctaacagagagtcaaccgttattttatgccaaagcgaaaggcgtatcacagagggcttgggccttagtatccaatatccccaaagctccctgcagaataagttctgaccttgccttcttccaaagttggacaaagggagaatccgagtcctgggcaggacagatcaagatctcaccagactgtgcagaacggcgcgtgctttaaaggttatgaactgtttgcttctggaatttcctatttaatacattcagactgtggtggacctctggtaactgaaactgtggaaagtgaaacctcagatgagggggaaaccgaggtgtatgtctccttaacccactgcttctctccagagccacacaaggccctgctcagactcgcctcttttctgctaatccgaggggaggtgaaccagctgggctccttccctttctctaacctccctcctggaaagcctgaggccacgggttcctgcaggatgaactctcctgggtccgtcacccaaggaagagcgtcaagatcctctgaacagctggccgtgggaccgcattttatttagaaggctttgtgctttatcgtctaatgggggcaaattccaaacacaaatactgcgtttcctcccaggtagcatacgccaaaagtcacaacagaaagtttctgttagcttgaaaaatgagggccagactaagagatccaatggaatccaaggcgcactgatcacggagaggctgcaacctgcccgccagccccccagactgaggcccggagtggaccagctagtcaagccgctctaacaggagcagccacttcttatttctgcaaagcttttagttaacgggcatcccgggtacgtgcaagaccacactgtggaggggcagtcccaggaggtgggagagggagcagggcctgggcctgggctttgctggagctgctgggggcctggacagtgaaccccaggaggaggccctgcagcccacctgcctctccccacaaccaactcatgaggaatgtgggaagggccttctacaaactggctgcaggaacatctgtgatgtactaggctgtggtccaagctgctggaagatcgcggcatgttcggagcccccagccaccctcagagcagaccctctgtcccctccctgggcctgcttaccttgtacaggagccccatgatgagtatgtagcggctcatggccgaattctggtacaccaagcaggagccctgctggccacactggtcctgccacagcagacaggccttgtcgatcacccagccgaaggcgatgggccccgggatgccccctgcggagagaagcccactcagcacccacactcctggtgggtaggggctaggcagggggcaggcagccaagaggcctggaatgatgggctctgggaaggtgatactggccgttggagttctcagggggtgcaaagagggcttaaacgttcctttctttgggcattcggcattggggctgcgagtttcccatgatctcccagggaaagcctttgggcaaataaatgacgatgggcccctctagtggacagttagggaatggaccccttcccaggcgggaacagcctcctgctgggaagcacatccccttggtggttagacacttgcccatgcccttgtgcagtgagcacactgtgcaactgaccatggcttcctcacactgcacagtacctagtattctaactacaatccactggattcccagggcaaaggatctctgagggtcacggacacatctgcaatagaaaaccacagcgtcagcacccacagaagtggggttgcatgccaagtcaccccctaggccagtggcctcctggaccagtccccagccacatcatcacccccccccaagtgggaagcccctcgtcagagatcagagacagtgaggtctctcctgccaccagtgacagacaggcccgcttagacctgggtgtttcctggagtgctcctgtctcaggatctgcagagctccgcctcagggtgctgcaaggaaagctctggacaagcgcacacccgaccccagcttaccgtagagttgccgttagtgcaggaatgctgctgaggaatgtaaagaaaattacaacgaatatgaaaaccagaaggaggggctttctctgacaagttgaagtgcatttccctgcagtggcatggccaaaaccagaggaaagattctgagggatacagctacagtctcggtacacctgggaagcccaacaatagctccgattacaaggggaaggcacgggggccccttcccagggtccaggggaggacaggggcggtaggcagcggctccactcaccttctggccgtccacattcgtctccgtggctgcagggcaccctgcgtggcacagtgagaagtacatgaggccgtccgagccgcacacagggctgtagtgttctggctggcagctgcaggcagcgttgcagggagccgttaggttcaggtggccttcgggcaggaggctgcagaggggggacaagcgagtggtagggtccaggccagagccatgctggcgcccagcaggcacagggtcagccatggggctcgtccccatgcagcctgcatttcgggtctacaaacttgccaagcttgcaccgcccccagcacgctgggcactcacactgggcactgccttctggtgatagaatggtttttcctcctcacgcaaggaaggcacacccatgccccccagcaccgtccgcctgatgcacagcccctttccctagttcatttgtttttggacaggcaacacattcatatggatcaaatacaaacattaggaaagaaaaagcgccaagtacacaaaggcagcctcgtggccccagccccaccccagtcctcggttctccagccacaggccggctgtgcatttgcaggggtcgtctgcacgtacacgcccctcggcagtcacaaacatctgcacttctcacttgaatcagagcacactgcgcccattgtccaactccttcctttttcccacttcacagtatgtcttggcagtggcccaggatgagcttcctccactcctttgtgggcagggcctctgttgtgaggacagcgtagtgaccccgtccaccctgatgactcttaggttccgataatgccacaacggctgctttgtgcttctcggccttgcacggcacctgcaggtgcactcccggggcccgcagggcagggccgaggtgcaggctacctacgtgtattttggatattccctaattgccacctgaccagcaggtgtccctcccactcccagcacatggcaactccaggagcacatcctgggacactttttatgtcaccgagagaccagcctcaaggaccccgaacactagggctgttgttccatttgacacagctacagagcagagtgctgaggcccagagaggcatatgactgcccgggggcacagccgggacccaagcgcaggcactgctgggggctggcatggtgccttttcacgtggatgctgccgggtgccctgctgagcgggtgttgcccttgccgctgtcctgtgacgtagcccttttcaaaaccacctctcccaagtgctgcaccactcctcctccatgcccagggaccgcgggtgcttggggccccgacgcgtacccaggtgccatctggccctcacctcccgccgtagctggctgtgacgcccgccatgggcacactggggcagtgcagtgagaagacgaggatgcccagcaggctgacaacggtgcagaacaggcagaacttgatgaccgcggagccccggagcctgagcttgttcacaaagaagccgcccaggaaggtgccgccaccacccgctggcaccaccaggtaccctggggagagggagggattcagccagggactcaggcagggggccgtggtgggagagggtggtggatcagccgggtccactttacaggtggggaaactgaggcatagagggatcaattcctgcctgcatggcagcactcaacaccacacctgagtgcttagctgttgcgctgatagagccctaggagggacctctgtccagagcccacagcggggatgcctcagaggggaaggggaaggggaaggggaaggggaagggggagcgggggggcggggcggggcggggggaggaggagagcccagagtgctccaaggtcagcggcccctgccccagtgggaagccaatgactcctccactgacccccctccagggcagccacaccccctcctcccccaggggcctctgccgagtccctgcaggctgtgacaaggacatttgtcgaagcctgagtggccaccaacagtaaaaaattgcgattagctggcatctagcttctgggctgacaagtgaggagggcacaggtgaggggacaggtggagaggggacaggtttggggggacaggtggggaggggacagatttggggggacaggtggggaggctctccaaggggcagtagagctgacctctggggggctgttgagtgtgggaatgtgggcttgtgaggtcagcccagaggggccaggccaggatgggcctgtgggggagggaggggagccctcatctgatgccctcttcctgtccagatagtggaccctggaagggtagagcgcggtagattggcggtggtggcccacatgcctggcacctctgccatggcccagggtactctgtgaacgctggcaggaggagcagctctgaggaggggtccccactttctgcagacctgcccagcctgggaaggccagcctgcctctggc

SEQ ID NO: 9191 - DNA, 6000 bp, Homo sapiens
ctaaatagagctgtttggaggatgttctctgcgctcccaggccggcatcgagtgtcatcaatttctaccacctgctctctcttctgcccaaggctgtgttgcttattccttacaaagtttatactgcatttggggctgtatctttttttgttttttgttttgtagaaaataaatatctccgggggcagtacaggtgtctgggcttgtatttgatggggtttctccggtccctgtttctactggatttggagccaggcccagctagccaagtttggaatggcatttgtcatgtcagtagccaccacctttgttcattgtgaacctaccaaggctttccagcttcatacacattgaccagagctcaagctcctgcctgcaactcctgcctagagttgaagaaaagcaaactggccttggcaggcacagtgtcatcataccctcaccccatatgtttggggtctgcttgaggattcataaatcagccactctggattgttgaggaatggccatggcagccacagaaaaaagaatttttctctctgagccaaggttgttttttgtttttttctcttttcttttttgttttcatttcattggaagatctccaatggactgaacagctccagtcagcagcagttaccacaaactgtgaatctgggccccaccactcttccctgttaaccagttctgtcagcatccccctctccagcagcacttccatgaagttggttctgagactctggccgtgaacacccgtttcttcagtgatttgttttgggcttttggctcaaaaccccaggctcttgtttttgtctagactcttattctgtttcctgagcagcaggaggtagggaccactttgatgtcagacttctggtagctggacatgttctcgagatgggtggctgttcgcgacttttgtaccagagtgaaattgttagaaggagggtttctggctgtggttctaaatggagccccaggaagctgccctctccccagggtttgtgctcagtagagccctgtggatcacagtcttgaggtcctctagcaggggtgagggagagcagcgacttcagctgagtccctgccagtggttaagcaaacaatggtttcaaaattcaaggtccccaaatggcagcattttatgttctgacctgtttgtgttatatagtggttttttttttcctctttggaactcttgtgttgttaataaaatgaaatgattactttttaattaaaatgaaaaaagtaaaagctttgttcatcttttttgggtgtgaatatgctctttgcaggatgctttccccaagtcagaggtgagggctcctgtctcgaggactctggtctgcccccttttgtcctcagcatatgatccggcctcaaacctctttgaaccctgccttctcttcataggtagctcacttagaggctttaataacagttcagagcaaaggcctgttggctaattatagtgctgtgttcaacatcctgcttctggtagacattcattgtgtcagcagccttgtcctcttattctaggaaaggaaaacaggatgtgaggaggccatttgtggttaatggccattggtaggggggcacttcctgttttcattttgtctcagttgccaccctctgttctacccattgtgcagggagttggcagaattcatagaacctgaaggagccttgaagagcatttaataacttggggtgggtgtggtgaagtgggtggcacaggcctccagtgagttagggaccaacgtgccaagagcactgagcctcaccagttaagtgttcactgcctcctgggggtatcagtgcagcctgacacctacacttagaaagtgctcactacctcctagaagatgccagtgcagcctgacacctagtaagtgcctgccagtctcttaggagatgatagtgctgctctccaggccagggccctggagctatcggtggataaattagatcaccagacctgggccattagcccatctcttctgtcggtggtcagtgtttctgatttaagagtgtggggtcctcctggagggccccctggagtgtccaaacagcacatctcaggccatgaagggtataataaaattatttttattgcattttgtgcagacgggagtctaaaaaagtaacacagtaaaagccataaagcattaaatgggagcattcaacaataaaggaaagaaccaaccctctccttttcatattggcacaaagaacacaagatcaatactgaggcaggatgcggcatactgaacacttacactgaaaattaaaggcaggcctaataataatagcagtaatagtaataaatactcttgatttggtttgcaacctctcctatttacaagggttttcaacttcattgcattgccctgcacatagatcatctaaaacaaaagcaacactagttatcactacaaggctattgaaatattgcactcagaataaaagtcacttgaatggacatgaaacatctaactacagtgattataaagataacttgatgaatgacttgtgataacattcataacaaatattgcacatgtagcacagaaaacttgggtttttgttgtgggatgtctgtttcatcaacggaaactttgctcttgccaaccagacaatctgggcccagatagtgcaactttggttccctaattgatgttgatacagcccccttctgcacagcccatcacatcagctctggaatattcaggcccccagaaggcaggacctggctgtggtgttcagagggaggtctactgaaggatgcagggggctggtgtctaacacctccagcttcctgattgagtacctgaaagaatctatccagtcccctgatcgaatctcagaggggacttggtgtaactggcagacctccaaacctaccccagccacacctgacgctgtctgggtggcgccagctccagctctgccttgggctcaaaggaaaagaggtggtgaggtccggattactcagtggcgccagctctgggaggtgcgtgagatgtcaagctaggtgcgcaggtcagggccctggggctggaggtactgtacccagtcccagatggtgctggaacgagcatgcagtgcctgacccccttagtaatgtgccctaggggaagggaacccggccaccgcgccttctctaaggacagagcacgcctcagaccaggctggtggagcggaagggccaaggatgagctggggaagccaaaggccctgggtcctagttagaggagagcagacaggcgctaaggacaaagcgcgtgcgactccagccctccctcaggcccaggtccccgggagacggagctagaggccgctgctaagcagcgaggcccggccccagagcacggagaaggcggctgggtccctcaggcgagacaggagctgccagatggggacgggggaggaacatcacgggcggctctggggcctctcagtgggtccggcccctaaaccagaatcggccccctcctccctcacttgtcccagggaggaaactccggggagggggcgccctccagctccacaatttcagtctttggcgaggagccatgggatacggggagcaggcgacaagccgactgaggagagacgcctgctccccagcgaaggcaccggggcggggcttcctcggtggggcgcgggcctctcggtttcttcctcttgaggagcacccctcccctatcctggccccaacttgcataagagccgatgagaagaggttgctcgcgtctctgcagccgcagtggaagctcacgtccgctgggaggcgaatccaggaaaagttggacccttgtctcacctcatctcggaaaaggactggagaggagggtgggaagccaagggcgcgcggaaagggcgaagaggcgagagcaggacggaggtgtcgagggaacgaggccacgacccccgcctgggcctaaagcactttcgctctcaaactcttggacgtcaaggaaaattcagcttcccgaggcctcgcctccccgcagtgcccccagcgggagagctcgactatggcgagaagtctgttgcgcttctagtcacataaatatggggacgttaaaaatacacgcgatgtctcctgtacactatgtataggctcggccgcccgcgccccacggctcggcgagaaggggcggcggagacggcaagcgcggccttcccaccccgcgggcctccgggccgccgggagccagggagcagcgccggaggagcgcagagcgaggaccgcggcgggagtgggaaggggaggaatgggccgcatggactacctgggggtccccaaggccccagctcctctcctttccgcgccttctcccaacctttattgcagcgtctcctccggcgagacgaggccgggcttagaaaaagggcagcgaagacccaggggccaaactggcactgaggagctctggtctctgcgcggcggggcgccctctccgaatcagccccaacaggcgtggcctccgggcttcaggcagcggggtaaggggccaggacacgggcacagggtctgtatgtaaacggtgacagcggcggggggcgcggcgagggctccggagccgcgggccgggcgcgctcgggcccgggtggcaggtcctggttctcaggagtagatggtgatgacctcgcggccgccgccgcggaccagcatcacccggtccaggtgctctgtgaggacctcgagaaactccatgtctgagagccggtcaaggagaaagacccggtctccttccctcccgacgaaattggggtcgcgctcggctgccaggggacctctcgcgcccgtgtccctgtccgaggtgctgatccggaggcaggaacagctcagctcttccatcccagggacaggacccagattccctgacgtccacctccctctttcccccaattttaattccaggatacagttttcatcaccattgcggttgcggggaggcccaggcatgttgagcaaaacaagcttggcgtcccgggatttcttcacgatgacctcgttcagccgcacggccgtgtgcatgcgccgcacgttggactggttcctgcggcaggaaggaggagtggagaccgcgtgagccgggggggtagagaagattggagccagtcgcccttccagcccgaactgggctgctggggactggttcttgcaagcctaggaccaccaatcctaaacatctccaggctaggctattcagagatcccagaggtcgtggcaccaattaggggttcacaacagagtgaggagggtagggaccctggccatcctaggagagagaatgaaaaaatgctgaagcacttacaagttctcccactcccttcaggaaacacaagagatgcaaagagagaaagaaaaagagcagagtcagaaaaagaggaagacactgggggcttgggccatggtcatctgccctgagtcctgctctgccagcccccacacccttcacctttccgctgcctgcaactgggaattctgagacttagcaatggggcccaaccccctaagtcctcagatggagaaaccaagacaatgtctgagctgggtctgcaggctgacagaccaggatgccttctgctctcttgctctgccatggggagcaagaccctttagctcaccccagcccccagcccttagcccccaggcccgtacggcttcatgctgaagaagtccttgatgccctcagaggagacaggactggggcccttattcttctctgccaccgacttgtccttggtccaggtgagatgcaccttctccggatctgtctccccttccccctcaggctcctcccctggggacggggagctgctggggcagctgggagcactctgatcgtggatcagctgcacctgagggatgaatgaagcgatggcagttgagtcctttggaggccaagggctctgctcccactggttggggccaaaccacccaagctgcacacctcctcctctggcttctcttcactgtcaccagcc

SEQ ID NO: 9192 - DNA, 6000 bp, Homo sapiens
acctagcttttaccatctgctatccatttacttaattgttcagtttcagtatgcatatataatgatttcaaagttgttaactgtaccctcatgggaaacgactttatcagctagagtacagttctgggcttatgtacagttccttaaccttcagtcttacagactccactcacttccaaagttactgtaccttattcctctacattctgcatttcatcctgggatcttctgtcttctaaaatgattttatcccagcttcaattgaaaaataccaaagaaggaattacacttgcaccagcccttgtagttagaataatttggtactttgatcatcagggactgtgttggttgccctgttctgtgctgagagatggtgttgggttgctgggattgtctctctgtccataatcatatgactggtatggaagagaagaaggtcccacaaaggaaatggggtgcaggacagacaaaacaacagatgcccacagtattccacttcttagtcctacagcacacatgcacacatccatcttcccacatttatagctagaaacctagcctttcctaatgaaatttatatgtcttctcttcccaaaggcagtcaagttaaaatccgcatagttactatatgcagctgcaagtccaggagccctgagtgatatgttttgttctcacctagatttgaatgtggctcttcagggtcaggcaaattcctgcccaaaagtatttggattctaacaaagaagaaaaaacagagtaatatttaaccaaagttataaatttttaatagaagaatagcaagaggattttcttgatcagtaaatatttgtacttttgtaatttttttcatataatgctgtgtagatacttaatgactctatccatgttttagcctgggtctgtggagaaggcagacagtgaaagatatggattcatgtgttctggagacatcagtttctaccctcagcattgcttaatgtgtgttctaattttgtttgcatacaggtttcatttctcagtgctaattgaaattcaaataagtatcttttgtattctcatgatagtttcatttagtaatcactttgtgtctgtcaagaattttatgtatgttcttctttaactccattaatcttagctgaatttcaaagcattgtaattaaattgtatcaaattgtttactttgaaaccctttttaaaatgtcaatggactggaattaaattctattaattggtacagagtgcctgcaaaggcagaatgagttgcaatatgtgaccattgctaatatgatgagaccagagttgacattaataaaagaactgtaataatttaccatctgcttgatcagctgatgcttcttagcatatcataaaagactacagaaagaagaaagctattttcagttgatgaaaggtaatgatgctgtgattccaagcagaacctctcagtagttgcatctttatcacttccattcttttaagaattctgctatatatcacacacacacacacacacacacacacacacacacagtttccaagttcctcaaatggtagaatattttaaatatttccatttaacaaatcaatgtttttaacatgaaaatccaagttgaatataattgtgccacccacaaaaatgatagggtttaaaaaaagtgggatttcatagatattataggttatgtagaccaatattaggacataagtttaaaatctgctgaatgaacatcatcttctctcatttctatcaatgtattgctatgactgggtatatgagctcatttggagataatgtcaaaagtttcaatttaagactgtttatgaatgtgggaccctgccctctgctacctggctttctggcctccccataacagataactctgattagtagtgcttcacagctcaaaaatcttcagtaactccttagtcttccacctatgttcttccacactttggttatcacttgcccatttcccttatttctcatcaattattttccttttactcctattctttcctctgcctgggaacctcttcccagttttgtctagcagtttctgagggcagtgaccctgtctggcttatggcatagctcataagtggttataatgtttccgtagatatttgccaacaaatgaacaactatttacattctacccatttttcaaaaccaggctcaaataataccacttctaaaaagatctctctgattcttcatctggaactaacctctatgtccatatgttgtgatctagaactccttttgttatagcactttttacatatggacatcgtctgctaataatctctacttacacatcttctagaacatggggtaatatagaaagtccttcctctttccataaaaagaaatcaccagccaatcttatgtttgccccacatatttgctgctttttttccccacaaatgacaatatgactcttttcctaccaaaatttaccccctctacgtgtgttctagaacctaccttttcttcttctgataaggtacttgctccctgtagctcctctaacatcaatctatcagtcttcttctctttacagaatcattttcaccagcactcaaatgtgttctaatatttcccttcttaacaaataattcctgttgatgtcatatactttaggaatcaccatcacattctctttcctccctttcatagcaaaacttcttgagttgctcatggtacctgtttctcgtcctcatcttttattctctcctcatcccagttagactgggtttataaccccaccagctcactgaggttgtttctactgaggccaccagattgacctctatgttgcaagaccccacggtcatttttatgtctatatttattcaaggtctcagaggcatttaacatagtgttgataacttcaattttttttgaaatattcttttacgttgactttcatgacaccacactcaccagattttacttcttagttgctcaccagtagtggagataaaatgaatcataaagaattctcaattaattcaaaagaaggaagtaaaataggggaaaggggagtgaagaatagagaggacatatagaaaacaaatagaaagatggtatactggaatactaccatatggataattaaattagatacaaatggtctaaacatcccaattaaaaggcagattgtcagattggatagcaagaccccattatacgatgcctgcaaaaaactatatgaagacacagatagattaaaagttaaaggatataaaatatatactctattaacactaatccaaagaaagcagaattgtccatattagttttagacaaagtagactcagaacaaggactattacagggatgaaaaaggagagttcataaagaaaaagtgatcaatttataaggaatacaaaacaattttaaatgtatattcatcaataacagagcttcaaaatacatgaagcaaaaactaacataactgaaaggataaatggacaaattcacaattatagttgaagatatcaacactcttttctctaattgataggagaggaaaatcaacaggcatatgtaagactagaacaatatatgaacaatgtgatataattgacatttatagaaagctccccatgatgaaaacagaacactcattcttttaattttcatatggacattcattaagttcatatgctaaagcataaaacaagtctcaataatttaaaagacatgaaataatacggaatgtgttctctagtgataatggaactaaattagaagtctatcacagagattgcccacagagaacatgcaaaaggacagaaaatatggcccaagattaaaacttgggagaataccaacgtagtggtagtagaggaagagctcttcaaagaaggccaatgagaagagatcaaagaagaataaggagaaccgggaaagaggagccatggagataaagggaacagagaatttcaaggaacaacaatgttatatctagaggtgtccaataagataaggattgaaataaatccattggatttggagacatggagattactggtgactttagcaagtgaacaattgatgggaaatgaggaagtaaaggcagtgagtatctattcctcttccaggcaaatctcttttcttcttgggaaagcaaaaaacatgaaagcaaggcagtggctggagagaatcagggccagaggagggaatttttttcttttttcttaattaatttgttgttattttaaagataagagagatttggacatgtttgtaggctgaatattaagagctggtggtaaaagacagttgaagatacaggaaaggagttacttgttggaacaatgttcccaaggaggtgggaaagaatggacttattactgtagatgggggattcatcttgaatacagatatgaggggcaacaatataaggacgagtctaaatgtagatgaatttgtaggtggccatggaaattgctcacacaaagcaccttcatggattcatcttttacctttatgctgactcccaaaatgtattccttctcttagctcttgagctccagattcaacttccagtttgtacttatcatgtacaaaaacaagcttgtattctccccaagttcccttcctgactccttgttcttccttttgttcccttttgacacagacaactggaaccttgagttagccttctgtgtggcacattctagcctttgtccagatgaaaagttgagtttcacttgtcaaaactgcagagcgtggagtgggctgcaatgtaggtgatggggtggagagtggataatagaaaatgggttttgagatgatgaaaatcagagatggccaggctacctgagggtgtcatccattcacagaggtgagacaggtaggagattctaggtagaaaaacagcaaaatgaaattctgtgagattaaaaaagagtaaagagtttggaaggtgggaagcaggcccttgagaaactctgagctggtagaattctggatataagccccgtccatggtgttcctttgaacttgatcatgagcttggatggaatcactgaaagcaccaaactgatatggactccccaaatctactgaggcttccagcattcttccagaatccggatttgaactgtgggttttccttttgtggttctttttccatctttcatccccatcccagtaagattcatttttgagtgctagatattcttcctctgcaatgtctctctactctggcctccaaatcatacatctcccctttttttctcctcttgccaaccgctgtctagattccttgcaccttctgtttctagtcagtttagaaatgttaaaaaaaaaagcttttctcatagtttttctactcttggcagagtagacctggccagaagccagtagtagcaatgtgcatgaagattttatatatatatatatatatatatgtaataatgaagtgaaacactgatccaaccttggaaaataacttccctaaaaatttaaatttataatctaggccaagatgttgattgctgtttattttctctgagccagacatagtggctacaagttgcttggctgtccaaaggttctcacaaggcatgatagccatgcctcaggccccctgcagagtagatttaattagggtaaatgatactcatgttttggcctggagacctttgctgtggtccatttgccccaccgtgaggttgggaatcacccatgctgggccactcatgtgcttctgtcagttaactctgaatttcacacatgcttagttgcgtgaaccctcagaaaagtgacctctttcttccttcatcttgaccacctgggatcacctgtggttttgagacactgtgtttataccattcacaagttggccatcccttgtctcttcgacattattaagtttttcaaggacaaaccctccattttgtggtagatacagctgctttcgacaaagaagagtctggaaacagggtcttgtcaaaattcagttcagatgtgtggctgtgtttact

SEQ ID NO: 9193 - DNA, 6000 bp, Homo sapiens
cacaacccagggagaagaaatttatttaccactaaatcaaatgtattcacaactaagaagtcatttacgtagtaaagtgatataaagaaagcagtggctcagacttgtaacctcagcaccttgggaggcccacacaggccgatcacttgagctagcctgggcaaaatggagaaacaccatctctaccaaaaaaaaaaaaaaaaaaaactagcatggtacggtggtatgtgcctgcagtctcagctacttcggaggctgagaagggaggatcacctgagcccaggaagtcaaggctgatgatctttccatagactatgtactctaattctgagtcatgttcctcagataagagtacaagtcttaacctcagaaatagcaaggagaggtggaggtggaggggtggatgaagatcacacattactaagctattgaattttaagtattctgaaagtcaccttttactgtggtgatgggcataactgttaatttcaaatattttgtcatgcccaacacaaaatgtccctgcgccatggtgaaccaccttgttctccatttctcagtggggccactaacataaaaatctacctgctctccaggtcaagtttcgaatattgtaaatgaggccttaggaaatattgtttactctaagtacatctttgacaccaaatattgtctgatatgtgttgatcataataataaagaaaaaaatcacaagaaaggaaaataagtaatgagaaaaggtgggagggcggtacattggaaaggagggaatatgctttttttcctatgtataactgtgaattattgctttttgcctcctaaggaaagaaagtgaatggcctgacttagtgcgtgaaaatctcctaagctggcagttccactagttttataaaaatctgtcactttatgatctccataaccaaaccaaaccctttcatatcatttcttagaaactttctcccagtcggtctactacattcctcatgagacttctcgacccttgcttttgcagaccagtttctctgccttgagtggatgatgtgactcaggatattcctaacagatgcaacaccaaaattttgtttaatcaaattatgatgagttaatgtctacaaaaatgtattctgatgcaagccttcctggatacatggaatttttaaacaaatgatagtttcatactccaagaagaataacagcagaactctgaaatattagatttccttccttgtcatcctagctgaaaactcccttaattctccatgaggttttaaaggaaataagcaagtataaatcacctgcctgactaaatttaacctttacacatttagcagagtacagatgatagtcttttctgatttatagtgtacatttcccccgaagggaccagtgaataatgagccaagggagaggcagaaagcccgtgcaaagccctgctaggtgaccttgattaagccttctccttttgctttcgggttttctatctctaaagaaagaatactaaattcccaggacctttctgagaaagagacaagaggtgatgggggcagatgcatagaatgtctgctgaggccattagaggcaagaagttgaagatcaaaagaggttttctgctcataagctagagtcaggcagaactactgggaatcaaaaatactagttctttcccaacatctaatgtgataacaagtgaaagacagggaaaaaaaaacccaactgtatagtcaagatacatgtaaataccaattacagcttactgttaatgtgaaatgtaagttataaactcggcaagtatagcattatttttcaaaatagttgtctttcttgattaaaagtagaaaaaaagttacagttgtattggtggaaaacagagtttctcaaactcaacactactgatatttgaggccagattattctttttggggtactgtcctgtgcattgtaggatgtttaacagtatctctggcctctacctatcagatactaataacaccctctccccagttatgactattaaaaatgtctccatcaaatatccctgggacgcaaaattgcccctggttgaaaccacttggtggggggcgggcagagtgaatagtagccgcttatgatattttaaaagcacctttagtttttacataaaattcccatgcccaaatatctgaggctttgacttagttcactgagtacatccaaagtttctcagttgaggggctatcgctgttaaagcctttcaaagatccggagggagctaccttaattacactaggcttgagtatttgaagaggctgttccctgggggcagtgattatgtatttcctatttatgctgcataccagctcctagcatggtgcaggcacagagtatgctctcagtgaatgaataaatgagaaggtaaaacaagaaacagatggacctagggaaatatattttctcctttggttacctctaggtgtaatgtaccatgtctccctttacctacagaaggttaccgcaaagagcatcttaatgatcaaaaagagttagtgtggctgactctaaaagaaaaccccaccaagcttttgaaaagatactgaaaggaccaggaatctagtgtgatactttggggttttcatcctctattctatagtaaataatgccatgaggttgagcatgaaatcaaccatggccctagtttggaaatgcaatgcccaccagtgggtgcataaatacaccaaggtacaagagtctctagtaggacctgcattatcttgttttcttctctctgtggtttggggacaaagaccttaaagtgggtcagcagtcagtattataaagatgcaagcttctcagggaaagctctcagctcagactgcactcaagattcagggtttcctgaggtctacaaacgcaaatgccttttccagagcagtaatttaatatgtcatattctattgtggttggcgaagtttgcccaaattatcccttctatgaagctgaaacttgacctcgtagctttgtttttggaaaattctttttgtagtctgaaatcagttggcttccactttgaaaataatcgtctttaaactatataaataaacaaacttctgacaaagttaccccccagtctcagtgggctttgacttttctaaaagaacaaagttggggccagtgggaggctgaggatgggctgttcctaatgttttgattttgtaggaggtgttttgattgctatagaagtaagcagaatatccccactgatctcaattaccatggtcccttcattaaagggtcctgccagcatcacatcacttctgtgaagagaaggtcttggctcacaaagccattcacacagggctgtttgactcccactggcaaacatcccaagggaacttctgcttcctggaaatcactctctttctaattcaggggagagagcgctctcaactgttttaaatgccaccctgtgctcagcaggctaaggaaagaagaaaagttaatcgttcctttcaggaccaaaactgagcatcaaggcagaaatggcaaaaaaggaagcaagctttgagatcactgggaatgtaaagaaaactaacttcaacacctactggtgttgcttcccaccaatgtgcagaagcccggtgtttcatgacccagctgtttctccagttctctctgtgactagtgctccaaagctcctgacctcaccaaataggaaatgttcaaagatgagaaagaccagaagatcagtccctgatcttcaaagttacaactcagatgggaggacggggcggaataggatatatgcacaaatagcaacaaaacaaggtacagtaagatggtatggatgccagtacagctctatggtcccatgaaataaggaaacatttcatttggtgcagggtaaagaatgatttcatgacatatgagatggatcttgaagaatggattgaatttgcacaggaacaaatgaatgcctgtgcagggcagggaggactatatttcttggaatacagaaaattagcaaagtataaatgtggggaagtgcccaagagagggaaagagaacaggaagaaatccactctgcactttgaggttgtcagaatctgttcaggaggtagaaatcacagagagaacttaatattgttacgtgtgtccgtataagagaccacctgagcaggcttagtgtgagcaacagggctgtttattcacttgggtgcagggctgagtccgagaaaggagtcagagaagggtgggattatcattggttcttacaggtttgggataggcggtggagtcaggagcaatttttgcgggcaggggatggatgttacaagtacattctcaagggcagggaggacgttacaaagtaccttcacaagggcggggaggatgtattgtcaaaatagcagggaggaatgttacaaagtacattcacaaggagggggaatatcacaaagtacattatcatggggggagggtggggcggggaatgccttggctttaccatggtgtggccagctcagaggaccttacgttcctttttatgttaataatgaagaaataaaacgagaaagagtaatgaaaacttggggtaaaaattttgggggcagtatggaggggtgatgggcgacgtttctcagggctgctttgagcaggattaggggtggcacaggaacctgaagtgggagagattagactgaagtaagattttggggtaagtttgtgatatatctgtaatgctagcagaggagtcattagagaagctgcagactgttgtgacagaggttgagatgcctgctattccagttccaagtgcaatagtggaggcagaaagtcctaaatccacaagtaaagggattagtgggatgactcttttttgtcgtgttggtgtcatgagggggactggcagttgttcgttccatctgcaagctgcattttggggataaggaagactacagtacatgtgcaagtttagttggcaggtaggcacgtgtaggtggaagagccacataaaaagaagagacctgttattgctcaatctcgggtggctgcacgccacttgtccctctaagaagttgggggatgctgaccactcagggtcgtgtaacttataagggcatcaaagaatagttacctacatataaacttgagaactagataagtgaaaaggcagtgctgtggtgaaccacagggagctgaggcaaagaaagatacataattgtgtgtgtgtgtgtgtgtgtgtgtgtgtgtatgtatatatatatatttttttttttttgagacagagtctcgctctgttgcccatgctggaagtgcagtggcacaatctttgctcactgcaacctccgcctccaaggttcacgccatttttctgcctcagcctcctgagtagctgggactacaggcgcgcgccaccatgcctggctaatttttgtatttatagtggagacggggtttcaccatgttagccataatggtctcgatctcctgaccttgtgatccgcccacctcagcctcccaaaatgctgggattacaggcgtgagccaccacacctggctgggaattttgtatattttttaagataatttttttccagaacattaaagtaattgaaaaatactggccgggcacagtgactcacacctgtaatcccagcactttgggaggccgaggcaggcagatcgcttgaggtcaggagttcgagaccagcctggccagtgtggtaaaacacagtgtggtctccactaaaaatacaaaaatgagccaggcgtggtggcgtgcactggtagtctcagctactcaggaggctgcggtggaagaattgctcgaacccaggaggcagaggttacaaagctgagatcatgccactgcactccaacctgggcaatgaagggaggctccatctcaaaaaaaagaaaaagaaaaaagaaaaatattgaaagtccgaaaagtaggtgtattaaaattcacaatgttatttttattttccatttttctgagatgaagtcttgctctgttgcccg

SEQ ID NO: 9194 - DNA, 6000 bp, Homo sapiens
aaaacctaaaatacaaagaatttgccaattagatctcagaataacatgttaaaattatatagaaagtcaaagaaataattaccagtcttggagaaaagcaaatgtgtatttcttaagctcatatcaacttggaaccatcaatcctaggagtgttcattgactatggcactggtatttttggagaaaaaagaagtctctgaaatgtccagaagtatttttgacgaagaatacatattttcttattttatattagtttctaaaaatgtaactgtattagagatatttatctgattacaacccagccacacaaaattatttaaaggtgaaagctgtttgggttttctcatcttgtgttgaacagtgaatgaaatttcacagaagtgttcatggctttaatctttaggaactctgcaatttctactgctacttcatacagtcagagtataaaaccacttatttgtgaacaaatgaacactatatgttgtgcacatggtctgtttgcttctataacattatcaagagcttatcagactcttaattttcttctctgttctattcttacccttttatttgccctaggcaaaaataattataatccacctttaggagtctcaaaaactaaagcattggctacacccactccatacccaactatcctcaagtctctttctacttcattattcacctaaccagaatatgtcattcctattaccaaaatggtacacaacaatttactcactgaaattttctttaagttagtgatcttccctatctagagctgtatattctctttatttgccatcccaaatatgtattcatttgtttccacttcacataaagcgttttatcttatacggttaaatgtctcaagtatatgtttaaaataattatcttattctcctatgggcattcagtgacttggctaatggggacatttttgtaacttctacacttttcacaatagaaaagctccttcaagtccagcctggacaacgaagtgagacctcatttctacaaaaagaaaaaagcgggggaagagaaaattatctgggcatgatggcacacacctttagccccatatactcaggaggctgaggtgggaggattgcttgagcccaggaagcagagttagtagtaaaccaagatcatgtcactgcactccaccctgggtgacagaatgagactgtctcaaaaaaaaaaaaaaaaaagaaaagaaaaaaagaaaaagaaagtttagcacataaagtttctttcaattttaataattatttggtaagatgaaaattattaataataccacagagacttcaatcttatgtctcccctttaacttttgatctatttttttaaaaatgcagaatattaactcacatgtcctactcctctaactgtgtcaaagtttatgtggttcattaatgtatttcaaatattttaacagaagtaatgcaatacaaatacaccttgttgttctatttctatattaaccaaccccttttctgctcagaagtaaccatcatacggattttctatttatcgtttccgggtacactcttatccacagaattgcatcactaaacaaatgattttcttttctactttaggctgtgcaacatcacatataaccctctaaacttgtttctttgcatataattttgttttattatttctagtttagtacatacaactttagttcatgtactttaaacttgtgtataacattttattctataaacataatacacttcactttttcattttcctattgatgaacacttaagttttccctatattttgtagggcttacaattttattataattgtattataatgaatgttatctcattgtctacttgtcccagatttaactggaaagagaatttggaggtcagattgtatgtgtgcatttagtttttctagatattaaccaaattgctattcaacttgattatttgaatcttcactcagacaagcgatgaatgacactactaagtattgctaaggcttttaatttttgcttatatgtctaaggtcagttttttatttttattagaattccataactactactaacattgaccacctatagacatttgtgtgctcctgttttctttcttttttgtttggttttgccctttttgtcaattgcctgctacttgtcttttatctgttagtcaatagaaaatctctttaatctctgaagagtgttttttatttgtaagccatagcagctattgtaaggattctatactcacaggccctctcattcatctctgcacactgaagtcagcttccctggatgttctactcacacagagtaactcgaagtgccagacttgacgtcccagaagctaacctcaaccaatgagcatggctttttggcaaatgaatattccactctatttccccctaagtgggatagctctgacacgcgttcccactgtctcacgcaggtcccaagcagacttatgttccagatgcctatgatggtaactggcttgatcacacccagtcttcactggctttatcaccctccatctcttcacttcccagcccttctcatggaggttttctggactgcctttaaaataaatgtaagtacctcataccaaaatttttgcctcagttcaattctgtcatagctgaatgaaaacatatgcagtttgaaaaaaattataaagaaaaaaacacaagtctgtggcttagggttttattttttagatacactttgttttaaaaaaagaaaagtcagtgttactattggctaaatttatcaatgttcttcatgatttttccttttatttttgaatccttttctaaaaattccttcaataccttatcattagaaagacattcttctatattttcttctaaaatttttccgtgctttttatatatgcttaatccacctggaatttatgtctcttcacggtgtgagatgaagatctgaagttcttcatgtgaagatggagaacaaatcaatgcggcgctatgtattgaagagccactcttttctaacctattattaatgccctacgtttttcatatatgaagtttccatatgcaaatcacacttatgggcacttaattccgctgagacagttttctttgctgggactgatacaacactctctttatatcacagctttgtaacgagttttgttacctgatagggcaagtcctgttttattttaataacttttcaaaaaatttcaagatatgtgatttgatttttcacattcatctgtttgtttaatttcagtctgtcctccataaattattgccttctttaaaaaagctattctttcactcatttgcttgatactaaatataattatttaaaacattatttgaggagaatttgtgatcgaaagtgaaagttttgtttctgaaactaaatgcattattttgggctttcaatctaatattttatccattaatccatgctatgcttgaagcagacatgtgaactcactgtcttctgctttccttctataaagtcaaaagaaatgtaacttaaagcgctatatgatattctaaaaagggtttgcttctgcactagccatacaaagaaaacagtcattgtgctttcactttggctttccaaattcaagaggcgctttttgtaggttccaattttatcagagggtctggcctattgtaattgtcccctagaatataaataaaataaacttctcccaagtccataagtggtgtctctgatttcatatatatatttcatatatatatttaagtcaattagctaaaaatataaatattttcaatgaaatacatttgtttactcataattctatttttatcagcaaaaattcttgagtttgggggcaacaggcaattctcttctttcatgggtaaagaagaagaaaagcagctactgttcatcttagcccattataatatgccacaatttcagtgtgttaggggtttccaatctaaaactttcttacctcctgccagttttatttaccagaataaaagtcacattggtttacttcagaatagattcggttttatttagttttaatttttgtgttttaaagttcctgaactcatcattattcatggtgtgaataatcccaatgctaaaccgtaatttaattatcagaaaatgactttgatttttccataaagcatatatctacaactataactatgattatcttaacctgttctcttgttctaattggcatatttaaagagataaagtccagggcaagtgagcaatgtcttccccacccagactattttcttagaatagaaacacatattttattcctcttatgacaggtactaccattcattaataactgcacaaggccataaagagtagccatagaacgccttgtttaagtgtactttcccttatgtaatactgccttacattgcataacttcacctgggtgacataacaaagtttgcaacacttttgattgtttccataaggaatacatgtatatgtatatgtacacagagagagtatatatatgttaggctttatatacatctgcacctaaaagttatttttagaaggtctatatcaacatataagagaagtgtcttaagaatcatctgagtcagagggtagaaggttgatctgttaggaactctctctatgaatatcagatgcatgtgcctagtgactaatttgtctgtcatgaatttcacatttttcttaatagttctcaaaatgataaaatgtcttttgtttacaacatgaatttaatttgattcaccttggcaaatggcctgttcaggtagttaacatttacaactctaggcatctttactcatttatatcttcttaaagattaactacccttttaatgatacttaatgtatagagacataattttgccaaagagacatacacaactcacttacactgactggtatgcatgtagacaggtggttgttgctttacacatctttaaaaatttgagagatttttctcttcagttggtagaattatttatattctctttcagttcttaaattagcaagccttcaaaaccaaaaatggggtcgaaaagaggcatatcttctaggcatcattctctcagctcctatgaaatcatgtttgcagctctctttgccatattggtagtgctctgtgctggattaattgcagtatcctgcctgacaatcaaggaatcccaacgaggtaagtcacatggagttggctcgtgaaggtgctctcagctgaatgtacacactttagtgtcagttattctgtaagtctattttattcattgccaactaaatgcattattttgggctttcaatctaatatttcaaattaatcttcatgacaaaatatttatgttgccttcatgtacttctctgtagttcccttcagagaatattaggaaaattaattggtatgtaatttgaaacttaatgcagaatttaagcatgagactgagtagtttttaaaataaataatgttaaataagtatcttggtttcaacatataatcaagtagatttcatggcccctgattttgttttgatataatttaaatcacaaacatattaacatgttgttgaatatgtaagtagataaacatgcaaagttaacagaaaatattgtttatttctatcttcattctcttatcagtctaaccattttaattctactaatataaaataacttggatataaatgtagacttaaaaaggtcacaaactgagtagcaactccgataaacagaaaaagcataagaaatgataactcttagttagagctaactttgtaccaacagcttttaaaataccttcaaatgtattgtgtagctacaacatatgaaagcttattggtatgctcgttttacagatgagggatctgagacagagactagaagtaacttgcttaagttcacattattagtgggtagcagaagtaagattccaaactagacaatcccgctctggaacttatagtccatcttaccacttattcatttatagggtaaatttaaaaaatt

SEQ ID NO: 9195 - DNA, 6000 bp, Homo sapiens
gagaggactgtttgaacccatgagttcaagaccagcctgggcaacataaaaagaacctgtctcctataaaaacatttttaaaattagccaggcatggtggtgtgcaactgttgtcctagctacttgggaggctgaagtgagaagatcgcttgagaccaggagtcgaggctgcagtcaatgatgatcgtgccactgcactccctcctgggcaacagcgagaccctatctcttgaaacaaataaataaaagtagaaggtccttaaaagtagaagaggaaattggaagagagagccagagtgattcaatgtgaagatctgccggttagctgtgactggctttgaagatggaggaaaggagctttgagccaaggaatgcaggtagcttctgaaagctagacaaggaacggattctccctcgaaggctctagaaaaacagcactggcaacacctcattttagcccagagacctacttcatatttctgactccaaaactgtaagataataaacaggtggtgtttttaagccactaaatttgcataatttgttacactagcattaagaaactgagtctcccttcccactttagaaagggctataactctcctaagttctcaatatctccaactatggggtagctggttttctgacaaatagctggcacccaaatctagactgcctgatacaaaatgatctaatttttcccacgtaattaaggttgctctcaggcttgccctttaaggacgaacaataaaagggtaaggttctccactgggatggacgcatgcatatggagcagactgcgcaggctccgttcacaagcacatctagccgactgcgcagattctgttcacgtgcatatctagcagaatgcgcaggctccagcaggcttttttggggatgatgaagaaatgaagaccctctgtttttggtttttttttttcttgctgatgctggtctaataagccttccttttctccaataaagcctattccttaactggtgctatgtgtaaaattgtggaattcatcctgagggctgaagaaaacaggtggaaaccgagtagggatctaccttgaaggacaacataagcttccagggcaagaatatgtgttcacaaatatatacaaagtactctgaagagtactaccttcagcaggcactccaccaatatgtgttgaataaatgaataagaactatttcacaccatataaaatgaactacacatgccttaaaggattaaacatacaaggcaaaactatgaaacagaagaaaatggtggggacatttttgtggtctcaggatagaaaaagatttcttaaataaaattccaagaacataaccgtaaggagaaaaatctgattacataaaaatcaagatttatgttcaacagacaggctacagaatggaaagatgtttccaatacccaaaagtgacgatggaatagacaatggcctggaatttgataaccaaaaaaagggacaaattagaaaagtagttaaagcataggaaaaggatattcacataacgggaaaccaaaataactcaggatacaaagaaatgcccaaattcaaatcattcaaaagttcaatttaaaacaagaaactaccactttataccatgtgtgtgttgggggcagggggcggcggcggcggcaaatgtcagaaaattaaataacgagagcagttagcagggacataagattcccctatctctggagatgtggtgtacacacaggtgtagacattctggagaaaagtatatcaagcatactcatacctataacccagcaatttcatccctaactaagcattccagaaaaattctcaaattggttaacaggattgattgacaatgttcagggcagctttattggtgacagctggtgccaatccaagtgtctattttaagaaagtattaatcaaagaaaatgtggagaaagtatacactatggaatttcagtattggttaaaaggaaataatgtccacacaaaatagatatattataaaaaactgttgtctacagaaaaaagtgagaatcaggtttatagcagaatagcacttaaaaaaaatcacttattttcagggcttataaagaggtccactcccatctccacaaccaatttttttaaaattagaaaacataaattttctggaaactttggcaagatagaaaaaaaagcattatgatgtagccagaggctgagaagtggccctaatggcgtatcagcagggacacctggggctcccctaacataaacactaaaataggaagttgctacaaagaaatttatcctatgatctttcaaaaaatttatagaccaatccctagaaagtgccaaatagagaaaaaacaaaacaaaacaaaaacccatgcccttttggagaaaaaaaaaattactcagtttcttaaatgatctgtcaaaaaatattactcagtctcttaaatctttctttctctcctggttctctatgcttagtccagagaagcaaaacagagatttgagaaatagtccaaatctttcatatcagtttttgagtgagtcttatctctttttctgaaaccaattcctcaggcttctatgtcaatacttaggaaaactgagagaaaattacttgcagtttctccgtctaagggctgcccccgccagaactgcacagaacaatttcatatactttgacactctggttctgctggattaaatccaacctggggttcggaatgtttcacaagatgggatacaaactaaacttgaatttaacgaaaaattctgggaacggctagtgtcttttaaaatacagataggtgtaacattcccttttgaaactacagataaatttgagaattgtccttcattggagagcattattacagagcttagaacattttgttcccaatatattataagtggagtgtgggggtacctgcgagattaactgcacattttcctaagttatcaaatgcttttctgtgtctgaggaaattaaaagacatttttattttcaaaaataaaggtagcagttaagaaaaagcaaagcatacatatctatgtaatataaaaagagaaagcacatacagtgaaagattaacagttgggaccctcaggtgaagggtatctgcgtgttcactgcatgattttttccccaattcttctgtaggtttggagttttatatataaagagttgagggaaggctaaagtcaacagttttaatttagtactcggtctgatgatttgcttcaacctaacatctagctcatgatttaattacttcattactatacatgcctcatgacagatgctcttgtatacacaattcaggtaaaattgacttgaagtccactcagcgtcactgtatgtctaaaaataaagaagcttggaaagcctggatggaaccctgagagacaggctagtccctcaagcagttgctaaagagttgagcggtttcttctgaagttcaagataacactaccgaagaatgttatcaccgcctcgttctacaattcgctcaagtgaatcctgctaaatctttgctcttctcacgagtcagacctactgctattagtggaaactacttatgaaatgaattttatttctaaatttctaatcatcttgcaatgcaatattaggcattgtcctctcggtccgctaacctgatcaaactggggtccctaaatccaaacacgcacatacagcgtgtcttctagtacacaaaaaaatttccaagtagacaacccattgttatctccttggtttacttccttgcttaaaaacaaaaaaacaaacccagatggctaccatatacgctgataaatgattctggtgtgtgttgttctataaagagagcggatttgaaatgagtgaatcgctgagtcccgcgatgagacagggtctgcattttgctcttaaaatctcgggggcgtcaggaccacatcccagctgagcaggctgagactgctgaggagtgcggacgggcgaggaggggacgcggaaaggagggagcggcgacaggcgacccgtccggcacgggtcccggcggtgcccggtccccccgggctccaggccgctcgccccccgcccctccccttcgctccccgcacagctctcccgcccctccccacccggctccctcaagtctccacgaacggaaatgggagtcacagcgccggggaccagcggaaacaaaacacagaggcggccgcgggggggcccttgtgggggaaaaggccccggaacgaggccggcccgcgagggcccgcgctcccctcctccccggcggccgcactcacccactccggaatcggccctgtcgcccccgcccgcactccagagccggctgagaacggcagcggcgagggctccacgtgcagcgtctctccgggtaagacctgcagctcccgcgactagaagtgtgaggtcccagggcccttcccgcggaatcggcgctgagaagccccaacccccctcccgcctcccaggcaccttcgggtccaggactacaactcccggcagggtgcgcaaaacgaccgcccaaggcaacggaggctcacgaggtacaaggaagcacaacgccccaatccgctttgttttacacagtctcactttccctgcacctttatacacttcgataaccctaacgaacaggacgctgactcggaggggagcttgaactaggggaaaggccactcaaagagcgcatgcgtacagagcaaggtttcaaggaggggaaaaagaacgggtcaaattaggcgaagaaaagatggcggaggctgtgccaggggacccggaagcacttaccctccacttcctcctcctgtttggcttctgtctcacctagacccgtccggtcgcagactgtctccgagacgcttcctgtccggtgagcgtcgaccgactgaaacggcggcccataatgcattgcgatggcgggtaggcgtgtgggggcggagccagggccggaagtagagcggaggtggtggcggcggaggctttggcagctcgggactgagtgcaaggtgactgggagggtagctagatcagcgtggccttttgggactccagttctgggttttttcacgaggcctgggctgcctctcacctttactaggaggagagagcagctctgtgtcctggggaccttcacggcctggcccggggtcacagctgacctctacgtttgtagaccttggagtttgccgtagacccagaaataagatcgataccctctctgagggcaaatcggggcggcgcggggggcagggaggcccgggggtctcgggcccgcagcctggctggggcaacccaaggtcaggcgcgcgggagagattttcggccaggcctacccgccccgggcgcacgggagcgtctaggctacttaggcagaacgtgtaccattaagagggaaaaaattagtcataatattgaaagtttgcatcccacctaaaaacgatggtgctaacacttcattaggcgactttatggattgttcataggaatatgcactgaagaggcagcgaacctactaacctttggccggtcagtcatcactataaatagaaccatgctcccacccagaacaaggcctctgctcagactagtgttttcttactgttgccttccccagtctttctgatcatgtcagacgctatcatatgctctcgtggcacccgatggtactggaatagagaatttatgtcaggtggtatttcacagctatttgtgtaatgactatcttctgcgttttagtggacaatatgcattcactaatcagtgaaaaaaaatgaaagggattaaaggagaaggaacaagttttgatatgggattatgtgttcgttttttggatgagttcgtaggacttataagggagatgagaactgttgaatgctgtggatagatttggggctcaggatgaatactaaaattagaaatgcgattggggaatcataggcacttacatggtggataattgaaacaatgaaagtggattttacccgtgttgcagaa

SEQ ID NO: 9196 - DNA, 6000 bp, Homo sapiens
aaagttgaaatcattttttaaaaagaaagttatttcctcaaaccatcccacacttgatgctaggtcttgcacagaggaggtgcctcagtaaagcatttttgatgctaataaaaacattgctgttgagaaaggtcataggaacgtattatcttctgttttttacatagtcaaaaccaagcaaagctattttgaaaaacagtttacatttgatgggtgcaggcagaagctctgctctggagacacactctcatggcagttagacgtgtgaccttgggcagagttacttaaccactctcagtctcaatacctgtattcatccaaatagaggtgataataatagtatctacctcactgagattttgagagtattcatgaataaacttaaagaacttagaaatggacttggtacataataaacatttgatattccttccacaccttaaatgcgacacttaaatcatctccccttttcttcatggtttttcttcttgttttcttctggggtttttgcatgtttctgtataagtacttttttttccttggcattcacacgtcgtcaaatgaagatgaagaacagatacaagtagagcccttgcgtgtacataaaatgtttttgttgtatttattaaaaggtaattaattgtaagacattatactaatccgtttgattctatggtgaaataaattattggaagagagaaatgtgggtcagggaactcaaaaggggattatcatcaaacttgaacacactctatcacatcatggcaaaatctgctatgtggcctcttgccatgggatctagcctgcctctaactgacttggtaatttggccttagtcttcttacgtaagaaactgggaaactgacctagacaatctgtggagtcctgtcctattctaactttttggtcctaaataaaactataagttaaaactacttacttgtcatatttcacctatagctttttaatcatcttcaagcatttaaaatttcagcatatacctcattcagaggtacttttttttttaaaaaaaaagagatacccaggaagaaagtggggaaaaagaaagttcaataaaagatgaaaacattagctgcatttttccactgttgagatcattttgtattccatttcttatttaactatatatcttaaagatcttttcaacaattttaaacattagatatgagttcataatgtggatataccctaatttacttaactgttttacctctgttgtacatgtaaactattttttaaaattgtaataaacattgttctagatgtcatagtggatcagaaatattaataaaatctgatttagaagaggattcttggattgcattctttatctttcagtgggttaaaaatagtttcaccctcttcaattccagggttgcaaatgagaaatctgatgcctgtcagattctctttttcaaggaaacataaaaattatatatgaaaatgtatatgattttaaatttatacttgttgaaactggtctctaagatatgtacatatttgtgcttcttttcaaaaaaaatttctcggaactaactcaccattttaaatatgaaaattcaaattttattacagctcagaattttaaaacattatttctttgacgtttgctttttcactttgtgtttctctggaaactattagcctgcacattattcccattctttgggtttttatatttttattcgtggtttctatttctttgtgttttttttcctctgttatatgaaaaatactccttatttgatctaacaattttttttttctttttttgagacagagtctcactctggagtgcagtggcatgatcttacctcactgtaacctctacctcctgattctcctgcctcagctacccgaatagctgagagctgagactactggtgcacaccaccacgcccagttaattttttgtatttttagtacagatgaagtttcaccatgttggctaggctgctcttgaactcttagcctcaagtgatacccacctcggcctcccaaagtgctgggattacaggcgtgatccaccgcgcctggcctgatctaacaatctaagttttttttttttaatgtgactattttataatttttttctgtaaattttaaaacctcaaaccacatttattttaatttccaggaactcttttagttcctctgatgttgtattcttaaggtttctcattccatacatatttgtatatacatctttttttccttcaaatcctttcttttaactaccacaatttcttaaatggcttgccatctttctttgcctttccatgtcaattgagtttggtttcctgagcatcagcatacttcaaggtagcagctctggaaggtacacttgcaggcaagcttgctcgaccaatctgttgaactgtatgagaagtctttctgttctcaaaagtaagctgaaagagactatcctgaccaacactgcaacttcctatgggcctcagtggcaacagccagcctcttcctgatctgtgtcaaaaagtgggcgggagaagccccttcttctatcacagctaccagcccatcaaggatctgtattcagtctcatctgcaaagacaatcatttttctattccaagcaggctggataccattcttcagctctgcaaacactgacttccatctgtatcttcttccttcaagactcaaagggcttgtatgcctgggattttctctaggttccaaccattgtcccagttatttagaaattgtgcttcccagtggaatgttttgatcaggctacaagaatgacaggacctagtgaacaagttcttgaacaccctggattaaatgtttgaattttaacctaagggcaacaggatgctactgagtgagtgaacatgatgaaatctgtagtttaagaagaaatattccagcttcagtctggcaaacatctctgaaggcagggaggctgaatataatcaagactataaaagtctagattaggacagaaatagatgataatttaaaatgcgtttgggtggtgttcaggtggacagattaggtgaacttggtgatagattggccagcgaggatgagaaaaaaggtggaactgatcagccttctttagaacatggtggatggttgggccttcaccaacgtgtaaaacacagtaaagagcttagcttatgtttattttgggggtgatgtttcctcccactctcgtattcccttgcagcactgcatttacaggaaaaaattcctggaagagaactgactaaattaagtacatgtgtatttgaattttcgtacatataaccacaccgtttcccttaagagttcatttggttttgtatttggttggtttgatacatgaaaagtgatgtctcactgtcaattttatttctatatttatatttatttgttttgtatgaagtgtctattaatatccttcctcagttatctcttggttgtttttcctattgatttttttaagctcagtataataatgagattaggactttgcattgcaaatatttttgccagttaaatgtctgccaactggaagtattaattcttatttagtcaagttggtcaatattttgttttatggtttctgagttttttataatgcttagaaaaggcttccctattccacaattatttgaatgttatcctcttattttttaatctaatattttcatagttgtatcttaaatatgtaattcatatagaactgattttgatgtaaaaagataaggctccacagatggctatttacggcctcaacacttttcactgagtaactcatcatttcccctactactttacattgatatttctttaaaccataaattaaattgctgtacatactcatgtctacttttgggttaccttttctctttcactaagcctatctattccaatgttaatctaaactgttttaattattgtgatattatatgtaatatcccattcattattcccattcattactcttgttttaaatagatattcttacatatttattttccatataaactttagaatcagattggtttgaaaaaaatcatgttattttaaaaattgggatcaattttatttccaaatgtatataataatttggggaatcttgttgtctttatcctactaaattttcttagtgaaaaaagtatctctttacttattcgtatcattttttttccttcatgcataacattgagaactttctgatttttgtttgcaggaaagaaaactattggtttgctaaacaagagctttatagttgattaactttgattttccatgtatacacgtatttcatttgctaatgacaatttagctttcatttttcataaatctttttctttctcttgtttaattgcataggccagtaactccaaaacgtcaaaatcataacgacagtgtgcactgttgtgttttttttttctgaatttacaggaaaaaataataaacattttatcagctttcagcagagatgccatacactttctgtacttcccaatcctgagttttcttcactgtcactctttgtcgaataccttcaaccctgaaaattccttccctttgtttaaagataaaaagcaaagttgttcatccattgcttagaaaggaaaaattgtagtggaggcaaggttaaaaaggagcaggctgaactccatagcaatcgccaaagcaaggggttaggaaaagtttcttggtcccctagtcactctttagaaggaagaacccgggcttggggaggagtcggggccacccccgccccctgcccgcagtcgttgccacccgcggagatgaaatgtgagcctgggtggccaaggacgccggagtggccgccttccccgcgcctgagcgcagtggggcgagacaaagagacctgggcccccagcgcagcccgtctcgggccacgggcgccccagctccgcggagtcccgcagtcgctggcccgggacgcgcccggcccgggctcccttggaaggctccctaggcaatggccgggtctctgctccacccggctctcaggagcgctgctctctccatctgatcgccctccatcctccccattccctccggttccgggctctcccttcgctccaagcctcaggccaccggcttggatggacgctccgaggctacccgtgcgtccaggggtcttgcttccgaagttggtcctgctctttgtctacgcaggtcagtgacggagggcggcggagagggtcagaggctcggggctgcccttgggtcacggtccgggctaacgtgggttgagctggacggaccgggacctttgcagaaggacctttgcagacgcttctgccttttccgcgaggcgacggcagaaacccgcgcacttccagccgcacgcggttttgttttgttccttttcctttaacttttaccttttgcatttcttttctttccctttccaccttggaaatagcagtctcgtgtttaggggatttgactctctggatagagtaaactatatccaaataaacttatctggataggctaggcagtggcctctccatcttctgctttctaaatagtcctggttttccctcttgtgaataaaaaaaacttagagctttgttttcgttctttgggagattcacaagtgtggtagactgagctattggactgaagtcaaacacaaggtttttgagaagcatgaattcacccagggtctaatctgtacaggttcgttgatttagatagacacttgtttataagagaagggcatctggtttcccttctaattattcgtagtaagaactgctaataattaacgaagcaaagtgggttttcttgtttgtgattaatatggagccccaaatggcctttcattggttattcaggtataaagtgtcttacacacgtggtctttgcatcagttcatattcacaaaacaatgcaagctaaaagcaaagttctttgtaaaatgtttttgtgtctctaacgtcctatgacaaaaatcgcaggctcacccctgagcctccaatac

SEQ ID NO: 9197 - DNA, 6000 bp, Homo sapiens
gttttgtttttaagcaggcttgagtcttgattgtgtgagtcccatgccgaaaatctttaactggctttgcattgctcttagaagattattacatggttcacattgcttgcatatctggaccttgtctacatttgcaacctcatctcaattctctcaccctcctctggcttggtcttccacttgcatttgacccaaactctctttgcctgcagtgcctttacccagatggtctcttgtgcccagaattctctttctctcactctttgttgaattatctggctaatttctactcaagcttcaggttgcagtttcaatattgttttatcagagtgcccttccttcattagagaatccttagttaaaactaaaatcatttctgtttataccatatattttttaaccatagctataccttaatttttaataatatgtattttggcaattgcatgtttagtatttatcatgctcactaaaatgtaagctccgtgaagacatggaatggagtcatggtcagaagctaagttttaaagttgggcaggggtcattcaaaaattggtctcacgcgtcatgctaaggaatttggatctgattttacaggcaacagagaaataatgaaaaattttaagtaaggtggtggcatgtacagagtttgattccacaaggttttgtggttcttcaatagaaaatgaatcagaaagtagtaagaaagggcagaggcaaggaggttaggtaagacattcttgaaatggtacagatgaggaatgtcaaagggctgaactaagacacagcatagaacagaaatcatatttaatccatttgaataaggtgtcagtcaatggttgggttccctgagcatgagactctgaggcagagattagtgtgcattatgtttattatgagatcaacaccttaggaaaagaaggtaaggaagaggattggccatatggagtttagttgggatacagggctaatgaaggccttatctgaccatacagtgagctgtggagctagaatagcccctgagtgttaaccccatggggctaacagggctagcggtcaggaccatattgatgagtcactggatatgggctacatctatgaatggggaataatttgagtgacatgcctatttccaggtaatacctgaatgaggctgagagctgagggtgttctgcccacagcactctaagcagctgaaaaagacatctgggtggaacatcacagtgtccactctaggcacatatttattaaagaataagagagaaaaatgagctgagggtggcaaacagaaacaggcatggactaaagacaacagattcagaacttacggcctgacaggaggtaggtaatgctgtgaagacataggtgaggtgccttagggagagtgtgccaagtgagaagaatactgaggtatatcaggaagtctggaagaaaagtgagaatgcgtatgtggagaagtaataaggaccataatacaacaaaaacaaatgagacaaatattaacagaaaacttttcctgggtgtttgctcaggaccaggttctttgcacacattctatttaatcttcaaggcagccctgtgaatttgatgttattattatcctgattttgtagaacaggcacttttggggggattcagaaacatgcctgagatgggtggctaaggcatcaagccaagacagaaccaaatctctctccagagcacatgcccttcactgtctctcattagaagacagtggtttgttgtgacctttaccgaaatatcaataagcagaaatatggaagcgttttggtaaagatagtagctaggatgtccaagaagtctataacatttttaggaaggtgtttgtgggtagcatgatgaccaaaggcagatttcaatgtgtatagcagtgggaaatgtgagagaggaccaaaagatgtgtagagatacatggcaaggaatacagatctggcaagatgaaatttcattttattttattttattatttttattcatttctcttacatttttataacttcaacttttattttacagatggcacacacctgtagtcccagctaccagggaggctgaggcaggagaatcatttgaaccctggaggtggaggtggcacatgtgtaagtcgtttactgatgctgagatctgggtgtgaatgatcccatcacccagacagtgcgcatagtacccaatcgttggcttttcaacccttttctgcctcttcccttccctctctagcagtccccagtgtctgttgttgtcatctttatctctacatgtacctgatgtttagctcccacttacaaatgagaacatgtgaaatttggttttctgttcctgtattaattcacttaggataatggcctccagctgcatccatgttgctgtaaatgacaggatgtaattattgtatatggctgcatagtactccatgatgtatatgtaccaagatggagttttaaaacagaagaaaattgagtatgtttattttctaagggacacctcagagagagggagaaggtgtcagtacaatgaaaggagggaatgatcaatagagcaagtcccactgatgaggtagaaggggataagattcatagaaaggttggagaggaaagcagtatcttcccctaaatacaaaggagagaaggttaaaatgtttttaacaattggttttgtcggtgagaggcaaagaccaagatctcctacgttatttatgtttttcaagttattcatttcttgggggttgggaatacggtctcactctgttgcccagactggagtgcagtaaagcaatcacatctcactgcagttttgatctcccaggctcaagcgatcctcccacctcagccttccgagtagctgggattgcaggcgtttgccaccacatccagctaatttttagttttttgtagaaacatggtgtcactatttgcctaggctggtctcaaattcctgggctcaaaaaatcctcctgcctcagcctctcagagtgttgggattatagatgtgaaccactgtacccagcctcagattatttttatatttaggaggtatctccatatcttaaacaaacatgtgttctcacttataatacagataatatgctctagctgatgagaaagcaaataattggaaaaaaacactggaaacttccaggacaaaatgaacataggaataaaactgaagtagaatgaggaagaggaactagaacaaggaagaggacccagaagtaacaaatcagagtaatgctggaaaatcctgtcagggagggaatggttaagcctatgtctcagtaaccatgaacaaagggccaaagaaacccttcatccaatccggtgttgggaaactgttaacgacacagaagtcatctgtttgctcaatgattcacattccttagagagggagttctcagaccaatcattttgaaaactcagtgattttcacattcattaattcagtgagtggactctttaaatctggatgtcattggaccagccattaaatctttggccggtaattgactgaaatggaggacattttgcaaattgtaatgcctcccacctggagtgtggttggcgtgcttgctttggagacattttcatccttagaatagatcccttgccagtgggatgtaaaagaaaaaggaaaagggtccacttctcccacatgaagccccccactgcctctagggagtggcaagaaagcggcagtcaaaagctacaacttgactcgaattttgaaataatctcagttgaatttttcttcctttgaaaaccatttgaaaaactatagaaaggatagtgttaaatttctactgggtttagtcccacttatatgaaaagattcgaaaaagcatctttccttcctatttttgaatcggaccagacagaggaggtaagcatagtgagttacagggctgggcttgttcctggatcagttaccacatggcttgtctcagtcaaacactttgcacacctcccgttcatctggcaaataagggtcttaagtttgatggccttgaagataaacttccagcactaaattgttctctagcgtctaaattttaagtgactgcatagcttatttcaagggccacttttatattgttccataaaaatgaaaggtatgtgtttggctttaataaatgtgatctatttcaagctgccattgaagaaacattgaatgaaagtttccatattaaacattacttcaatagagagagaggtgttccttaacagctaatgtaataattaacagttcattcaaattaattataaggagtacttctctattttcttcttttctggatcttaagaataaactatgaaatgttaatttcttgcttagggctcctgctaagtatcaacagttttcgtgtgtcttgaaactaatacctaaatatttctccctattgaggcatctttattaaagccagaattgattaccatcttaaggaaaagtggcttacttacactagaataaagtaataaagtccaaaatgttttttaattactccccaataaacttacaacattttggcattgtcttcagctgtgtcttgacacatgtatttatacttttatatcagagtgatttttacacaggaagtttcagctctgtaattagcaatccacaatagaaactttgacacttaattacagcattgctaaggcaataataatatgagaaatcctaaacttgaatgcagtatttcttgacacacccctagctaccttcttattggctgggaaacaattatatatgactagtaaataatccatactgaaatgaatgtgtatgaaaaaaggcaacatgcatttacaacaggtacttctagttaggccaagttcagtcacagctactgatttggactaaaacgttatgggcagcagccaaggagaacatcatcaaagacttctctagactcaaaaggcttccacgttctacatcttgagcatcttctaccactccgaattgaaccagtcttcaaagtaaaggcaatggcattttatcccttgcaaattgctgggctggttcttgggttccttggcatggtggggactcttgccacaacccttctgcctcagtggagagtatcagcttttgttggcagcaacattattgtctttgagaggctctgggaagggctctggatgaattgcatccgacaagccagggtccggttgcaatgcaagttctatagctccttgttggctctcccgcctgccctggaaacagcccgggccctcatgtgtgtggctgttgctctctccttgatcgccctgcttattggcatctgtggcatgaagcaggtccagtgcacaggctctaacgagagggccaaagcataccttctgggaacttcaggagtcctcttcatcctgacgggcatcttcgttctgattccggtgagctggacagccaatataatcatcagagatttctacaacccagccatccacataggtcagaaacgagagctgggagcagcacttttccttggctgggcaagcgctgctgtcctcttcattggagggggtctgctttgtggattttgctgctgcaacagaaagaagcaagggtacagatatccagtgcctggctaccgtgtgccacacacagataagcgaagaaatacgacaatgcttagtaagacctccaccagttatgtctaatgcctccttttggctccaagtatggactatggtcaatgttttttataaagtcctgctagaaactgtaagtatgtgaggcaggagaacttgctttatgtctagatttacattgatacgaaagtttcaatttgttactggtggtaggaatgaaaatgacttacttggacattctgacttcaggtgtattaaatgcattgactattgttggacccaatcgctgctccaattttcatattctaaattcaagtatacccataatcattagcaagtgtacaatgatggactacttattactttttgaccatcatgtattatctgataagaa

SEQ ID NO: 9198 - DNA, 6000 bp, Homo sapiens
tttctaaaaatgttttaagtataaagtagagtgataaaaagaatgtattgtatagagaacatttaatactcagtagctgctattaccagcaaattctttcttttttaaaatttttcctgaaatcattagaattagggtatttcacatcatcaattctccatatataaattactcattaatttataggaaaatttccacagtatacagttttgcttttttcagttatctccctggatttccagtactttagtagagacatcaaatatatcacatgaaatacacagacctgtctttcaaaatatatcagaattcatcctatacttaggttttaatttttttaatgcaatgaaaagcgaaagaaaggtaaaaacatgtccatgacactatttctattattgattttttaattcatgttcaccattcttttttcatcttggaaaaatgaaatattgatatgggtgatataatatgggtgaagttcttaagcaccagtagacccttcagaattatgcaaattttattgcttgaatttgttagtagctagatgttacagaccggatatttgtgtacccactaaattcatatgttgaaatgttaacccccaatgtgatgggatttggaagtgaggtctttgagagtgaaactttgagagttgtagaggaggtcatgaaagtgaaatcttcatgacggtattagtgtctttataagaagagaatgagactggagctcacactttctccctgctatgtgaagtcatctcataaagacagctttctataaactgagaagtgggtcctcaccggaacccagtgacactggcaccctgatctgggacttcagaagaatgagaaataaatttccattgttcaagccacttggtctgtggtattttgttaaagcagcttgaattggctaagatactaggcaatttctatgcagtaaggagttcatttttaagcagagcaactgaaaatagatcacacagaggtggtgaaaagagcggttgggcatggtgactcacacctgtaatcccaacactttgggaggctgaggtgggcagatcactttaggtcaggggttcgagaccagcctggccaacatggtgaaaccacgcctctactaaaaatacaaaaattaaccagctgtggtggtgtgcacctgtaatcccagctactcgggaggctgaggcaggacagtcgcctgaacctggaaggcagaggtttcagtgagctgagatcaagccactggactctagcctggatgacagagtgagactccatctcaaaaaaaaaaaaaaaaagaaaaagaaaaaagagagacatggtaaaaagagagggctgctaatggatagagaactggaagcatagctggccatcatgaaaaacaaacaagatgatggttcaagagaacatacagcaatgcacaacagtattttcggaacaacacagagacctattgatatgttcacttattctctcaggacaagatggttggccaagtatggttaattaacagtggaacatagttaaaaataaacacccttgaaaaactgtcatcacaacagaaaactacaaagcaaatccagaaaacaaaagaaattgacctttgcttgataggcagaagcaaaaattatttcaaacagtgataagaattaatagaaatccaagactgtggagttgaattaggttaaggattaatgggcataagacaatctgatagtgatttgtatgttatcatttaggaagaaaaagcatttgcctgtgttatgctattatcagggctgaatgcagtttagcaaatttaattgctaaacttaaatcatgccttatgatgatgttgacagacagaaaagcccgagggagggtggagagggggttgacatgagctctcatttctctcctgggttcttggtagtactgtggttcttcatggaaatggaagtacaaactattgaataatcgatgtattttgctctgtagttctaaattagagtaaaaatgttatcaatctgttatatctctattactgctatctgaattttgtagccaagttaatcaattcagcaggacagaaaagtagataacagtttccttttatctttgaatttaggccccttttgtctttagcaaactcaatattaccatttttttctgtctttttattccagtgtcttttaggacatggttatttataaatactatggagttaactgtatcattgtctgataaggaacctatttggaaaccctgggccacttcctagtagggaattaactgtacaataattctaatgtgaacctagtgttaatttcccactcagatcctcatcttttggctagaacaatttcaatagtaaagtacctaatatttttgaaataaggaaaatatttttatgtaaaataagttcctggtaaaattcaagcctcaagggaagagaggtttggtaatacacaaagccaagaaatatgaatgcgtacctgggaagcagctcccacaacggctgaggcactcagaggcagagctttctgcttctgtctcatgcgttcctgtgttgatgtggatagtcagcaatatttaaacagagctcctaagaaacatgccacacgggaattcgaaaagaaatttcaatgaagcaatatatgccttgacatcccttaaaatgtagcttcacgtagtcattatctcaaccagttatattatttctttttcatttttcagttctgtcaatcactcctttttcccagtttgacaattaaagatgaaaaatatcttctgtttatatgtcatttttccttttgtggattgcacaaaaggaaaatctttaagctttacttcattttcttttcttcttcacatcataaaaatgatcctttctttgaaattttactttctctctgcttcatcgggctaccttaaatccaaatatgggagaaaatgttttctgctcacttcttaaactttgaaagtttaaaatctcaacttttaaaatcttattttcccaagattaatctaagtctccctccaccacaaatctgtaactgatagaaacttgatgaagaaaatgtcatatattttcttttcttttttttttttttttttgagacagagtcttgctctgtcacccaggctggagtgcagtggcgcgatctcggctcactgcaagatctgcctcctgggttcatgccattctcctgcctcagcctcccgagtagctgggactgcaggcgcccgccaccatgccaggctaattttttgtatttttagtagagacggggtttcaccgtgttagccaggatggtctcgatctcttgacctcttgatctgcccgtctcggcctcccaaagtgctgggattacaggcgtgagccaccgccccggccaaatgctgcatattttctgcatcagcctaagggacaccctgaagtttggcacctcacaggtcaacaaatgagaatatttctgtaaatattaagttttaactttttataaggtttataacgtctgtttaacaaaattataacaactcatactactgtgcgtctgtcctgcctcttttttagaagacagtctacttgatcctccttttgccctttctaccatatagtttttgttttaataatatccacaaatgactcagattttttgaaccatgaaactctcaaagtttaatcagtgagcagaaacgattttctcccatatttggatttaaggtagtccaatgaaacagagagaaagtaaaactgtaaagagaaaatcattttttatgatgttaagaagaaaagaaaatgaagtggcagcttaaactttggaaagatcagacagagagcttaaggtgatctccagaagaaaattgctagtcgaattttctcagataaacatttatgcttagtatagcactactgttagagcatcattattttgagaagaaagttcaaattgtcttgcgtttaggggtttctatgtcctactgcagacataatattaaaaggtaggaaaacatatttggttaatacctaatataatacagtttggtaaatatagttcccttgtcttgtaaatatcttattttgaaatatcagccatttgtataggcccaagggtcttgtgtcatcttcagaattctagttccttcagcccaggaattcaaagcagcaagaataacaccacaaaataagctcataagcttattttaatgctatagtgctggatacataagataatcatctggtgatttttattttggcaaaaaatgtttttataagtgaagattatcagaaaagtgtcaatgagtattttttctggcttaaagaactccaatatgttttcagtgccaaggagaaggacagccttgtgtatttaattactttagcttattttgtcctctggcatgatctgttccctgatttcaccacagtagagcttgctttgaagttgtagaaaaattaaatcaatcacttggatcacatgtgtcccaaagaatgtggcttcccaggtaaaagcaatctttcaatcccctactctcgtttcactttggcatttcaacagcgttgcagaattcttcggcagataatttattttatcccttggtcccagcagctcttattaagagtttcagaattgcctgtacaaggtgcacctttcacattacaagggatcggctcatttcttgatgcttatgcaaccacttataactatgcctacaggtaaacatactgctgtcttcttggaagaccgagaagtataaagaatgtttatgtgcaggtctagctgttccaagtacccaagtgttggtttagacacacctggattaccatccaccttttattggctgagaaagttgccacacctgatttgtaagtttacctgttgcagccaatagcagggccatctcagccagccagcactggatactatctggccagaagtagcaaagcagctcttatttgaaaaaccactgggttccgagttcattactacaggaaaaactgttctcttctgtggcacagagaaccctgcttcaaagcagaagtagcagttccggagtccagctggctaaaactcatcccagaggataatggcaacccatgccttagaaatcgctgggctgtttcttggtggtgttggaatggtgggcacagtggctgtcactgtcatgcctcagtggagagtgtcggccttcattgaaaacaacatcgtggtttttgaaaacttctgggaaggactgtggatgaattgcgtgaggcaggctaacatcaggatgcagtgcaaaatctatgattccctgctggctctttctccggacctacaggcagccagaggactgatgtgtgctgcttccgtgatgtccttcttggctttcatgatggccatccttggcatgaaatgcaccaggtgcacgggggacaatgagaaggtgaaggctcacattctgctgacggctggaatcatcttcatcatcacgggcatggtggtgctcatccctgtgagctgggttgccaatgccatcatcagagatttctataactcaatagtgaatgttgcccaaaaacgtgagcttggagaagctctctacttaggatggaccacggcactggtgctgattgttggaggagctctgttctgctgcgttttttgttgcaacgaaaagagcagtagctacagatactcgataccttcccatcgcacaacccaaaaaagttatcacaccggaaagaagtcaccgagcgtctactccagaagtcagtatgtgtagttgtgtatgtttttttaactttactataaagccatgcaaatgacaaaaatctatattactttctcaaaatggaccccaaagaaactttgatttactgttcttaactgcctaatcttaattacaggaactgtgcatcagctatttatgattctataagctatttcagcagaatgagatattaaacccaatgctttgattgttctagaaagtatagtaatttgttttctaaggtggttcaagcatctactct

SEQ ID NO: 9199 - DNA, 6000 bp, Homo sapiens
accctctctcaaaaaaaatgaaaaacaaatcttccaggctggagtgcagtggcacgatcttggctcactgtaacctctgtaccccgggttcaaacgattctcctgcctcagcttcctgagtagctgggactacaaccacctgccaccacacctggctaatttttgtatttttagtagagacagaatttcaccatgttggtcaggctggtctcgaactcctgacgtcgtggtccgccctcctcgtcctcccaaagtgttgggattataggggtgagccaccgcgcccagctcaggtaatgtttttatagcagtgtgaaaatggactaatatagtaccctggcataagagttttgaggagacataatcattcagaccataacacccatgataactctgatcctccagttccatgagccacagaatcctactcattatttaagccagtttgagatgttcttttctgttacttataactgaaagagaccaactgacaaatgtatacactgtcttcagagtctagatgtggaaagaagtatttcctcttctgctggagtcaaattatcttccaggccttggttttttgtttcccatctaaagatcagtcttttctcctaaatgactgacactgaatagccatcctttcaggagagagtccatttcagacccacaggaagtatgaccttagtctcaagacacctttatcaaaatacaacagttctaatagctgcctaagacttattcagatgaatctttttgttatacaaccacataagcatatggagaaagagaatattttgggaagtacctgtttatgcaacatgttttagcctttcagatagttcctgtggtacacatttggcttgtacactcaaaagatggacgtgaataccactctatcagagtaagttcatgaagcagccctgagagagaataaactagaacccatggggcgtagcgtgaaggacagcctggattgttcctttctcttaataggcttgtaccaactggactgcattttctgtctagttttaggtgaagtagatctttcagaacctgtcctggcccaaacctgaaaatggtcctgaagtcacaatgtctccagaatctaggagtgcctctctgaagtgcttgggtaacaggaatttaacaaaacatatgcttcagtagctacatggtagaataccaattgaattagaaaatgtgtggttttttttttttttttttgagacttagtctcactctgtcgcccaggctggagtgcagtggtgcaatctcggctcactgcaagctctgactcccagattcaagcgattctcctgcttcagcctcttgagtagctgcgattacaggtgagcgccaccatgcctggctaatttttgtatttttagtagagacggggtttcaccatgtttgccaggctggtctcgaatgcctgacctcatggtctgtccgcctcggcctcccaaagtgctgggattacaggcttgagccaccgcacccggccatgtgtggtttttttttttaaaggctgatttacaattctactaaatacttaaatcagtacatttggaattgacagcgaaatgttgacatcagcaacttaatccccgtatctttcaaatgccttttttttttttttttttgagacggagtcttgttctgtcgcccaggctggagtgcagtggcgtgatcttggctcactgcaacctctgcctctcggattcaagtgattctcctgcctcagcctcctgagtagttgggattacaggcatgtatcaccatgcccagctaattgttttttctttttagttgagacggaattttaccatgttgaccaggctgatctggaactcctgacctcaggtgatccaaccgcctctggttcccaaagtgctgggattacaggtgtgaggcactgtgctcggccaaatgcccatatttttgaaagcataactaaatacatgtttgactctttgtggaatagaggtttatagactgagagaagcaaattgtgctatggtttgaatgtgtccccaaaaagttcatgtgtttgaaacttaattactattgtaatcgtgttgagaggtagaaccttgaagatgtgattgggtcatgagggctccaccctcacgaatggattaatgctgttattgtgggagtgggttagttatcttgggattgggctcttggtaaaaggatagcgtcagcctgattttctccttctgtcttgtatgctcgttggcccctgtctgtcttgttttctaccatgggatgacacagcatgaaaatccttacaagatgccagcaccatgctcttggagttcccggcttccagaactgtggaccaaataaaacactattgtttataaattgcctgttctgtgttattctgttatagcagtagaaaaggacttcagacaagctgcattaacataagtctccactactaaaaaagcaacttaaagcatgtgcatcccaacggtaggtgaacagtaatgtcttccttcatatatggaggtaatcatttttctacagatattattctgtaacaaagcttaaaaaaatcctgggaaaccttaaaatattagtactttaaaaagcaatggcctgtctgtgccagggcagcatgtggtccatgctgatcgacagagacactcaggctgtgccctcaggatgaccgagtgggagacagcagcaccagcagtggcagagaccccttgacatcaagctctctgggaagtggagcactgatgatatgcagatcaatggcatttccctgcaggattacactgcagtgaaggagaagtatgccaagtacctgcctcacagtgctgggtggtatgcagccaaatgcttccgcaaagctcagtgccccattgtggagcccctcactaactccatgatgatgcacggctgcaacaacagcaacaagctcatgatcatgtgcatcatcaagcatgccttcgatttcatccacctgctcacaggcgagaaccctctccaggtcctggtgaacgccatcatcaacagtggtccctgggaggactccacatgcattgggcgagcagggactgtgagacaacaggctgtggacatgtccccactgcactgtgtgaatcaggtcgtctggctgctgtgcacaggcactcgtgaggctgccttctggaacatcaagaccattgctgagtgcctggcggatgagctcatcaatgccaccaaggcctcctccagctcctatgccatcaacaagaaggatgagctggagtgtggggacaagtccaaccgctgattttcctggctgctgcctaataaaccagtctgccctttgggatgcctcccccacccccccaaaaaaagtgatgagatttggaaacttctaattgtcccctaatatctagttttccttccttagtactgaaaccccattttccagccttctttgcaatttggtgtagtcaagtgactattttactagcagaatgaaaacaaaaatggtacatgcaacccccgcccctttcaaaaggttcttaaagagaggagagtgttcccttctgtatcctctcttctggtggaatgccagcattgtgacatatttcaaaagtaaattattcagcacatatttattgaacacctagatcctagcccatgtataagagctataggagaacattatccaggatggcatttttggtgataattccatgatacaaaaccttttacttcattatgcctcaagtaaaatgctttttagatttccactgataataactctacttggctgggcacagtggcccacgcttgtaatcccagcattttgggaggcagaggcgggtggatcacctgaggtcaggagttcaggatcagccaggtgaaatcccgtctctactaaaaatacacaaattagccaagcatggtggtgcgcacctgtaatcccagctactcggaaggctgaggtgggaggattgattgagcgtgggaggtaagaggctgcagtgagccaagatcacaccactgcactccaccctggacaacagagcaagaccctgtctcaaaacaaacaaacaaaccacccaaaaaacaaagctcgactttcccccaaacaactaaatggttataggcatttctgtaggaaatttagacggggcttccaaacgctgttaaagttatgttgaaaatccaagaggctgaaagatatctgactataagaaagacgaaaaaaaaaaaaaaagacaaaaatctacgtgaatagacgggagagcgccgagcgaaatcagaagactagttgtattgtgaggatcacctcgggtaaccagcactcgctgggtagccctggtttactaacttcaactttctggggctccatttctgaattgaggggattagaaaaaggcatctctaaagaccctccgttcccgagaaccctcccggagcaccttccctactctgggcagctcgcagacagacaagactgatcggccataggcgaagggaaaccctggtcccccgggtctcgagctccgtccgcacgtaatctcacggtactgcacttcaagtcagcgtgcagaaacgcagcagtgggagcccggcggcggccgcccaccggcaggggacaggagaggcccgtcccgctctgcccggaaccgtagatagctgggtctgaactccggctccgggaggcctgcagagcagcccaccccgtccctcggagctcgccctgcccccggccggccacttgctgcacgccgattggtcgcgaggagcgcccggcgtcccgctgcgcccagccaacgccctctccccgccccctcgcgtcccgccccgcccccggccggccacttgctgcgctccgattggtcgctgcggtgcacacggcgcctcgccccgcctcaccggcgctctatcctcgcgtctgctcccagctccgggctcccggggctgaggtggagccgcgggacgccggcagggttgtggcgcagcagtctccttcctgcgcgcgcgcctgaagtcggcgtgggcgtttgaggaagctgggtgagtcctgtctgtgggtctccggcgccaggcaaccgtagagggctcgcgcccgccgcccgcgcgtaaggaggctccctcgtcgggccctgtccggcccggccttctgggggctgtggggccgtccagccgggttttccctgcgttcggcgccggcctgcagactcgggcccgcggagcccccgccgccccttcttgcccctgcccgcgtcccttcgggccgaccgtgaccgtggcgccgccgcgacccgcaagcagcccggggaggctgccctgccgcgctgtcacgccgtcaggttgcgttcctggggagggctggagaggctccatctcgtgcctttcaccttctcgcgcggcgggcacggaggcgacggttttcgggacgccctgctgcggccgcgacgccctcccgaggccggagcgagggccccggggcggctccagcccttcttcgcccctcccgtttgccccgaaccattgctaggagcctgtgttttctgcacttttctgatttcattcttacgagagtcaagtacagaggcgggaggggaaagggaaggggaacaacattctttcgagaattataaaccttgagctccgttaaataagtagcagcagagcattgtcactggagcagtggtagtcgcgggtaggaccgtttcggtttttagccaataggctggttaaaggtacttaaaacagtaagttggaaggtgctgaaattctaaggtaaatacgtgacctttcaaaaccaaagcagtgagacgggctaggctgggctgctccccgctgcgcgtgcctgggtcggggggtgcggaggggcagggggcggaggcctcggacgggacggggtgggagggaagtggcatccgcatcgtcttacatcgcgctgtaagacccgattttctcttttcggaggatcccatctcccttctcagactcttcatcctacctgcactgtggatccct

SEQ ID NO: 9200 - DNA, 6000 bp, Homo sapiens
ggtggtttctatacatgaatcatagccaaaaacttttttggaaactgttggttgagatagttggttcttttaccccacgaagacatcaagatacacttgtaaataaagctgatagcatatattcatacctgttgtacacttgggtgaaaagtatggcagtgggagactaagatgtattaacctacctgtgaatcatatgttgtaggaaaagctgttcccatgtctaacaggacttgaattcaaagcatgtcaagtggatagtagatctgtggcgatatgagagggatgcagtgcctttccccattcattcctgatggaattgttatactaggttaacatttgtaatttttttctagttgtaatgtgtatgtctggtaaataggtattatattttggccttacaataccgtaacaatgtttgtcattttgaaatacttaatgccaagtaacaatgcatgctttggaaatttggaagatggttttattctttgagaagcaaatatgtttgcattaaatgctttgattgttcatatcaagaaattgattgaacgttctcaaaccctgtttacggtacttggtaagagggagccggtttgggagagaccattgcatcgctgtccaagtgtttcttgttaagtgcttttaaactggagaggctaacctcaaaatattttttttaactgcattctataataaatgggcacagtatgctccttacagaaaagttgtcattttatttctagaataaatctgtgaaccttctaaattctgcagtttaaaaggcttttaaacctttttaaacattttaaattcagaaggagacatcctttgtcaatttgagcttagaaactcctaattctgtgctgtggttcatggagagtccaccacactaagaatgcatcacttgcaaaagaagaaaatggataaaactgaaatcagaacttcgagtatttcgtttgtacaggtagatgctactgtgatgaaacccctgttcaccagcacctccacaaaacagcaatggttttggtcatttgaagagctttcttttctattagaaaagatgtccatggaagatactaagttatcttcagaagatgcatctgtaagccttctgtttaatctctggcagcttttcccctgaaagtctcatttcaaatggtggtgaccttcctgggaagcccacaaaggcctaagtaacccagtgtttatttgctgaaatctaggaaatgacattaatcctgatcaacattagcattaggcgtttatctatgaaaattcacatgctacttttttttctctgtcttgagaaccatgatcctgtcatttccaagagtatttgcacattttcaagccatatatgttcaaggtttaatcgtgctggaaaatccacacttccaccaagttggtcaaatctgattattggacagattcaggcattgacccccactaaggacaggcaggaaatatttccaaatagagactctcaacaggtccccttagataaaggagggaaaaagtcagtggtcccactgccagtgaagccaatagaccttagaatagaaaatacaagtcaaggaaaaggctcactcaggacagcctatttcttctgagttgttctgtggaagcctcagctgaaattgtaaaaccaataatgcacaaagtttctggttcccaggctgatgggcctgaaagtaattgaatcatgaatgtgcccaggacccacgcattgctttgtaggagaggggttcagtcaaatgtgaaacaaccgacattcaacaggcagcatcatgcaggatgcacactttgccattgattgaaagtgtttcttcaataggctttgatagaatatgttactaatctgatgggaaacagcttagggccatgcaaaaaaagaaaatcagcccctggaaatgagtggctaaatcaaagcgaagggcagtagaaggagaggagcggagcaattcatggagctattcagacacaagctataaacattgatttgaagtcagcaggcatttgggattttacatttccagaatattgtgtgtgaattactgcccacagaagatttgggttttcagagagctttaattttctgtgaaatgtgcagaactcactacaaaataaatcgattttctcatatgttaagttgcaggagattaaaagcactctatggacgtgttatgatcaaaagtgaacgcgcagccaaagtctgtcacacttcacagtgcccgtagaacccgcagaaagtttgcctgggtatcataggtacatatccagtaacattcacccaaaggtcagtgactcaggtggaagctgcatacataattaccctaaaaattattcaggaagaaggtccactatgaataacaagtactcttccctcctgcctctctggcctcctgattctaaagtagaacagggagtagaacgtggaggaaacttttcaagtatatcaccactcttggcaatccttaattcacatctgaaattctcactccgtgactcaccgaaagttacatggcaatcaggtagatggatttgcttctcacatacctcattttcttccacaatccttccctgctgttcgtgaaaggtcatttcaatcatagctatgtttatgaaagacagaaggaaattattcacaagtgattgaggtgtgctgcctgtgcccaccgtttctccttctttcaggattctgatgagggactcggtgacccttctacacagcgaacgagtgccaagtagatgcagtggccactgctcaaatccctctttcaagagtgtcagggccctcctggctgacatttgtactctggcagcgcagacttttcagtgtttttaacttaccatgttgtcttttctctgcctagaaaatgatctcattgtcccagcccagccctgctaaccccacaatgaggtccacgaggtcctgctcacccctgttcaaattccagcagctacctctgtgcccagccacagaacatgtttctaggggctgcttttcttttcttgagtggccctaagctgtttcttaccagattagtaatatattctatcaaaacctactgaagaaacactttcaatcagtggcaaagcgtgcattctgcacagttctgcctgttgaatgtcggtcatttcacattttactgaacccctctcttacaaaacaacgtgtgggtcctgggcacattcatgatgcagtgactttcaaacccatcagcctgggaacccagaaacttcttgcattattggtcacaataagcgctactgaaatgattgactctttaatatttctcctgcaggtgtctattaggaatgtctcttccccctaagaatcgttgccagctactcccgctgggtctcccatcatgcccccttcttttccattgtatggcatattttcttttttatcgtaattgttaaattgtttgtcttccctgttgaaacataatttgggtggaagtgggattcctggtagccaatggctcatagtagacgttcaacacgcaagtggattggatagatggaaggatagatgggtagatggaaagttggatggatggatggatggatggatggatggatggatggatggatggatagggattttggaggaagaggagtgagcagtcactgaaaagaatagaaaaataatgaggcttgctccctctccctagtcagaagagccagtaagcagcttagagctttaatcccacaaattgtcaggcagctggcgcaagaacagggaaaaagagagagagagagagagagagaccctgtctgtggtaggttatggtcatcagtgaaaaagaacaaaaacctttgttttaaaactctcctcaaaacagatgattggctagagggtgcggcacaaaggaacttgtcagggtgatggagacattctgtatctggattgagcaatgcaagaacctgggtaaagacacagtcatggtaacagctgtatacatctgttgaaaactcatcaaacttatcatatttagaaagggtacattttgcttcatgtaaagtatgcctcaataaagtgtacttgattttaaaatcaggataaaggaaaaaaacattgatcttggataatgggcaggggttggggagaaggtcttaattatcatcatatccttttaaaaacgtttttcaagtgtgtgatgctctgatgacattcttaagacacagcaaggcaaagcagtatcccaaatgagagagtgagcattccaataaatattttctgtaagacactgatatgtctatgactatttgctaaatttaaaaatcaacttggaccatatttactcccttaaagtctaatagacgactaatttcttctatgttcagaacaaatatgttgctactttaagaacagcatacataggtgtggtcggccctctgtgtctaaggcttctgcatctgtggattcaaccaacaatggactgaaaatattccaaaaataaaataaaattaatgaaacaacaacaaaaataaaacaaataaaaaaatgccaggtaacaactacttacaaagcatttacatagtattaggtgttagaagtaatcaagagatgatttaaatcaccatctatgattggctgatatgcataggttatatgcaaatactatgccactatatataaaggacttgaacattcgcaaattttggtatctgcaggggattctggaaccaaaccccatggataccaagagacaactatatataaaatactgaaagaggcatggagagtgattttcaggcctctacctaaagccctgaatattagaaattactgaatttcttctcaggaaggaaattacgccataaaccagtgttgccacacacccagagaacaagatgacccgacgccccagcctggtcatgccacatgagctgagcagtgggtaggccactgagccagtgatagaaatcacaaattacaaaacgtcagagtactttctggaaataagccttcctctccagggaacaacgcatttgacacttgactgggatacactaccggatcctccgagggtgatggttctcaagaaggcagaagcaatggtgaccaatagacctccttaaaggctgagccgctgggcaccttcctactcctctcgaccgtgctaggatgactgcagcagagtccccgagtcctttgatgcaagggtctaggtgagttcgaaggagagccatactaggccaggcagaaaggcccatggtgatggctgtccaccctggtcaggggaattctaggttcaggccatgcggcaaggtcaccttgagggacatgctttgctctaagctcagcttaagtgtgtctgaacccccctcacttcttccaactgcagaagcacatggagaagggggagaaagggttgcccacctcctaaaatgagggcagcgtggtgaagagccccatcatgccccaccaaggtcctgtgtgcagggcagggcagtgcctatccagaaggccagacctctaactgctgctctgtaggacgtccgggcctcacatgcaggctcctataagctggctgtcttggcaagagggccctggtacagcactgtgttcatcacagaaaaccacaccgtacataatttgtaacagacagaaatgcatttggctcatggttctggagactgggaacccaggatggaggggccacatctggcaagggccttcttgccatgacatggtggaaggtatcacaaggttggggaaggaggggtgggcggggcgggaagagagagagagagaacaagagagagagaatccattcataagggtggagccctcatgactaaacacctcccattaggtcccacctcccaacactgttgctttggggattaagtttccagctggcttttttcaaaccttagcaaccaccaaacagacaagcccttcggcctgtcctggagggcgttgaatggcatggcctggagctcaaccaggagaaccgtgctcaggaggaagagaccagaaggata

SEQ ID NO: 9201 - DNA, 6000 bp, Homo sapiens
aattcacacactttttaagcctggagaagctgagtcatttgattactatatggcttacttactatagattgtgtttgcacttgaattttcaaatttgcaggggactttccagattcttctttctccatgtcctctaccttttccttagattttgtcctccacactttgagacatgaagctaaccatggctttgttttttgtttttatgtttgtttgttttttgtagagacaggatctcactatgctgctcaggaatggcctcgaactcctggaatcatgcagtcctcccaccttggccttccaaatgttgagattacaggtgtgagccactgcacctggcctgtttttatcaatgacaaatgtgaagccaccagatcacactcaatgcctgtcctggaaggggacgcagttcttataatcacaaatgaggtttttttgtttgtttgctttttgaaatacgatgttgctctctcactcaggctggagtgcagtggcacaatctctgcttattgcaatctatgcctcccaggctcaagccatcctcccacctcagcttccaaagtagctgggattataggcttgagccaccatgcccagctaatttttttttatttttagtggaaatagggtttcaccatgttgaccaggctggtcttgaactcctcagctcaagtgatcctcccacctcagcctcccaaagtgttgggattataggcctgtgccatggggcctggccgagcattttctctgtaattccccgtgccaccattcagctactctgctgtgtttgtttcctggggctgccatgacaaagcaccacaacctgggaggcctgaaacaacagaaatttattctgtcatgattctgaaggctggaagcttgaaactaaggtgtgggcaggctggttccttccagggctgtgagggagcatctgtcctgggcctcctgctgggcctctgcgggttgctggcgattctccgcgggttgctggcgatcctccacattccttgacttggtaacttctcgctccactctctgcctccgtctgcacatgttctttctatctccgtcttcatatgcccatcctcttataaggacaccagccctattggcttaggggccactctattttacgtatgaccttatcttaactaattacatctgcaatgaccctatttccaaataaggtcacattctgaggcactgggagcagggaagacttcaacatatctcttttgggggaccaggtcaatccattgcatcccctagataaagtgttcccacagaacacttaaccataagtcatccaacaatcagctaaggcttgaggaaatgtttgtatgtccacctgggttttttggggtattgtttttttgttgttgtttttgtttttgttttgttttacttttctagtattttttttaatctcagatgacaagtttttaatgacctgcaccttgaaaaatgaaaaacaacaacaacaaaaacagcaacatagcaaacctgcctgactgtcttgtcgggaaaaatcgctctgaaaaggcactcatgtatttaagtaaatgaaactcatttcatttctaaatgttgatctactgcattttaaatgaattctaatgaaatttggtgagttgaaatgagagagataatgcctccagaaagggttttaatttttgtggtcatggtgacttaagtttgtagttttcggtaaatcaataggtcattcaatcttactgagttgaaaatagcctctgttagcatttaactgcatccatggttttcatttgtattcacataaacttttcttcgaatcagttcttgttataaaaaaatagatttttatttcttcatccaaaagagacaggaggaattcatggaacgtgtcatttccgtgtgattttgagtaagatacttcacattggttttcctaaataacaatagcaagcagtaactatcatgatagtaataagtcgtagtcacgtaagtatcccgtctctgcctctcatggaaagagtgcatcaaagactctatgcggatggtatagaaagtcctcacacatttaaaatctagatgcctgccagtctgaaaaataacccaaggaaagttacagaaagtttggaatagtaatgaagaaaatattatttttagagccaacaccccacagtatagcccatgtgaaatgaatatgaagtggtttttccaaggtattgcttgatcgctttctcatcattcttacatatttctgtaagaagatgtgctaaaaatagcccctctaaagtatccctaagcttcttgaaaagatatgcgtttgtttcgcacatgattaagaaacacagtgtccaagatgcccttaggaaatactagctgagtccgggcacagtggctcacacctgtaatcctagcactttgggaggcagaggtgggtggatcacttgaggccaggagttcaagaccaacctggccaacatggtgaaaccatctctctactaaaaatacaaaaattagccagacgtggtagtgggggcctgtaatcccagctactctggaggctgaggcaggagaatcacttgaacctgggaggcagaggttgcactgagccaagatcgtgccactgtactccagcctgggtgacagagcgagattctgtctcaaaaaaaaaagaaagaaagaaagaaagaaaaagaaaaaagtaatactagttgaagttacttcatgcagatacatcatagcgtaagagttactttcttttctctgtgttaggtagttttgctaatatgtcttatctaaatgaatccaaatctcccctgagtttatttttagttcctaaattcaagcatttatgattttgtttattttcttttgtttgagacagagtctcactctgtcacccaggctagagtacagtggtgcaatcttagctcactgcaaccttcaagcgattctcctccctcagcctccaagtagctgggattacaggcatgcatcaccacacccggctaatttttgtatttttagtagagacggggtttcatcatgttggccaggctggtctcaaactcccgacctcaggtgatctgcccacctcagcctcccaaaatgctgggattacaagtgtgagccaccatctccagcctaaagcatttatgaaatagctaaacagtaatgaagaggccatttggttggggtgacagtgaggacattcaggtttttgaaccagacattttctgaagtggctgaacatcaacgttgaagggccaatgactatgttcatttgaaggtggcacttcatttttctctaataagtttacagaaagcaaatcaagttttacgctgtttctataatggacccaacatcatgtcagagcatttgagggcaaacatatataatggctcgttcccaaacatctcgagagccattcagaccacatggcaggcaaaaggcactggtggccacatcctccaattctctacctgcacagtagggctcagggcagttctgggtaaagaaacttccaccacacacctggcttgtgccccagctccccgctgatgtcctccacccctcccatctggggctgacatttctttcaccaaggtgggtagacaagggccacggagcaatgtgtgtccataggaaagctttcatcacaggggctgattttgcaagggatgaggtgacagtagcaggtgagactgctgagggttaaggagagtaagggactcaaacaccccacccatcccatccctgcacccctccaagaagcctggtctcatatgcagcatccattaaacttatttgactagagacaccccccaccaccgcctttaccaaagaagaacttgcagtaaaatcactttggcacagtcacttggaccaatggtgagatagggtggcctcgtcccacccccgcacccctccaagaagcctggactgacagaggccccagcacacaccctgaagaactagagaaaggacttctgaagataggacaaagtgaaggatgaaacagacatgcccagggagggaccccaggcagtcaagacgcaggctggtaaacaacacgtccacccctcagtcctggccaggcgatccccatggccactgctgttgaaatgatgattaatttggagccaaagttgacgcagctggggtccaggtgggccaggaggtgagcaaaatgagggcaccctactgtgtgctccagaaccctgcttttttaaagaaaaacatagctcagagaaaacagagggagacaacataaaagtttatatggacacacacagaaaaaccccctcccttcagagctggtgatcctgaaaccagagccagttggaagggcctatagcagctctagcatttcacaattgcctttcacagattttcaaaattctttaccgctctgtcgttttctgatactctctctgctggggatgaagtcgaccaaaactctaaggtttaatgactgccctattggatttcgaacttgcatggggcctgtagcctctttgttttggtcaatttctctcatttggaataggggtatttacctaatgcctgtacccccattctatctaggaagtaactaatttgcttttgatgttgtagattcataggcagaagggacttgccttgtctcaaacgagactttggacttggacttttgagttaatgctggaatgagttaagtccttgggggactgttggaaggacatgattgtgttttgaaatgtgaggacatgagatttgagaggggccagggcagaatgatatggtttgtctgtgtccccatccaaatctcatcttgaattgtagttcccataatccccacgtgtcgtggggagggacccagtgggaggtaattgaatcatgtcggtggtttccaccatgctattctcatgatagtgagtaagttctcatgagatctgatggttttataaggggcctcaccctcggctcagccctcattcttctccttcctgctgccatgtaaagaggatgtgtttgcttcaccttctgccaggattgtaagtttcctgaggcctccccagtcctgcggaactgtgagtcaattaaacctctttcctttataaattacccgtctcgggcagttcttcatagcagcatgagaacaaactaatacagcaacccactctatctcaccattgccaagtccaagttattgtgccaaagtgatttcattgcaaattgttctttggtaaagggggtgcaggggggtgtctctagtcaaataagtttagcggatgctgcccatgagacatttcctgggagagtcacgatgcacattgacacgtttccagctatgagaagtcctacagtcacgcaggttttcttaaacatatttgacatttgtgtcctccacacaagacatcctgcaaatgcagcattccaagatgctgtcgttgggaaactcagccctaaatcctgctctcaggtgcagctaagccacatactccccacccaggattgtacttttggggttttgtgaacccaaatgcaggacccagtactgatcctctaacacatcttgttagattctgccttcccaccactactcagcctgtcgagggctttctagagcttgatgcttggaaccctatttgttttggatccgtatctctctagcaaatcttcccacatgcacacacgtggctgcaggaaaatggtagcccacaggtgaacaccagttcagccctgcatgggctgctccccctgggaggccaggcttgggctagttccttcctatacaaacagccctgcagggcagggcgcttccggagcatcacggaggaattttatgtggcttccagggagatgcgttcagttaaagttgtttttcccttgaaaggccccaaagtgaaaagtagttgcggggaagttgaattattacctaatgccagtagcagctgctggtaaggaagaaggaaagcaggttggggagcttgtgtctgggagttgggggctcattaacactcacttct

SEQ ID NO: 9202 - DNA, 6000 bp, Homo sapiens
tacaaactgatacaaccccttcagaaagtaatctgacattattttgtaaagctgatcattcataccccttgatctagcaatcccatttctagcaaacagcttactatagtgatacggcagtatttctttctcttttctttttcttttgctgctgaacaaattaacatggtggtatttcaaccttttttttttgctcgcaaaccaccaaaagtgctttttaaaattgcataccctttacccattaagatgacatttaaaaaatatcaccataagattaaataattgcaaagggtgaatttctagaacatcacagtaacattttaaagtaaaactgattatctcattcttttaaatgtataattattaccagcatatggttggccaaaaaatataccctgataacataaaaaaaaaagcaactttattggaaatatctctcttaaggaaatggatggggaagtgccaggattaaaagaggctttccctaacactatagtggtattttaaattatccctttgtaggccaggcgcggtggcctgtaatcccagcactttgggaggccgagtcgggcagatcacctgaggtcaggagttcaagacgtgcctagccaacatggtgaaatcccgtctctactaaaaatacaaaattagccgggtgtggtggtgcgcgcctgtaatcccagctactcagaggctgaggcaagagaatcacttgaacttgggaggcagaggttgcagtgagccgagatcgtgccattgcactccagcctgggcaaaaagagcaaaacttcactcaaaaaaaaaaaaaaaaaaaaaaaaaatccctttgttttccccaagggagttttccccctttgggcaatgccatagtaagattccacaagaacctgtggtttgcctgtcttatgtaaagtgcaatgttagaaacacaaggtaagaaagtagcactagcaggaggcctcaggcattaccatttttaggaaagagtacctatggaatgtaatgatctagaaactgattcattaacatcatttgtacccacacattccttagcaaatcttcattactcctctggggctcatataccccagtgtgaaaattagaaaaattcttacaactgtgaaccaaaaagtatataacttcataacagcaaaacctagaaacaaccaaaatgcccattaacagaagaatgcatacactgtgttatattcacacttggaatattacacagcagtgaaaattaatgacttacatctatacccaatattagtaactcagaaacataacatcaagtgaaataagcaagtcccaggaaactatacccaatatgattttttccactcaaaaacaacagaaaccatacaatacatttttgagggatgtatacatatctgataaaattatttttaaaaacaaggcataatatacacaattcaggatggtagtcacctctggaagtaagcacattcaatactggtcattttgattattggattgagtggtgaattcataggtgttcattttattgttctgctatacagcttgcatatgttttacatatattttgaatttatcaaatactacaataaaatggagaggaaaagaaaaattttttaaacattcatcataagaaaaaaaatacttttaattaaatcacctcacctgccactaaagaggtacatatttaacatatcatggaaattctatctatacatcaatcataggatctgacatacattaggtatacaacaaatgttcattggaattaatcttatgagaaccaaaggagataaagactaagccaattagctataagagataaatccataggctgacacagggctacaagagaagccaaggtggctacaagcaaatttagcagcaaccaaaagtcataaggaagctggtcagtaaagagatggcaaaaatgtaaagtctcataacataaagtgttagcagggttgtgaggaaattgtgttctcactcaacaccagtgacagtgaaaattggtacaaccacttcgagagcttctgtgatacttggttaaattgaagacgcacatagcctacaatccggcaaatctactacttaggtgtacttcctacagaaacttccaaatgtgtgcacaagcagacaagtacaaagatatttattgcaggactgtttttaagagtcaaaaactgaaacaagttcaaagtctatcaacaggggaatgtataaataaatatggtatattcatacaacgcaattctataccagcaattaaaatgaatgaaccaaagataacacaatcattcaatttgttcatatataaacctcaaaatatgatgctgagcaaaaaaaaaaaaagcaagttgcaaaaaggcatgtatattttaatgccattaaagtttaaaaacaaacaataatatatattgtgtatggattcaccttgatcaaagtataaaatatgcaaagtaaagatatacacaaacctcaacgcagtggctatctctagaaaaggaggggaaggaactgagagcaattttatttctttaaaaaaaaagagtatctgaagtaaatttggcaaaagattaaataatcacgtctgtaaaatctgaatcatggattggttagctccccctctgtatttgatatctgaaatattccaaaaattaaaagaaaaaaaggaaaattagacaataagaaaattgggcagaacaaagacaccaaaacgcagcccttgagcgcagagcacgaaaccttgagcaatcggagcagtagctgggtctctaaggggtttgaagtttcttaccctaggtatccttatactatatcccattttccttaggataaatcgcaaatttcttgcaacaaaaaatgtcctaactagagtcgtagttataaggaaaaggctctctccggaggagtaaaatctgtaaaatttctaccttgtttccctcgccaggatcttgggcaaaatggaaagagatttaggtgaatgccataaaatactctataaaccattaaatatcatcaagaacgcctaaggaccgcatcgcccagtaggagagtgcatatattttgaaaggtctctgcaactgagggggttttggcgtccagggcgccactggaaaaggcacggcgcactggtaccagcccaaattcacctacgtctcggcttcattttttatctttgatccccctattctgtctcctgaacaggctggctgaagaggccacactggcagcgtcaacactgcggagcagctggccagactcgatcctgtccaccccccttcccattagcgtctgtgggagagaatgctcagaaagaggcgcgggggcgaggggagcggcgaggttacccccctcctgggtccgttccgtggggacaggccctggactggactgccagttcacacgaaaacaggtggcaacagagtcgtgacacgcacacacagcaaggggtgtgcacgaacgttcacgctcaccaacgaaacctgcacacaagagatacccactcgacagaattaaatccgcacacaagagatcacgcactcaacaggacccatgcgcagacactctgcgtcactcggagacacgcaaggacgcacacttgcgcgagcaaggctctaggcgggggtcgcaattgcagaaggcgcggccacgcgcgctaggggacgcgcagcccacagacaggggcagtaacacaaaggggggccacctgcaaggccgagagcgcccacgcagccgccagggagcgcggacaccgacacaaaaggggcgacgaggcgacacgcgagcgcctccacccagcggaggtgtcagccacgcaccggccgaggcacgggcagcggggggttgcgcacaaagggactactcacaccctcgcaccggcatcccagggcctcgctcgcgaaggggcaccagaccaagggggcaaacccactggggtaggcaatggcggccacaccccctcatcgcgcgggacccaacccatgcagacacagtaggcacctcagcgagggacgcgaggagacgcgcacacacccacactcaccacacacccacggagggggtgtggaaggccccgctcccccggcatctcggctgcagcgggacaaggtgacacatccgggagcccggcagcgcgccgggtgtgcactcacccgggcccgccgcccgcgagcctcggacgcgggcagcagcagcagcagccgccgccgccgccgccgccacctccggccctccacgtcagccgacggcgggagggagcgggtggcggcgttgaagcgaggtgcgtcacgtgggctggcagcgcgcgtgcgcagtcgcaccccaccgccccctccttcgccgtcgcgagccgcgggatcacgcccgcccccgcgctcgctggctcccacccggggagggtcgttgtgcgcctgcgccagggtgggggttgccgtcgcgcctaggcctttccctcaggttttcctcttccccactgcggctccccagtcggcgcttgcgcggagaactcagcgctgaggtggccgaggtgtcgggaggggcctgggtgggcgtatgaaggacccgaggtcgagggcccccccataccccgcctcgaatgagaaatagaagtctccacgaatgggcagggcccggggcctgggcgccgcgacctagtaggcccgcatgctggtgggcgccgcgcgagccttgttccctgccctcccctcccacagggaggccacgcttgcagagctggagcgcgcgtctatcgccccagaacccccctccctgccctatcctccgccaccccttctgttgcggggcgcgcgccagcctgggtgtctgtatgcgctcgaggcgggggcgcgggttgcggacggaggcgcgggaggcggttctgcgcggcgggggccgtacccgcggcggagcgaggaggcgagaatggatcaatggtgccacggagcacatcgctggcgctgattgtgttccttttccacagattgtctaaagccccaggaaaaatggtggaaaattcaccgtcgccattgccagaaagagcgatttatggctttgttcttttcttaagctcccaatttggcttcagtaagtactttcctgatggatggccaggggctttttctggcgttcagtgacaagggaagaatacattggttagactgtgcacacatgaactgttgattctttctccctatgtctctttttaagaaaatctgaagggatctcgtgtttgctgagtgttccgtgtgccagcactagcctaggaggttttagtctctacaaatatttatacagcaccagacgcgatggcaaagtggataaagcctggtccctgcccttaaggaggtcgtggtcttgtggaggagacagatgggtaaatctacagttaatgctcagtgtgatgagtgtcagggagcacggtggagagacattgaaaccagactggaaagtcaaggctttctacagaggcctttccccctggcactgatgctgattaggaaagagtaagagggagggaagaagtggaaaggccttgaatgagggcgtgagagggtttggacccgaggagcttgtgatgtcaccagtgtgccctgcgggatctggggaacaggagaagtaggccagagaagtcgggttgaaaggtgtgtcgtttgcgtcctggatctcccttaatttaaccccataacattccattttacagataaggagactgatgctcactaagacactaatatgcccactcacacagcaagtcccaagtctctccccaaaatgatttgagaattttgaggcacacaaaagggagaaaattgagtgcccgtgatccaacgttctgcaactgtttggaaaccaggaaagtggaggagtggtagtacttctgaaccctaactaaaatatatcagcctgcaccatcagcacagcttgcagatgaatgtaatggccaggctattaaaactgaagtgaagtgaagaagttacaactgagttcgaattctgactcctc

SEQ ID NO: 9203 - DNA, 6000 bp, Homo sapiens
ccttttgaatgctaaatgtctggaaacttcaggcagggtcctacaaaacaaactgccatcaagattggtgtgtaccatgaaggcagttttagatagtttgactgttcatggctgcaagaaagacctaaaattcaagggcccgtgaacttcagatacgtaaaaggaatatcacttctgttctagaagagtactaattagacttgtttgtgaaatttgaaaatttggctttgagacactggtaacaaacatatctgagccctcctaagtttggtcagcacggagtagtagctctggcatcatgtggctgtgtagagctccagtgtgatttcaagccccctctaaaaactgccttagtctgcatgaagtagttaactctccaaagtgctttttgtctggcaaatcccttcacaattttcacctctcgtctaaaagcttccttaaaggaagccttccttgatcccttaggctaggttaggtttccagtctgtgttctcatagcactctgcactttttggttccttaaagcaactctgtgttattttttagaattttaatctgaatctcgtgtgtcacatacctaggtcagaaaatactggaacaatgaagttaagatttagtaattcaaattatgtaaaatgctcatatatatgtttttagattagcagctttatgatgccgatgctgaaggaacttttcaccccattcttacaagtctgctactgttttaagtgacatccttatagttgtagataagcaaatgtaaggttatatcaatgtgaagaagcccttagtatcacattttaaaatttatcatttagcaatatgacttttaaatttattgtttccgaatgagtgttgttgaggaatgttagcagtagtaaaatcttgtgttacaagatttttgcatttacatgaactttcactcatttttcagaatttgttcctagagacagagaacccaatacaaaagtgagaacatgtatgcataatcagaaggatgcagtgcagatgcctagtgaaactctgaaagcaaaaatggtacctgagaaagttccccgcagatgtgctactgttgctgcaaataaaataaagataatgagtaatctaaaagaaacgatctcaggaccagaaaatgtctggattaggaagagtagcagaaaactgccccatcgaaatgcttctgctgcggctaagaaaaaattactgaatgtttataaagaggatgatacaaccataaattctgaaagtgaaaaagagctagaagatattaatagaaaaatgctttttttaagggggttcagatcctggaaagaaaatgcacaatagtgactatgagaatgtagaagtggcatctgaaaacaattggtacacaagtaaactggcagttacattctgctcccagctctaaaattactcccttattggcatctttggaggaattttctaaaagccataatccagtgggttcctcccagtcagctcttgtacagacatgtgctctggggaattctgaggaggaaataaattgcagagtctgtaggtggagaggtggaaagaaaagacaaatggcctgctataagactactattcctttccagaatgcaaggccttgaagacatgattccttagaggaagaatataatgggaagtgtacaggctaggaagaacttgaagtgaacaaatttcaaaatcttaacctgatgctaattttcagggttctccattacagtgtaaaaattcagaccacgacaactatggtgtcatgaggaaaaaaaatcaggcatttttccaaaggaagtgctaatgggcctatttgacttctgagtgaagcaaaaactacccagatccattccctacaattcacatccccaaaggtcaaaaacaaactaggaggacctgggaatttcagctggagatactgattattgagttctgaagtagagtgttggaaataggcaattagagaaagtccattgatgtcattttgtttataatattgcagttcatactgaatgaccacttgatatgactaattcagggaatatatatttttctatgaaagctatgaatgttactatcacggcttttccttatttttacttgtatgtagcagcatttacagaaatgccaaaaatgtgcctcattaagaggcaggtcttaatcagttagataaaaataaaatgtatagcttaagatcaaaacagtcatatttttagatacagtgaaatcttttatgtttctctacagcaccttaaaaattagaacttgaatactttgagtaaacttactacaatctcatcccaacaaactttaatggtagcatgtttggcctatttcattgtggcctgtactaggattagaaaatttggtcgtggtataacaaagaagtgtatttacaataggatttaatttgttgttaatatgtatttgttgaaattaaaattgccagattaaatgaatatactgtcgcatctttttaacatagtaacgtgttactggaaaaattaagttgttgaaagtaagttgttttcccatttaaaaatatctgaatatatgatttgcatgtgtaaatctgaaaaactaaactacagaaacctagggttttctatttcttttttaagtcaaatgcatttttttttttttgttatacagatgaaccaagtgtctaaaatacttgagaaatttgtggttgcatgtctgttttaaaaaaaaggctttttgttttttagcataagccagaatattctaacctactaagtctgtgtcctttgctccttttgtagtatactttcatctaaattactgatccccaatatgttgatacacaggtgagaaagggaagaattcctaataaactgctattacttttaggtgcatggggtttgatttttgagctctaatgaaatgcttaaacttctttccagttcaaattttacacttaatttataatatttattgagtatattatgtcctcaacaagtaactataaaatgaaatacttaactcggtgaagactattttatgcaaagtttttttttttttttttttttttttttagcaatttcagtgtaatgaaagaatttaagctttgaatttataatttgctgtggtggggttaatttctgtcagtatttgagattgtattatcagtcttgcataatgaaatccttttttggctaagtatttaattcgaacatatttgcctttttaaaaagtgcttggcctaaacttattgtaactgcatgaaataagcatttgcttaaaacttaacattgtaaaattgttctctctgaaatgtgtgcagaatttaaatcatggccaaatgtattactattaccctatttacagtaatttgctttgcagaaaatatttcttcatcatggaactgtgaaatcaaattgaagatcttactggtaaaaatgacaaattaacaaaaggactaagacaagtggtgcccaaacaacctttttattctgcagttccatcatcataatagaccagttaacccaggagtcctaatgttttaaaacatcattgtggtgatcttgtttattctatctcactaaggatatccagtttcctaagctcttactggctagcaatttcgtcttaattttattgctaaatgttcaaattttgcttccaaactcactttatttttgcagatgtgtacatctgctaagtactaattttatgtaaatgattttgttgattatctttccacatcttaaaatgtttctaacagctttgagattttatctcaacaggctctctctgaccccaaagtagtacttaccttcgtgactactgacaaagtcacaaaatgcaggcgatgtcatgtatttcggtacaactaaatctaggaaacggttttttcattgcattactgcatattttcattttcatttaaattatgtcccctttttctcttgcttgaaacagtgctcctcgaactttgtcttccagcacattttaaagagaaccaattaaagaacaatcacacattctgcttattaaaggctatttaaaaagaaacattttgtattagaaaatggccaactttaaaacactattttttacactcataaaaatgttttttaaatcgccttgacaatcatcagcttttgaaatgtgaattcctattgccagagtaaaggtctcgtttttataccaccacgaagcgctgtatttcttgctgcccttgcgtccgcccgtgcccgctgtctgagggcgcgcctggctacgggggccctcagtaccaccgcgccgccacctacctgggcagtcgaaatttggagcgggtgctcagtacactaatgctaccccagtctctcctaacgcagaaggaaaatggaaacggacgatgaggggacggccccacagctcccggacgccacggccagcggcgctggctccgcccctgcacccctggttccgctaccgccacgaacggaggccccgccctcctctcgccccctgcccctctagcccgcagtcctcccacctcctggcgcccgcagggctcaagctgcgaatgaaagcctttgggggccggacgcggtggctgaggcctgtaatccaagcactttgggaggtctaaggaggacgatcgctagagtcctggagttcgagaccagtctgggcaacatagcgagaccccctcccccaatctgtaatttaaaaacaaaaaagctgcggggactgctggcccagggcatgacagcgcgggcgggcggtgtagagggcgtggccgcgagctcagggtgtgcctgggagcgagccctgtgcggggcgggacgtagcgcccgcgcggtgggggtgtggccgcgagcttgggctgtgcgcggagggcgtggcctgtgcggggcgggacttattgcccgcgcggtgagggagcgtggtctcgcgcaagccggcgtgcggtcccgcggcgctgcagttgtgtccagccggtcacggggcggctatggcggccacgttcttcggagaggtggtgaaggcgccgtgccgagctgggactgaggacgaagaggaggaggaggaggggcggagggagacgcccgaggacagggaggtgcgtctgcagctggcgcggaagaggtgaggcaccgggataagggcagcgcgctcaccgcagctggaaggtgcgcgggcctggcagccgcgacggcgcctaaggccggggctccgcggtcttccgagtggcccccgcggttgccgccgctccttggctctgcttgggccctgggtctccgtgaagccgcggcgtccagcggcgccagccccaggtgtgtgtggttctcgcgtggatctgctggcgtttcgtggagtccagggtgaagccgctgtgggagggctgggttcaaatccgttctttaaaggctttctggagcgtttctggagcatttctggaggcttggtgtcttgcggactcgtgatcttcccgcttgtcacactgtcttgggccgcagcgctcccgcgggccccaccacgtttgtcgtggattgttcacggacacaccaattccctcgaaactttttaaacctgcacccaacacttcaattagcatgatgtgtcagtagccgatgaacacgctttaaaaaaattgtttccaaacacaaaaaagtgggagaaaatagtcaagtgagccctgacccctacacaaccgggtaaattcaacaggaagattttgccacgtttattttctctcccgccactcctaagcgaattccagtcatcatggcctttcacctctacatttttcagaatacatctcaaacgttttagggattttcttacatatgctattatcacccctaacaacactaatactaattttccagtatcattttgtagtccatgctcactcacgtttacctagttttttcaaacatgacattttacagtggtctgcgtgaatgagaatcctaacagggtccacaggttacatttagacgtgtcacttcatttagagcaacctcctcttacccctcctaagag

SEQ ID NO: 9204 - DNA, 6000 bp, Homo sapiens
gacacacatgtacagcacacacacaggcacacacacaccacaccagctagttgaattagatgtgtcaactcccgattatataatttatcttatcaaattgttgtcactattatttgaatttcccacttgattgaggttagtagatactgtgttttggtctttttttttttctttttttccacacagtaaggcatgtaaagtacataaggcttaagtgtacagcgtggcaaattttccatgtgtattttcctgtgtggtgtttacccacacccagacggagaacatttcaagcagcccagaggctccccggtgcccaacccggttcatcctcatccatctttagcccccacagggactactataacaacttgtagataacagacttatgccaaatatttgttgaaggactcaatcagttcattggaggaagaaatgggtgggtcgctgctgacattcttgatcatctctgccgtttgcagttctgagaccagaggtgtggcagtgtctggtttcaatgaatcaaaacaccctatagccagagtgaggctttgccaagtaatgtgtttcctcaaaatgtttctataggttcagttgtaggctgttatgacatcatgtagtggttatctgtgtaaccttctcagagccaactcccatatctcattgaatcctctcaacaatcttctaagatcggaagggtgggtatgattactcaattttccacgagaagaaactgagactccaagtaaagtctgagctccttctctgcacagggaagcaccatgatggtccctgatgcacacggctcaagagagttataaagcaagatgctggtgtcctcacccaaatctacagaaacccttctctgccccttgccatttgacttcaggcatcttgatcctgttggggtttaactgtattcccttctctccaaaagatagggtgcaatcctaacccacagtgcctcagagtgggaccctatttgaaagtagggacatcaaaggttgcaaatgtaataagttgaaatgagatcatactggagtagggtgagtctctattctaacataaccaccattcttgtaagaagagtagagacgcccagacacttgcagggataaagaaagccatgtgaagacagaaggtgagatcagaaagatgcagctgcaagtcaaagagtgccaaggatggcagcaaccactagaggctggatgagaaaaggggaagctctcctgcaggttgcagaagaggaggttcctaccaacaccttggttttggacttttagcattccaaattctaagacaataggttcctgttgttttaagtcacccagtttggggacgtttgtttcagcagccctaggcaactaatgcaggtcccccatgggaaactccttattgccttgatcagaatgaaccccacaggtccagcaggactgaggcttcccacggtggagaccttactgcctaaaatgccctccttgctcatccctggcaacattcaacccccaacccttcctttagcacaaggctcaaaggccattgcttcatatatgctcttcctggttctccaacagaaaacagaggagtaacagatgctatacttggatgatgtaacctggatgatgtaactcctcaaatgtgcattgttccttatttagcatcagtcaagtgagcaccaaggtggcctctttgactttacctttcttcccctaggatggctgacccagagctgcaggaagacagaactggggaagggaaaagtctggatggaattgtttcaggtcaaaggttgatcttccagaggctacactgattaggaatacaaaaggaggaatcactggaaacctaaggtattttataaagttaacttttccagatgtttatactctcagggcagaatcccctgtccttgactcagttttgcatgttgacatcttaactgaatttgaaagctcaacgttcttgccatttcctctgagacttctatatgaagtacagtactcactttccctcctaaattaccatggcgctttatgtgtacacatgtgtgcatatctgaggacaggctccgccttctacctgcattagagatctccattccagcccacaaatacttaccgagcatgtacttgggccaggccatgaggataccttcctgaacaggaaagagtgtctggtctcatggaactcacagtttagtgagaaataagtatgtttcttactgaagtctattacgtaaatacatttgaaaagacactggtgcatgtgttaggcccattcaaggtccttcacccattcaccctgtggcagatgcattaatagacaaccacggagaggtgcactcacacggggtcccatctggtcccaggcaaagaagggcctgcacttggggttgaattctctgtagtcaccatcttgaaatgtttaatgatatcacctctgttttaccttttctaaatccaatgggacaatggagcatgaagagggcttggagccttggcttctgtaccatcctgctacctgccacctgccacctctcctttgggagaggttcttggctgtccacttcccaaccccatgttcccccagctcttgagcagcctctgcccctgcaattgttgctgcttcccaacagggtggcaactgcatcattttggaacagcaagcctgtgttctgccaccacctgccatctctggtgagtgtatgggcatgtgtgcaggacaagcactgtgcaggagttcagagaaaggcctcgcagtgaccatcccctcagcaggctggcagtgccagggcacattccacaagtggccagaggcttgtgcccacctccaatccagatacccagagcttcccagcatggaggttgcaatccctgagggatctcctgtccactgtacattgggacagtgggctgtgggagagagacagtggcttccccaccccctaactgtggctggccacagcatgtgggtgcagccaagggcagggaagcaactggcaagtggaagcctcttgtactgcactgagtcacctggaaggtctgtggggtctgtacaggggtgcattcccacgcccaaggaagagcagcatgtagcagaaaacaccatgactggttgagagaggcaggaagaaaggaggaagtgttctgttttagcacttgttatggtgcttctttttcattttgagaaaggagctctccattttcattttatagtggaccccacaaatcatgtttccagccctgctcccaaactcagtaacagttaaccacagccatcgctaactacagtgaccatgtgctgtcaacggatggaaagatcttcacacctctgtgagttaagaactgtgataatttccagtctgcatatgaggaaattgaggctcgagtcacatgcagaagccccacatcggggtagtggaggagctgcaattcgaccctgggtttccctgaccccagtgcctgggcacccttgcaggtggctagtgtgcaagtaagaattaatgaataggtcaaccagccagatgcagggacagaatcaggcccatcccctgccttcctgggttgcatttgggaaggaccagggactgagcacccagcatttgcaaagccagaggatgctggttctggtgcgtggtactgggggctgggcctgcgcagcctgagtgggcggcagcacgtgatcacctgcagctgcagagccgtggtgagccaggcagcatcaccggctcagctgacccttcctggtacacagggcctggccatcttgtgcccaaccctggtaaagcaccattttgtttctgcctcaccatttgcttctcctgtgttttgtgagctgtctgagatgtgcatcattcttctgtatttggagggggacatggagcccagttaggatacctagtgcctaggaaaaagcctactcaatttcccttgaaaatgtctcccttgacccccaccgaatgctttttttcagtcctgattgtcctgactgtgagcattccatcctggcttctacactggggtgcattccagccctgtcggtcattatattgcaaagtgatggatagatgtacgcccttgtgagagctttaatttaaatattatcatgacttcaagaatcatacagaacattcaggaaatgttaacatattgacttttcacagaaacgtgaaaggggctatatgtttgggattactcaaattatcagcaatttcaatcagcttttttatgcgccattcagagagcaaaattagaagtgcttgtgtttgcattctaccatgtattcaagataattaaaaattagcccgtgaaatcatagagatctttacagtagcagcaaggatttggaaggagcatttccctctaagcaaatgaactggacttttctgagagtaaatacggaatcggaatccagctgcacattttattaaaactacgagcatttcatgttcacctctccgtggctggccaccttccgcaatagtcaccccggccatcccttattagcaaccggcaggaaaataactaaaaataagcagctgttgaaatgattatttaagcctctaagaaattcctcctgatgactgtgcgtgactgtgcggtggctgcgctctccccggtcctgcctcagttcggctgcacgtctctgctgctgctttaagactgcagagcgccccagcggccagaggcaggggaggggtccctgctcgcctccgcgctcggcttcactcgcccggctcgcaggcagggaaggttggcagagggatccatgtgactgaggccggagcacggcaaagatgagcctgcccgcccgcctgctgcctggatgcggagggtgagggctggcgcacgggaggccgctggctgcgcattctgggcgccgagtgcccgggatgagctcacgcccgcgtctgcggctctctccacctgccgacctgccgggggcccactgagctgacggcgcacctgggctccggccgcagcgtggggcgcggcgcccgggagcaggtgtgcaggagcgcagcgcgcggcgagcgcagccctcgctccggagcccggccgcgccgcgtgcccgggcggctaggcagcggcggcggcggcggcgggcggcgggcgggcggcggcccccgggcaggtgccgagcggcgagcggagccgggccgggcggagcgcggggggcgaggccggcgcgtcgctcgcgggaggccggggagcggcaggggcatgtggatactggctctctccttgttccagagcttcgcgaatggtgagcctttcggtttgtgatgaatttcgtttccttatcattgaccgggggggcgggggggtggggggtggcattggatgcatgggtaaagtcttctttctttttccgcttcatctgtgtttaaaatttcgtgcttttatttattttttaaatatcatatttattttttgggggagaagaggtggcaatggagaggcccgggagaaattgctctgtaatcattggaaggcgcttacctagccaagtgacagctcagagcctaactccagtactagagagctgcctcattcagaataaaccaggtttggtgacagaaggagagacaggaagattgccactttgaatattacaacctggaaagggatgtgacattccaagtgcacgcaagtggaggggtcaatgaggaacatctcccttcagattcaatgctttttgagatttttcaaacacgtaatttcatgctagtacaatgtatctccagcaccaaggagggctttaagaatgttctgtccttctatgcaccccgtgctgcttcatgctcctcacagtcgtttatgtaaaaatatgcactgataagcattacatcatctgaaatgttgacaaattaaaaaaaaaaaaacacctgtatagttgtaaaaatgaaatcagtgaatattgtaaatagcatacatttcctcatgcccagccaatattatattttgaaatgatttcttcctgggtatttagaaagctattgct

SEQ ID NO: 9205 - DNA, 6000 bp, Homo sapiens
ccagccttggcaacacagtgaaaccccgtctctactataatacaaaaaattagctgagcatggcagcaggtgcccgtaatcccagctactcaggaggctgagacaggagaatcacttgaacctgggaggcggaggttgcagtgagccgagattgtgccactgcactccagcctgggtgacagagtgagactccgtctccaaaaacaaacaaaaaaatcaagtggatgagatgacccattctgtagataccagtcagcctttccccagccactcctgtcatcacccaatgggctcatggacaaagtggcctcggtggcagggatggagattatgcatgggctcagcaacatggactcctactgaacaaggccaaactggctacagccacaactgagtgcccatctgccagcagcagagaccagcaccaaggctctgatatggcacggttccccagatgatcaggcagcaacctggtgtcaggtggattacattggaccaccttcagtatggaaggggcagcattttgtccttactggaataggcagtctggatacagatttgtcttccctgcacacagcgcttctggtggaactcacagaatgcctcatccaccatcatggtattccacatagcattgcttttgaccaaggaactgacttctcaaagaagcatggcaatgggcttatgctcatggaatcgactgatcttcccatattccccacccccatgaagcagctgacttgatagaatagtggaatcgccttttgaagatgcagttacagtgctggctaggggacaatgctctgcaggctggggcaaggttctccagaaagctgtgtatgctccaaatcagcatccaatatgcggtgctgtttctcccatagccaggattcactggtccaggaatcaaggggtggaaatgggagtggcaccacgcactattactccaagtggcccactagcaaaattttcgcttgctgtttctgtgactttacgctctgctgacctagaggtcttagttccggagggaggaatgctgccaccaggagacacaacaatgattcaattaaactagaatttacgactgccacctggccacgctgagctccacatgcctctgaatcaaaaggcaaagagagagttatgcattggctggggagacccatctggactaccaaggagaagctatagactacttctactccaccaggaaggtaaggaagagtgtgtctggaatacaacgattccttagggcatcttttagttttaccatgcttgtgattaaggtcaatggaaaactacaacacaatccaggcagggctattaatggcccagacccttgaggaatgaaggtttgtatcactccatcaggttaagaaccatgaccagctgtcatgcttcccgaaggcagagggaacgcagagtgggtagtggaagaagacagttacaaacaccagctattgcccatgcaacctgttataaagcattagattgtcacgagtattttctcattatttttttctaaatacatttgtgcacatatttgtatatacagtatatatctctgttgtcttttctctcatattcctttattacataacttaaggcatattgactttatatcattgtattaagtattgttaattttacattatggtatttaagttatggaataccaaggagaagtgtaaacactggagaattttacatccacttctggggaagggcttagtgcattttttggttgtatgcagaagagttttatcacattaggcaaaattattactttgctattgtctttagagataaagtatggtgtaaggagatgtgtaggtgtgaagtcgacaaggggtcaacttatggtggcatatatattcatgcttagataaaactaaggtcacattctgtcatacaagctggagtacagtggcacaatcaaagctcactgcagcctcaaactcctgggctcaactgatcctctcactttagcctcccaagtaccttgggctacgggtgcgcaccaccacacttggctaatttttaataaactttttgtagaggcaggatcttgctatggtgtccaggctagtctcaaactcctgggctcaagagatcctcccacttcagccttctaaatggtgggattacaggtgggagccactgcatccagccatggttaattttatgtgtcaagctgacttggtcatgggatgcccaggtaactggttaaacattatttctgggtgtctgcgtgtgagggtgtttttggaagagattaatgtttgaaaagactgtgtaatgctgattgccttcaatttgggcaatcggttgagagcctgaatagaacagaaaaggggaggaaggttgaatttgctctctgcctgactgtgtgagctggactttgatcctctcctgccctcagcactcctggttctcaggccttcagacctggactggaatctgttccatctgctctctagttctctggctctcaggactttgaaagctacaacaccagctttcctgggtctccagtctgtagatggcagattgtagagcttctcaccctccataattgtatgagtcaatttcttatagtaaatctttatatatattataaataatatttattacatataagctgtgtataatatatatcatatctgtattatattatgcatataaaatacatgtttatgtatatatttatatgtatttataatatataagatatttataatatttataaataatatatagaaatatagatgtgtgtatatacatgtgtgtgcatatgtatatgtgtgtatatatttgtatttctcctattgtttctgtttctctggagaaccctgattattaatataaaaggaaaaataaatggtgaatgaacaaccactccaagaggcctgagtctgcggcagcacttactccctggtttctgggtggaattagtaggcaccaaacacactgtcaagacagaaataagtgagttgccgctgaaagacaactgcacctgccctatgtgctggagagggtctttgagggtttcccactggggcagagcgcagggcagtgtgggggatggggagggctggggcatattggggacaatccctgttgtgggtgccaccagcagaccacaaaaggtgccaaaggagggagtgagagggaagggtttactaggaaagtcctgccccacaggaggcttccgggagagcttcccaggaagggagcagtgagccaaggcagcctgggatgggactgaatggggcttttttctgcttccacctcattttaaagcaaatcatgttgatttgtatattatgcaggggaggagaaaacatgcttcccctctacccttctagttcgttcagctagtctacaaattaaattggcatcaaatagatgaacaggagaaaagctgttttaatgtatgtactcacagatgggaatcccacaagaatatgagacttaaagaacaggccaggtgagtgaggggtccagtgcgagggctcacacctgtaatcccagcactttgggaggccaaggcaggtggatcgcttgagcccagattggagaccagtctgggcaacatagggagacccccatctctacaaaaaattaaattagctgggcgtggtggcacacgcctctagtcccagctactcgggaggctgaggtgggaggattacttgtgccctgggaggttgaagctgccatgagccatgattgagccactgcactccaacctgggcaacagagtgagaccccttctgggggaaaaaaaaacacacgaaaaaaaaaaggtgcagcagcccgatgattgaggcttatctgtcactctgagtgacagaaagaaatgggggtttgaggcttctggggagcggtggaggagtgaggggagcgtgaggagaggaggtgtctggtgaacgcaggttgccgtgtgaggcagataaaagtttcccaggtgataaaagttgtccgggaacagctctcttcctggtacagatctgctgactaacaaacatttcctttataggtgcaaatttcctttacaaaagggcattttctcagaggtactctggtgtctgcagttcctcaacataaccagttccaaatcatcaatgtgccaaagaggactatgttggggtagcagattctggtctcctccagtcctacttggggtgatgaattctggtctacggtcctattaaattctggtgaattctgagcccccacaattgcaaacattagaaagaacctctcaagtgcccgggaacagccacgtcttcctggctgaggtgtgtcccaccacttcctcactcccgccctggccggtggtgccgagagacctgggaccatccgggggagcactttccaccggacgctggtgggggccaagaaatgccagcctaggcggactggggagggtcttgggcgtccggcgctgtgtccccgccactcgtgcttgggccagcagtccccaaggcctaccctgggtccttgcccagaggctacagtgggttccccggaggccaagacggggccggccgcctacaggagctcgtgaggtagcagctccgggggctcacccaggactccaggagcgctccccagaatccccttccttaacccaaactcgagccctcgggcagcgctgcgccgcggaccggagaggggcaggttggccgctgtggccgggcccgggaagcgccccagagtcccttatgggtccctccgcagccggggttgagccaggcagggaacccgtcccggacttcccttgggaaacgcctcctcccgccgcccccgcccccgcccgcccagggtgacccgcgacccgcttgggggtgtcgccctggaccctgggacaccgcctcctgagattaaagcgagagccagggcgggccgggccgagtaggcgcgagctaagcaggaggcggaggcggaggcggagggcgaggggcggggagcgccgcctggagcgcggcaggtgagcggcgccggtaccagggtcccggctcggggtccgggctggggaggggaacctgggcgcctgggacccgccgatgccccctgccccgcccggaggtgaaagcgggtgtgaggagcgcggcgcggcaggtgagtgcgcccgagggtcgagcgctggggccagccgggcagggcgcctcccggggtgctgggagagtgctgggcgcctgggaccccttgcgcacggccgagagccctcgccgcccctgttggcttggcatcgcgaggttggggcaggtggtcctgcgagtccctagccagttggtggaagagagtcccccggggtccccaaagctggctcctagtccgcctgccctccacggcccccgcctgggagcaccggtgcgccttttctctttggggaggaggactgggagtgctgtcggttggcttctttgtttgggggaaatctctgcagtcccgcagtgttacctgaactccttctgcttcttggttccctactgaggtagggagaaactggaaactcgctgagatgccgggaacgatacggccggcgcggcggggaccgctgggccaggctgctggagggcccccgggcgaggtgcgaacggccagtcagtctcggggagggactgctcgcgactcaggccccgttgcggcgacccgctggcggcgatcagggccggggcctcctggacacccggcaccggcaggaacccgcccgggaggagccggtctggctcctccgcttgcgctccgtgccgggttggggggaaggcggggcacctgggcgcttcggtccacctcatcctgtcctgcccggctcggcacagtggcaccctgagtggtcaagtgctccagtctggcagtgggcgctctgctcgagcacgggtccagctgaaaaactgccccatgtccagaaagtttgtgcgccgagagccctgagcgcttgtggcagaggagggccttcgcccgctccgccgtagagcacagcgcggtggc

SEQ ID NO: 9206 - DNA, 6000 bp, Homo sapiens
acatcttaaagagtataataaggtgaaccacagactgggagaaagtatcactatacatatagctgacaaaggacttgtttctagaatatacagaatattttatatatacttataacaaataataagaaaacaagcatctattttaagaatgggcaaagtatcaaaaaagatacttttaaaaagaagatatatacatagacatgaaaagatgctcaacatcattagtcatcagggaaatgcaaattaaaaccgcaatgtgattccacagcacacccaccagaagagctaaaatggaaaataccaggtttacacaaggctggggagtaacaggagctctcacactgtgctggtgggaatgcgtaactgtccaaccactttggggaacatttggagggtttcttataaaggtaaatatacatgaaaacgtgtgtccacacaaagattggtctatgaatgttcatggcagctctacgcataatagttccttctattttttttgcctttattgcactgacttggaacccaagtcaaatgttgaacagatgtggtactagtgcaccttcttgtataactctccatttcagaggacaaggtctcaatatttcaccattaaatgtgagcatattgtgatatttatttgtatagttttattttcacttttttgaggcagaatctcactccgtcacccaggctggagtgcggtggcatgatctaggctcactgcaacctctgcctcctgggttcaagtgattctcctgcctcagcctcccgagtggctgggactacaggcgtacaccaccatgcctggctaatttttatatatttagtagagatggggtttcactatgttggcccggctggaactccagacctcaggtgatccacctgcctcagcttcccaaagtgctgggattacaggtgtgagccactgtgccctgcctgatttttaaataatattcttttggggccgggcgcggtggctcatgcctgtaatcccagcaatttgggaggctgaggtgggcggatcataaggtcaggagatcgagaccatcctggctaacacagtgaaaccctgtctctattaaaaatacaaaaatattagccgggcagggtggtagcctgtagtcccagctacttgggaggctgaggcaggagaatggcgtgaacctgggagacagagcttgcagtgagctgagatcacgccactgcactccagccggggtgacagagtgagacagtctcaaaataataataataataataaataaatataataataatattctttttactgtacgtatttaaggtgtacaatgggatgttttgctatattcataatagtgaaatgagcgctgtcatcaagcaaattaacatatctatcatcttgcattgttactttttttacttttttttcatggtaaccgaaactaaaatctgctgtgggcaaattttcagtattcaataagatattatacctctggctgtcagctgtatcttccgtctctggacttcttcatcctacacatctgcagctttgcaccctttgatccacacctctccatttcctgcccctacaccctcccctgagaaccccactttattctctatgtattcaactttttttttttttttttttttttttttttttttttttttttttttttaagattccacatataagtgcgatcctgcagtatttgtctttctccgtctggcttatttcatttagcataatgtccacacacttcattatcctttttctttgaggaattcaaaagatgaaataattccacaatcaaatgatttatcttgaatttgaaagtctgcaaatagagaaagcttgtgacccagagggaaaaagtagatttgggtatgaaatatagtctctactcaagtatatttttctcttctaaataataaaccctgttttgagcaattgtgttatgtttataacatattaaaatgaaaaatgcttctatgcatttctcttaaaaaaatcttatttgtgtaggccagaagatgcctacatctagcttcatcctgccttcctaacttgaaaagttatcttccaagcccatcagggaagagtctaccagtttcctccctcacttactgaagagaatgtgcctgtaactcaagctgtttgcaaatcgttactaaagcttcatggggctcccaggagacatcaggataggataaggcgctcatgccctgaaaccaagtctgctcatggcactggctgcgtaactatcacgcgctgggccccagataagcttatttgtttggttcctcaaaattttagtttgagctcagtggaattgatttgtcggtaaactttctgagaggatattttacagcaaggaagaccagccacccttgtagggcctctccctgctaccccgtggggagctggcttgacctttgacctacatctgacacacgtgttaacatgccctcgtagttggttattgtatgtcgatttggtgttatttgtccccccagggtttatgatcagctcttctatgcagacagagcccctgtcacacacacatggctgtgctgggcacggcggggtcttaggagtgaaagtgcattccagactctgtcccgccagagctgtactccagcggggagcatctcctataacacacaggtaaaagcaaagaaagaatgacatgttaaatttcctgtcattgcctttgagggcaaacattcgttgagggaccagaaagagtagtcaggaaataggtgaaggagagatgtgtgagcttgaaggagaccatagatcacacccaaaggcactgacaggtgtgtgggcaggtacctactgggacggagaaagtaagactgtcttaatcaaggactgcctggacgcatctctcaggcgtttgccgtcagcacatcctgccaattctgccttcaaaatcaacctcaggcagccagtcctcaccgtcatcaccactcgtgccgagtcatggcccttgtggcccatgaggtgcagcctccttgtggctgtccttgtgtccccccatccttaccccactctatgccctgcctgtcaacccaaatttgccccattgagatcgcccaaggctttccacacatcaaaggcaaaccagagcccttcccatgcccctgggccttgggatctgccatcggctattccctgttccctgctttctaggctcacggcccctcttggggttcctcaaacactccagcgtggcccctattccaggctttggagctggtggtcgccctccttggaggaatttcacaagactcacttcactggtcaccaaggtctctactaaaacatcatcaaggtccctgctgaaacaacactctccctagaggccgtcctgtaccactctgccctcatctctctcagaccctccccggcctaatctcttcctagcgcttaacatctggggccccatgggagcactttgtttttcttgctggctgcactgtgtctagagtctggcccatggcagatgcttgctaaatatttgctgaataaatgcatggatttgcgagttgccatccacaatggtaaattcagcccttcaaagatgctcagcgctctggtccccacagcagcggttaaacccctttaagcagtgctgtgtgcagaagcctcttgggatgcagaggcctccgaggaaggaaacatgacgtgtcttttgtggagcgcaggctgtgatgagcatcttcaggctccccatcttttgtctgcaggagtagctgcagaattgaacttgggggctcagttacagggagggacagaaacccccaccagagagtatgtctgccctcttgacggtcacatgctcagcactgggcagagcctaccccttctttcaagtaaaaggagcggctgtgttccgatcactccctgatgcaaagcttctgaaaaggtttgctcaccttactgactaattaaagggaagccacatttttccctccctggtctctgcagccataccaccaagggctatttgataggcccacggcagcttgggttacacagatgcccgcgataatgccatttgctgcgatgattgagtcgacaaggctgagtgacttggggaaaatattccccgattggactaacctgttggcggcctgcttaccatcacacttgtttttataatgaaaaaggaaattatttctgcttttaatgatggcagctccagaaatggtgagtaaaatgggtgtgaggagagaagatgcttctcaacacttctcagtgttgtacagcttgccaaccacagcctgtttgggaggggatgttctcacccaggttccatctttcagaagccatttgcccacttattctttttatatggataaacgatgtaatttgctacatgctgataataaacagaggtatcagcaagaatgaaagccagaaaatggcccaacatgaacttcttgcttttctaagttactctttcaagctcttcttgcgatagaaatgaaatgaacatttttggcacagaactcttgtttagattttactatgatcttgggaaacacgggttgcttcaaatggcttactagatccctttggaatttcaaacgttacaacaggtagtcacaaagggaatgaaagcggatgatctgagtgtctgtgctgatgtgcctgctggagcccctgtggattttagcccttggaggaagcaggttcccagagcagccatgcctgatatctgggagagggaactagaatttaattgggaatcttctgctatttccctgcttcctccgccctctcagagttacagggaatgacttagaaaggtctctggtctccttggcattgtgataggtggaattctttcgtaggaaacacagccccggggttattttgatgcaagccgttggtccaaagccactccccactttgctatgtgggggaaggaccgggcaccggacggctcgggtactttcgttcttaattaggtcatgcccgtgtgagccaggaaagggctgtgtttatgggaagccagtaacactgtggcctactatctcttccgtggtgccatctacatttttgggactcgggaattatgtgagtaccgaaactacttatgcttatggtaggtgtaccacacgcacagggaaagaattgcgtttatgtgggacaggtgaaaacaatcgcaaaaaagcaatggaaagggctttgagagtaatttatcttctgaacaatagcaatatggcaacttctaaatggtgagagggagtccctctaaagcaatcgatttgaagattggttggacaaacaatgggaaagtcattgtcttagcagaattaagttcatactttttttttttttttttttttgctaattctagaagcttttctgttatctgctgtagctcagacgaaaatgcattctcaccagatgactgtttttggttaatcgatactgaatgcgctttgtgtggactgtcgaatttcaaagatttaccgtatgaccaagatgcacctgatgctacaagtataaataggggaacaaatgctttctgttcttcctcggctaaggaggtagaggtggaggcggagccggatgtcagaggtcctgaaatagtcaccatgggggaaaatgatccgcctgctgttgaagcccccttctcattccgatcgctttttggccttgatgatttgaaaataagtcctgttgcaccaggtaagtggacccaggtgaggactctgtgatttctgcccataccctcatgtaggtgaccaatgtgactgactgtccctgtgggggaaatatctccccagccattctgacacccacaggctggacacctgcacttccctagatctgcagaatctcagggagaaggggcattggagaggggatcgtttcgttaagccctttgctctctccctggagaccggtgttttcttctcttgttggaggttttcagagactggggctccacaattgtcctgtcaatcctgaaggaggtcagatcctggccagga

SEQ ID NO: 9207 - DNA, 6000 bp, Homo sapiens
cctggacctttgcaaaagtacaggacctcagccttggcagacaaaggagggacctgctgaacagacggtgcggaggccaaggccagatccacacacaaaagtacaggacctcagccttggcaggcaaaggagggacttgctgaacagacggtgcggaggccaaggccagatccacgcacaaaggatgtcacttgtgggtcctaccccaggtggtattgcttgcaaaaagcagggctcctcctggccctctgcagtctgagtctcagtgaggataaacccagcagaaagctctgcctcaggctgtgctcgaatcacaggaaatgaatcttacaggggaactttggggtctgcactgggactattagtggtacgtaaaatgctttgtggaagaaaggttaaaattggaccctttgaaggttaaaaaggtgtatctggaagtagaatagaagccttcacttgagtgaacatgactgaacgcctctcccatcttgggacagtcctggatgcttacgacacacatctcacgtccagggatgaatttagcaagctctgtaatgaccccggggttcctgaagccacagagggagcacaggtgagggcatccaagtgcaaatgagccctctggggaggcctgcttgagctgacacataaatggggttgaagccattgtgagcccatgggcacgggccaggcagggtggtgagagctccagacagggcgggctgggctcaggctgtgtccacccagggaaccagtgtcatgggcccaacataactcgtggtcagtttctgtgagggctgcttcaaagcaggggcccaaggctctgttaggggctttctgccacccaaaatgcactttccttcttttgttctctccccaacactcagaactgtccacaccaccttgagattctctatgtattttattttaaatttttattttttgagacagggtctagctagtcccccaggctggagtgcagtggcacaaccatagctcactgcagcctccgtctcctgggctcaagagatcctccagcctcagcctctggagtagctgggactacaggtgcatgctaccatgcgctgctaatttttaaaaattatttgtagagatggggtcttgctctgttgcccaggctggtctcaaactcctgggctcaagtgatcctcccaccttggcctccctaagtgttggaattacaggtgtgagccactgtgcccgacctgccaagtatttgaattttatacacaggacctgtatcatgatcccatgctcagctgaaccaccctccaaaggatgcccatgtccccattcccggatcctgtgaatgttacctcatgtggcaaaggaaggactttgctgacgggattaaattgaggtggaaggcctccctggatcatccaggtgggttctacgtgtcatcccaaaggtcctcataagagaggggcaaagtgaggcttgaccacacagagaagccacatggccactgaggcggctgctggagctaagcacagggatgcctgggccacccagagctgggagaggcaggtaggatactcccctagcgcctccaccaggcaggcttccgctctccagggctgagagagaatagactgctgttgttttgagccagcaagcgtgaggtcgttagttccagcgcccacaggaaacgaacatacagtcatgcaccacataaccttcggtcaacaagcaatgccacagtgctcccatatcacagcgcggtatttttactgcacctgttctatgtttagatggctttagatacacaaataccagtgagtcacagctgcctacgctattcagcacagtcacctgccgcgtaggctcgtggccctggagcagcaggctgtgacacacagcctcggcgtgtagcaggctgtgccaccagggccagtgtgtgcactctgtgttcacacaaggacaaaatcacctaaggacgcatttctcagaaggaatgtatccttttcgttaaacaatgtatgactgttccccgaagagaaaagatcttccttggaccagaagttgagctctcagcatcagcggacgcccatgctgtcaaacgcaggttgctgtgccagaccccaaaaggacccgggcctggaggtgcatcaaggtggagatcagaagacccccacgccctcgaaacggcagagcagggcggcctggggctaggggcatcaggcagctgcttcctgcttaagcactacgactcgcacccagagcctcgaactccaggctgcacaaatacgattcctgcttggttcccagttggccctggacgctgccaaggggccctctctccacacccctagaacaaaagcctatcctgccggcccaagaaacagtcacggttgagggggaaaacgaaaaccttcctttgactacaggaaacttcccaaaggtttccctgtttcttcatctaaacccatctaagtgttgtgacacatgtgccggtgtgctgtgtgcgttcacttacaacagccccattcatgtatatgtcacacgtcaggggatgcaggcaccaaggggctaaggaactttctggggtcacacagctccggagttgggatctgaaccagccaccgcttaccgtggtctccgaggttcctgggctggtcctggcaccctcccccgcggccgcctcggcctgcctcagtgtccccttctggcccagctgccttcctgcccctgcctggctgtggcctccacgcggcgtcccctctctcgggggggcggggggggggctgcccgcagcacttggcttgctggggtctccggcgtctgcccgggaagcagagcctggacctgccccctcggccacagcacggcgggccctgcggtgtcggcccctctcccaccgcccccgggcggcactggggggctgcggggtccggacgcaccgacagggcaccttcccttcgccgccgcggatgaccggccgcgctcttgggaggccttaatttgggaggctctgctcccccaggacccattccccatcctcccaaagcccccacgcggtatccgggggccgtccccctctccgcagtcccgcgggtggaggggattcaggtgcgcccggccctgggggtggagcgctcggcccggcgtcagctcatcggcgcggcgcagccccggacctcagccgcaggcccagaggcgcgcggttcccggccggtcaatcagggagggcctccgggaggaggtggcgctgcccgcagcccgcccggctcacctgcgccctcctcacctgcgccctcctcacctgcggggccatgcggtcccttaccagcagccgcccgccccggggcgaggaacctcagcccccaacatcgccacccctccagcctcgccggtcctagccggcgtccctgggcgtgtcccgggaagcgcacgtccacgctggcgctggaccgggttttctgactccagggacgggactcgtcctaaagagtccggctcagatgcggttacgcgcctcacctcacccgggtgcggaccgccagtgcctccgccctgcactccgcgggccctgcccagctcttcccgccggagggcaggtggcccccgccccgcccctgccaggcgcgcgattttaaatccccccaacccccgtctctcagcgtggcctgggagggggaagccgcccggcttcagggcttcctgcgccttcgccgccgccctccctgcccttccccgccgccgtcccccctatccccccagcccgtctcttccgccttcttattttgtgcctgggctctctgctccgcaaaaatgttgacttcccacgggcagaggtttcagaatttttttaaagcttttgtccacggcgttctctacatcttggttgaaggaatggcagcctgcggggtgccgtctggggcccccgtctccctgcgcttctcgcctcctccatgcgcaggaggcggtggggatccgagcctcagcccagaggcgggggctccgggaggagggtgccccgctgccctgtctagcagcctcacccaggcccttccggaggtgcctctgcagaaagggagtcacgtcccccctgggcctcacctggcttgcagggatcagggagggagggcggggtgggctgggtgcggtggggaaggagcagggactctgggtcccaccctcggttgcgtggtgcagcctttcccaaaccagctgccccagactccaggccagacgccactgccaaggctgacgagcccagagccgcaagcctgcctcggtttctcggcgggggatcctcagagccagtgttaagcaaagaggctgcgccagcgcccttcacacccctagaaggctaggggagcaaggctaggtgggggcgggctggggctggcccagagggtagagcccgcccactttccctccctccttccattcatgcatgcgttcattcagtcattcattcctcagcagtcgctgagctcactcgccttaagtcctggagatcatcggagcgcagccggccaggggcctggcgctctcccagccttggggcctgggtccccggactcctgctcggggagggccgcaggaccggcgcattgtgcgcggcgcggggaacggcccttgcctcccacggtgccctccctcgctgcgccggcacccgcagcacccctggccaccttcctgccgggtaccccccacccctgcgcttcccagggcacctacggcgcccaggtccgcgtccaggcggacaggccgacctgcctctgtcccgcctccggccgacgggcacacgcctgggcagagccgaactttccggagccgccgcgcagcgccccgcctcctgtcccggggcggtctcggtcgccagaggagccaggccgggggcggggcggggacggggcggggacacggctgcctccagcacaccgcgcgctgggcgctcagagcctcgggcgcggcgggagcgcagttagagccgatctcccgcgccccgaggttgctcctctccgaggtctcccgcggcccaagttctccgcgccccgaggtctccgcgccccgaggtctccgcggcccgaggtctccgcccgcaccatgcggctgggcaggtgagccggggaaggagcggaggcgccgcggtcaggggcggggtggctcggcccgcgcgtccccagctcggctcggacgcggggcctgcggggctcgcctggaggtgccgggctggcagtgcgggtccgaggagcgggcggcggaggcgccggggcggccggcggggcgtggacggcagtgggcggcggggcctggcaccgggacccatggcaggacgcacagccgtgcgggggcgggctcgggggcggggtccctgccagggaaggaggaccgcgaacgctggaaggagggagggaaggcgggcgcaccctgcacgccggggcacgggcgctgccccttccactccctggcactgctgatttcctagaagaagggagaaggagggaggtgaccggccgagcgctctccaaggccagctggtgcccacggtctgcggacacgccctcccccacacacgtgggattccccgcagcccggcagccgatccacactggggaaggcggggctgcctgaaccaggagtgacagcttcctcctggatttttgcgaaaatatccaaaatatactcttcgcaacccacgttgtagggtccgcagcctgtgctcccctgggtgaacctgtgaggcccctgaccccagggatgcctcccgcacagctcagagctgggccacaccggagtcacactccccaggtcccctccccattagaagtgtatgcagttatgatcctgccctagagagaaagaatttaaaggtcccggaatgtcatagccctcccaaatgtcttagccctccgccacccacaccttcaggtaggcggccctgtccatgctgggtcttgaggcaagctcggggtgggggtaggttagatgcaggggtgctgagggtccaaggaaaggacacagagg

SEQ ID NO: 9208 - DNA, 6000 bp, Homo sapiens; identical to SEQ ID NO: 1005

SEQ ID NO: 9209 - DNA, 6000 bp, Homo sapiens
gggtcaggtataatgacgagtatccatccctcccttcccctcatggcctgaaccagtttttcaggttaactttggaatgcccttgcccagaggagtggtctgttcagacggttgggggcttagaagtttatttttggtttacacaatccatgaacaaggtctgtctcccccatttgtttagctcttcactaatttctctcagtaatgttctgcagctttcggtatagagaacttacacatttttcattaaatgcattcttagatattttctgattttcattggcgttgtaaatactgtttttcaaattctgtcttccaattatttgttgctagattatagaagtacaattacttttgtatatagacttagtatctcatgaccttgctaaatgcccttatttctagtatttttgataacctgttaggatttactgccctgacaattgcatcatctgtgaacagagactctgccgcttccttcccaatcattttgtcttctaatgtcacgcttaggtttctcggatagcttgcttgcaaccaagatgcatgcctgtgattgtggcggagcttgatgcaaacctcctccgaccgcaggatgttcctgtagccggacatcactccacctgtgggcaggagggttatcacctccaagttctggaaatgaggaccaggcagtgtaggcttcaaactccaccttgcagtaggccagatttccactggttattttaatgtttttcgaacactctttcgttagatgacattattctaaacagctgcctgtgattccaaagaggttcaaacctccccctttccctagtaaagatgggctatttaagcatgattttgtgaaagtctggctatagggagacttgggggcatcgggattcagtgttctgctgctgggccaggcagggctcaactgggaggggctgggcctgctagggccgctgtccggggccccagtggggctcagaattcaactccatgcccagaggaccaggtgggacacccttccagggaagaagtgtggcaggcacaggcccaggttagccccactgctgtggggctgtgacaggctgtgagggacctgcgctcacttgggggatgcggaagccaggagctccggggctccaggcaggccagggacaacgcttcttcctctgggctttgcttctccgctcagctgccacagggcttctggcttctggcttcacagacaaggtgctgaggacggtggcccggctcagcctctgagaggatgggggccacagctgcaggcaggcctgggcttggggctagtgctgggaggcctgacacaggggcatccatgtcagtcccccttctccagacctttgggcccctaggcccttgtgatgggctacccctggccgctgggagtgttaggaggtcagctcgtggaaaaagtgggggcgaaggcctggcgggagtgggggctggagagaggggcagctgcagcagagacccactggccagcaagccaggtaaggcatttacagggcgcaccgcacctctaccaagcagattcagatgggagcagaagcacctgtcattcagcaaggtgagactggggagacgtctggaaatgtgggaggaaaaactggctgaggccatgtgcaggccagttcactgcacatgctggggcatggcaggccggtccgcgcccgtcttcctgcatatggggtgccgtctgcacgggagcatgcatgtgtatgtctctgtatctctgtgtcatgtgtatgtctgtatgtttacgtctctgtatctgtgcatatgtcttggtggtgtctgtacgtgtgtgtacgtatgaggggggctgtttttgtgttgctataaaggaacacagagactgggtatcataaagaaaataggtgtaattggctcacggttctgcaggctgtacaggaagcatggtgccagcatctgctcctggtgaggcctcaggaagcttccacacatggtggaaggtgacggggagccagcgtcacatagcaagagtgggaggaggggagggcaaggggggggtcccggactcttttaaacaacctgctcttgagtgagctaactgaacaagaactcactcatcaccaaggtgatggtgctaagccattcatgagggatccgtcctcatgatccaacacctcccgccaggccccacttccaacactgggaatcacattccaacatgagatttggaggggacagagaatccaaaccacatcagtgtgtgtgcgtgtctgcgcatgtctgtgtccatctgcatgtgcacgtctctgcacgtctgcatggatctgtgtgtctctgtgcatgtgtgtccatgtattagcatttggtccaagccttgcttccagagccacagccaccacaacagcaccagctgagggaaagggctgctcgaatgccactgcctccctatgctgacggggaccttaaccacagggacagccctgcgtctctccagccaaggcagaggactggccggttggtctcagaaggcagtgggtgggcagggtcctcattctctggcagagatttcttgggcctggactatgggtgctaaggctgccggggagtgggggcccaggagctggggatggggcactgctgtggggtgggctgcagagcccacctgagcccctccaggaggggaaggggtctctgcggcctgcagcccccagacatcactgtatatggctggagcctacaggctggagggccgggatccacactgctgggcccctgctgatccctccaacccagggcttctcccagggaccagctctccctgccatccctgacgctcaggcacttaactatttgacaaaccgataatgaaacacgcaaggacggggaccgctggaggctcgtgagggcccaagcacaggatccattcccagatgccagtgtcactcccaagtcacctgcgtttgtaaatctctattttgggtggagccctctggaagcccacgccccactgtctgtggccactcctcgcagtcctcaatggaggtttctgtaagttcttcacgagtctcctggctcttccctcagagcagctgcctctagattacaactgccaagtgctgttggtggcagaagccctacctccccactccgaagcagctcctgcaggaaacctgggccttgtgtggctggggaactcccaggactcctgccacgcagggggacccgagggcagcttgggcaggcccctcgcggccgggggcggattcgctcggctacacctgaccggagagacaggtgagggactggtctttgtgggtcctgcggggtccccttggggctgtggctccctgccttgctgtctccaggcgggaagggggtgggagccatccttctgtgggaaggggtctaggagccccgctgctgttcatccccacttcccctcggcttcctggcctgtcctgcgtgtaaagggagcaggctgccctggcgagctggccccatggctggctcctctctgcctggagggaaggaagggcccctcctcctccgcgttgcccctcctgtcttccagcagggccaggttctgcccacccgtggagaaggccagtacaggggagagagccagggctcccacaaagcagggggtccctccaggtgaggcgctccatcctgtagtgttcccttaaattctgcaagctaccccagatcccccatttccagccaacaaatcctttttaagttcctttgagatttgttcgtgtggcttgctacactcaggactctggaaagaaggcccaggccagagctttgggcaggcggccatttagggcaagggccctgtgttggcttcctggtggggttgccctgctggtgggcgggagaccaagagcacccccgcaacaccaggaggcaggtcgcggattgtgctgtctacactccggaaggggtacattccaggggctgctgccccagactcacccctcgcctgggacccgcactcttgagctgtgggtaccacggtggccgtccccttctgttctgtgcagtggacttcctggctcctccttagccttggggcccccacagccctcggcttggcttccctccccatagccaggccctgggtaactccaggggaaagtgaccctgaggccccccacttctccccgtgtcctgcacaggccttgggctttcggcggtgctgtctgccgcagccccacgccttcctgggagagtggcccaggccccccttcctgagtgtgactgcgctgccgtctgcgaggcctgcgcgggtctcccccgggctgtccctgctgggatggggactggtggccccgggccacgtcctggatccggcttgctccttggtacaagcccgtacgggtcacggtcaggcaggagggcgggcggcggggtcccgggggcgccgagttcggggccgtgcggtccccaagagcaggctgtgcgtgtccctgttggagccccacgaaggcggcccagggccacccctgagggcgcgtgggcccgacccgcgtcccggatccagcttgcggccaggaatgcaggtgttccagggtgccaaaaggaaaacgcacaaggcctcgtcgaggagggggggtcaggaggggaccgggggtgggaagaacgcgggggagagggatggcagggtgcccgcccgagggaccgacacctccgcgagtggcaccccaggatgctgacgccggcgggggtgggggcccgaggggcggtcggggtcagggggcggccccaggggtagggccgcagcacgaggggccgcgtgaccccggcggtgaccgggtggggagaggccggcgccggggctgggagacggccgtgggtgggagggtgccccgtggggacgctcctgccgcagcgcccggccacgcgcgaggccccgccctcaggacgcgttcggcgggacggacccgcccaccccgcagccgcgcgcccgccgcgccgccttgtgggcgctgtagtcccggagtccgcgtgcgcggggccgggtccgggagccccagggcagccgccccgccgagtcgcaggtaccggtggggaacggggccacggggccgcgtgtcgggggctgcggggtgtctcggggccctggggtgagtgcggggcgcgggccgaggtttgcagggccctgtgaggtgagtgtgggggctggcgctggggtccgcggggccctggggagggtgcggggcgtgggccggggtctgcggtctgcagcctggggtccgcggggccctggggagggtgcggggcgtgggccggggtctgcggtctgcagcctggggtctggggggccctggggagggtgcggggcgtggccggggtctgcggtctgcagcctggggtctggggggccctggggagggtgcggggcgtgggccggggtctccgcgggggtcgcggtggcccgggcgcctggcagaaccgttgctgtgcagcgggtttcccgccgctcgctttccgccgcagcctgcgaatggggtggggagtcccggcccccagcctgccctccgcgtcatcctggggcgccaagtcccacccccgggtctggaggaaagcgtggatccggcgttcgcgcccaggcacgtgttgcttcgggacgggccagccggtgggtgaaccctgccagccacgcgtggggcgggcccctggcacatctccagaccattgtctcctgtgccagaagctttgtaggtgcaacttccccttggagcagctgtgggtgcggatccagcggagcaatcccgaggcgtctcagagagagcctggacagccgctggagcctttcccgagtgggtccttccaacaccgctacagcaggaaagccatccccctagggtcctgtccatcggaaactcctgtcctggggagtctggcctgcctggcctcaggacacaggccaactaagctggccccgaaatccagaatgcatccagagggaaggtgggataaagtccttggaggcgcctgttggccgccctg

SEQ ID NO: 9210 - DNA, 6000 bp, Homo sapiens
ggtcctacattcaaaacctttgagaaccatgatctaaaagaaatgcacggccaggcgtggtggctcacgcctgtaatcccagcactttggtaggccaaggtgggtggatcatgatgtcaaaagatcgagacaatcctgtccaacatggtgaaaccccatctctactaaaatacaaaaaattagccggctgtggtggtgcactcctatagtcccagctaataggtaggctgagtcaggggaatcgcttgaacccaggaggcggaggttgaagtgagctgagattgcaccactgcactccagcttggtgacagagcgagactccatctcaaaaaaaaaaaaaaaaaaaaaggaaaaacagaaaaagaaaaaaaagaaatgcacataccagtcctcagagagaggtgtttatcacagcactgaccacagagttagcctacgtattgatcacaatgtgactagataagtaataatcataatactttatgcagtctttaccatgtccccttgttgttctaaacgttttgcttattatatgattaagtcatgtaattgttacaacaaacttatgaggaaggcatgactattacttatattttataggtgagaaagtgagccctgagatgttcatgacttgctggtaagcagtggaggccacaatttaagcccacagtcttacattaaagcctatgtgcttaatcactctgctatgggagttcctctagaatgtggtatttgaatggaacaaagcagcatgcagtagtcagaaaccataggtgaggactgcatagcctcgcatgggtaaggtgccttacaaataatgtcattttttaaaatgtgggaagaggggggttgtttgtatggtagaaataaagagatgatcaaagtatgtcacaaattgaagtttattgctatataacgtggtttgaatgtctgtcccctccaaaattcatgttgaaatctaattgccactttaacagtattaagaagtgggatctttttttttttttttttttttttttgaaacggagtcttgctctatcatcctggctggagtgcggtggctcaatctcagctcactgcaacctccgccttccgggttcaagcgattctcctgcctcagcctcctgagtagctgggactacaagagcccatcaccatgcccgcctaattttggtatttttagtagaaatggggtttcaccatattggccaggctgttctcttactcctgaccttgtgatccccccacctcggcctcccaaaatgctgggattacaggcatgagccactacgcccagccaagaaatgagatctttaaaagtgattaggccgtgagggttgggtggaattaatgtcattataaaagggcaagttacaccccattttgtcttttttcctcctaccttccaccatgtgaaaacatggtgtggtgttcctcccctcctgaggatgcagtgttcaaggtaccatcttaaaatcagaatcaccaaaccaatagtgccttcgtgttggccttcacagcctccagaactgtgagccaaagaatctctgtttataaattaccaagtttgtggtattctgttgtagtagcaaaaaatagaccaagacatcatataagaagaaatttttttttccttaggttcacaatacttaaagagacgaggaataggaagaacaaatctcacagggaatatgcttgatagatgaggtacattgactacacggtgagtgaattccaaaattactgaagtctaatgggtcaattaggatggaagcaggcctctgtagaaagtaaagtctagttaaaatttgaggtatatatttacataagtggttctcaggtgagactgtcatgactgacaaagcagagatcttagattacaggcaaggtgactggtgttggcagggcttcagagattagctcaaaggctaacagggtgcagctctgtcagggcggagggctcagtcttccgagaagcagctgacagtgtagccctgggtcagcatatgtagggaggtagctcacagagtgtagactaccatgttctaagctctcagattgtgtgtgtgtgtatatatatatatatatatacacatatgtgtgtgtgtgtgtatatatatataatatacaatatcatgtattggtagtttgaaatattagttccctgagttataaatatcttccaaatgccaaatatatatatatagaagtccagtggttgaaatcagtaactcacagatggggtatgataaggctaaggtgtggtgtcacattcctgagggcaggggaagatcactccaagttctcacatatggagtaggataagacgtcacatttttgagaggctgaggaaatacacttcaagttcttatcacagcaaaacatatatcgctcacatagcagagtacatgtttggaatcatttcaaagctacatgacaggagagaattgtatcgctatgactttatagcaaaataccacttgtgcctatgttgaaggcacataaaacagcaccatatattttcaaggataaacaagtatctcaataaatttgtagaaggtgaattggaaagatacttactagttgctccagacgacttctgttggggaaaataaatggactagaaaataagcagatgaaaaatataaacaaaatagaaaggcccttcacaaaatgatactgataatatgcagtgaactgaatattattgttaatttaatttttataccaaagttagcaagaacaatgaaaatcacatctacccaatctcccacccctcataaaaacataacctacaattgtcttgaagaaagagattctcctctctctgccatagtgacaggtatatgcccaactaactgtggaaaacagttctttctttcaaccttactcatcaccctcacggtctgtttatgaggctctcctccaccagccagaaaggatgacgtgccatacctgcaaaacttatacagcatcaacagaatgaatctttccaacaagccgaaacattgagtattgtggcacagaatatgccccacccattactcaatctagatatccttttattccaccgtctcatgattttctttttcctggaaaacaaaagtatttctttcatagcccagctagcacgataaatcagcgagtcagaattctagctttgttgtaaggttttgcgaatatctgatcctcttattttgtacttttctatttcctaggcaaatctgagtatttcacccagttttccttaactaggcattgaaaactcagtttttttcttacaaaccttcatgtcttcctgctcatttgcacagtcttatcttgcacctcctataaaatggagaaacttgacattaaaacgtaatttttattacattttgagggattcccagagaatttttccccaatctccttaggtagggacttctttactatagttcccacacacatctatcaccctcccctacttctagacaattttgggaggcattcctcccttctcccaccaatcaaggagccaggtatctctaccgagctgagtaactgtagaaatctttctgcttccagtttctagcaccagcattacctgaggggactgattcctagaggtcaaagacaaatgctgggtttggtgcctgcgttgtttttaggcttctttttcttcctggcttcctcctccctgcacaggttcaaagttgtttctttcctcataactgtatctgaaaaagcaaggcccattctactagaagaccttgtattttccgtggagaatccacagagtgagtagtttgaaagtgcggataggaggagggctcttcaggctgtggctgctgagtgagagcgaggtgttcccaaattggtgcacacatttgtggaaatgagacaaagtttctaagtcctgagctgcacccttaattcttcacacacatgttgatttttaaagttaaacctacaacttcctccttgcatagggccaaacaagcatggtattaagagaggaagacgaatagtgttctaaacatttcccaggacttcagttccataaggtatcatctggtcgaattcttatgtagaagttgtctggttcctcagtttcacccattctatggccagcccagacttccccaggtaggatttatgccccttcttccagaaagcaggacttctcctgtcctaaatccttcattctctccatctagcagtcaaataaatcccaggaaatacacggagtgttccttgtcctgaagtataatacccatccttgtaatatactacatggccttatctttatccttacatttaggaatttctaatatttctccctcttttgttgcttcaggtgccaaataaaacaaaatgcttcatcaaaccaatgacatacatcatgtgtcaagtatctgcctcaaagcaacttgttgcatactctttacttctatatacacgctcgcagtttcttaatatttactagaaatcagaatgcaattctttaatttttatgttcccctttgtacatcatgtgtcacctttaattctttgttcatcttagttaccatgaagtttttcatttacttacttgcttcgtagttactttgaagagtaaaacgtagatgagatgcagtatactgttaaggttttctaataccacggggagcgtttcatttgtttttaaagtttaggccattgcaagaaatttgctccttaaaattctactgacacttattcttaatttttttaagagacagctgtaacattgtttacaaacgtataaataccatcccagcgagaaactagctttgtgcttctgtcataaaagagacacaggtttctaacaggaaatggaaaagggagaactactgagtcaagtgcaaactcccagccaggcagagagcagctgactctgtagaaccgtcccttcccgtctccctccacaccttgcctcctccaggcccaaccccattccaccagcaccccgccccaggcgcactggctaggactggaaggcaaggactaaggtgaaagctgactgcccgcaccgccccaggcgcactgggtaggactgaaaggcagggactaaggtgacagctgactctgccggggcggagtgcgtgtcctcccaccgtgctggcgctgaactgactgtccgctgccaagggaagtgacagccgcagccgggctctcagccagcggccaggcgccccgcggaccatgctctccagtacgcagaacgcgggcggctcctatcagcgggtccgcggggcgcttgatacacaggtaaagttctctggtccttaggggagaggagaggcgggtcgtggggaccactgtgggtgcaggagtggaagtggggagaggtgagtcctcgaaccctgaacgtggacggacgagcccttgtttcagtagccaacacacacgggacagacagaccggcgtacacactcaatcctcagagcagagatcagagatcagggtaggtgcaacttgaaccagaggagctcagtcttggtagggctggaggagaggaagaggcatctttgtttgaagagataagtaactcccccataagcagaaagcgtggatgggcctgtcatcgctgaaggaacacaggttggagcagaattctactaccattgagtgatcccattaaaaccgcagagcattggggattaataacactcagtgtggattttgggacccaggtctggggcaaatccagaaacttcagacacttaattgtgctctcctctggcgcactataactcatgcttctacaatgggagtcacgtgctaaggcggtagtcagagaaatgagccctacagttgttgtgtattagcaacaattcccctaacaaaagttccatttgtttcacttatcatcactatacaagacatggacttagaaacagccctgttgtcctaacaaagaaaaaatatataattccgattcaggggacttgttctaatcctggcttttttagtaactctgagtgtcaaatatatgtg

SEQ ID NO: 9211 - DNA, 6000 bp, Homo sapiens
cccagctatttgggaggctgaggcaggagaatcgcttgaacccaggaggcagaggtcacagtgagccgagatcgcgctactgtactccagcctggtgcagagtgagactccgtctcaaaaaaaaaagtgtatgtatttatacattcattgcttgggagtaaacaggtaacttttggatggtattaacccataaagccaatgttcctggtaatgtaaatagaacacactagaaagaaattttcatttcttttttttttgagacagagtttcgctcttgttgcccaggctggagtgcaatggcgcgatctccacccaccaccgcctcccaggttcaagcgattctcctgccttagcctcccgagtagctgggattacaggcatgtgccaccacacccggctaattttgtatttttagtagagatggggtttctccatgttagttaggctgatctcgaactcacgacctcaggtgatctgcccgcctcggcatcccaaagtgctgggattacaggcgtgagccactgtgactggcgaaatcttcatttcttaagaacagcattatcatttttcagaaaacagaaaaattagcagcagtttcacatataatagaaagtttcttggcctggcgcagtgactcacgcctgtaatcctagcactttgggaggctgaggcaggcaaatcacctgaggtcaggggtttgagaccagtctagccaacatgacgaaacccccatctctgctagaaatacaaaaatagccgggtgtggtggtgcatgcctgtaatcccagctacacgtgaggctgaggcagaattgcttgaacccgggaggcgaagttgcagtgagccgagatcatgccactgcactccagcctgggtgacagatggagatccgtcccaaaaaaaaaaaaaaaaaaaagagagtttcttaattcacatgtcttcatattccaagctgagaagagatgaaaatcctttaattcttaagtataaattaacctttgaatatgattgtaggattttaataatctatgggtgtgttcatagatctattagtgctgagacatttttgtaaggatggatgctttattaaccacagttatttgtgtatctgtaattatagccttgatggagcaaggatcatcacctttaagctggtttagaggctatataatgtggagtgcttggtgcattactaagacagggcaattcacttaatggctgtgcactatttcttagcttggtttgaagacaaaaaagaataatttatatgttccagaataaatgagattatcttattatagcttccagaagacataatttccaagctgacaacagccacaaatgcattttaaggtgtctttaatatatttcacataactgcataattttagctactgtttatgaaataatttagtcacaaaccaaagtctaaaaatgacttcatgtaactttttaaagaacaatacttccccaaataagatcgactgcttctttcaagattatttaaatcttagaatggtacattttaaaaaaatctgtgttcagtaatctaaagcagcagaaaaaaattgatgtaaaacttacgttttaaaaaacgcattctgggctgggcacagtggctcacggctgtaatcccagcactttgggaggccaaggtgggcgatcacctgaggtcaggagatctagaccatcctggctaacatgatgaaaccctgtctctactaaaaatacaaaaattagccgggtgtggtggagtgcacctgtagtccctgctactcaggaggctgaggcaggagaatcgcttgaatccaggaggccaaggttgcagtgggcgagatcacgccactgcactccagcctgggcgacagagcgagatcctgtccccctctcccaaaaaagcacattctgaaaagatatatttaaggtgcaatgatttgttgttgcacagatacttaaattttattaacatattgccatagaaaataagcattcaattcaacttgagaaatacttgagaacctagtatgtgctttcagaagtgacgaagacaaaaaaaaaatgtgctttttcagccttctagaagtatttagaacaagaaaagtgattaataggtatgcaaatgcctaacacagaaggaggcaaaagctaagaattagaagaaaaagtaccaggaaagggattaagataaaaatccttttgggtagttgttgttcctcttcctcctcctcctccttcctcctcccttcgtcctcccggtcctcctccctcctcctcctaaatcctttcgggtaattcctcccccccccctcctcctcctaaatccttttgggtaattcttcctcctcctcctcctccttttcttcttctttctgcttccttctccttcttggatcaaggctctctgcaacctctgcctcctgggctcactttattagctccacttactgagatcctgcttaccgggttcctgcacatagtaagtggaagataacaaaactaatattggataatatttgtcctcctacctcagcctccggagtagctgggactacaggcactgcgcgccatcacatccggctcattttttatttttagtagatatggggggtcttgccatgttgcccaggctggtctcgaacgcctgggctcaggcgatcgtccacctctgcctcccaacatgctgggagttcgagaccagcctggcccatatggtgaaaccccgtctctactaaaaatacaaaaattagccgggcgtggtggcgcgcgcctgtagtcccaggtactcgggaagctgaagcagaagaatcgcttgaaccttggaggcggaggttgcagtgagccgagatggggtcactgaactccagcctgggcgacagagcgagtatagaaaagttctcgtagaacactgttaaacagatgaacaacttcaatacttgctcttctctgcttgatttcatttagtgtggtgagtaaaaatttaaattccaaatattatttacacgcaattatatccagtagaattcctgtttgctcaaatgggaagtccctagccgttactcatgttgtcttacgtctgtattgaactcttattagtttgtaaaagctttggcagaactttacaatcagatggtatgattttgcaaagccacttcctcttactaccactggtcatctgtcatttattgggctgccgtaaagcaggattccccttaaatcaaattaaattggaatcacttgagtaaggctcaggtactagtatatatatacatatatagatagatagatagatagatatattttttttttttttgagacggagtctcgctgtgtcgcccaggctggagtgcagtggcgcaatctcggctcactgcaagctccccctcccggggttcacgccattctcctgcctcagcctcccgagtcgctgggactacaggcgcctgcaaccacgcctggctaattttttgtatttttagtagagacagggtttcaccgtgttagccaggatggtctcgatctcctgacctcatgatccgcccgcctgggcccccaaagtgctgggattacaggcgtgagtcaccgcgcccagccaggcactagtatttttaaaacattctccaagtaattttcatgtgcagccagaattgcaactcaccaggctaaactgcagttgcgcaattctggtcttcttgatacctgatttctttgccccttctcttttctggttcaatgcataataagaattttccaatattagttttattagcttccacttactgaattctgcttacgggggttcctgcttagtctagatagtaagcaggaacttacaaactatgtaagcttatagactacataagcaggaaccctgtaagcaagaactcagtaagtggaagctaattaaaactacgtgccaggcagggtgccaagcattttttgtgcattatctcatttaactttcatagcaaccccgaagtaggtgccatttctatgaaacctgcccagttactgccccactccgcggaataagctcttacccaccgctcctcttcttcaattcatttctgttatggaactgtcgcggcactacaaagtctctatgtagttataaataaacgttatctggaagagcagccgacaacaactttcaagatctccaattccccgaccccacactccaactgacgccttcaaccacaactactgagccccactttcaaagctcactcactaatattggataatagttgtctgcctacctcagcctccggagtagctgggactatagcgtcttactagccagcttcagggctagaatagcctttctgtgcaagtggaaaaaacctcaggtatttcccaaatcggtagctgcagaggggctctatccctaccagagatggagaaaagccctctcgcgctttttatgtcagccagagcggctcgttaagagagcgaaggccaggggctgcacaggtcgcatcccgtgagcatgaggtcagagaacctgcccctggggcaaaccgcgaggggtgggacgggtgggtgcaggcggggcggagggtaggagccgccctagtggcggcccctgggagtgtcccgtgcctcgccttaaaggagggcgccaacgcaatttcagtatgtgggagacgggctgccccacccccgcgcgcaaaaccctggtttagcttaagggatggaggcggggacccctgcgcaggcttgcggcgtgggaggcggccgcccgcgacctacgacgccgcgcgccgggaggctgagagttcggcgccgggagggtcccggggacagaagagcgcctcgcccggttgccaaggcaaccccacgcggctggagaagccggcgctcgcagcccggcccgggccgctgccggaagtgacgcgagttcacctgccgagcgggggctgggaggaggggcggagggtgcagaggtgccgccgccgccgcgagccagtcgggagcgcgcgaggcgcggggagcctgggaccaggagcgagagccgcctacctgcagccgccgcccacggcacggcagccaccatggcgctcctgctgtgcttcgtgctcctgtgcggagtagtgggtgagtaggggccatggggtcctcagcacccgcccagcccgggggcgctcgctgcccgcggccacccaggaacaatggggcgtgggggagggggcgggcgcgatttgggggcgctgctgcaggggcggcggggcgggcagaattgcacaggggcgcttttgctgggccgggcgctcctggagccgtcccgtagggagccgcgcagggcgcgcggagtgcccggggacggagccctcggcggggggtggaggcggaggggctcgggcgcggcgtgtcgggtgcgcctcgcagctctcccatagcattctctgccccggtgcgggcttgcctttctttgctctcgccgtctcccttgtcagccttcgtgtcggttctctccagcgttacccgatttcaaaaaccttgggcggcgagttttcaggtgtcgagtcgcccaggcggggaggctgaattgcaaacgccattattcaatggacatggagctgcccggtgcctcggatcggccaggctacctctaggaaagaggcgctgagcgaacgccagcctggacggtgttagtctcctggaagcagctcgcccaggcaggagctgctaaccagacgcgcattgtgaaggagaccgtggaaaatcaaaagtgggttcctgcaaaaatgtagcattggtttctgcagtccttgggcgaagtgcaaaggagaattcagtgacctcgtttttgagtttgtaatgagtcgttcattttggagataagacgggctgagttgtacagggtaattgctagaggatttgccaagtgcgtttgtcgactgctcctttctctgggaggggaaaaaaggcatgtgaaaaatgcgtggaccattaggaggcgtaatcattttgacactttaaaaaacggattttccatgt

SEQ ID NO: 9212 - DNA, 6000 bp, Homo sapiens
aattaaatgaggatatagccatttattataaatcaaaccattgtcatttttataggaaaaaatagaagagaaagaaagagggagggaggaagggaagaaaataaaaagagatggaagatgttaagcttttttttctttagtgaaataaattgtaaagctgaaaaggactctagaaatatctagcatagcgatttccaacttctttgagtatgaagccctatttttaacatacgtattgtttttcagaccccgcataatagcaattgttattttggtaaatattgatcagaatatatgggaaaagatttataaattaagtgacattttacaattaaatttacatttcattagaagcatagcatctatatatatttggaaaattagtgcatatatgcaaataacatatgacattctggctgggtagaataaagatgaacattaggaaagtttatgaaataacagtatttctgcagtagaatctcattcagtcaggaaacacagaacttctccaattcattctttttatatttataaagtgaaaaccaaacagaagaggaaagttgaccaagatcagattaatgaaaaatttagattaatgtttctgctagccaaataatcttaccgtagtacaatatcacccccaataaggagttagtcaattatgtatctaataactcagatcagacccttgaggcaaagatgactttagcttacacattttttgtttgattatctcaattttgtttggttgtattaacatatattaaggcaagatttagtaattaagctgtgattagaataaaaagtattggtttataccagattaccagcaatagaaacagatttcattactttaaattaataaagaagcattaaaaagaaattttaattgagttgatagttaaacatgcacatatatttatatgattctttagatctgataggatatattactagtaatggagttctataaatatttttaactgatcacctgaatgatcagagcatgcaacagactgaacagttatgaaattttaacttcaagttatagaaaatcatgtgtattaatgtgtataattcttcattatatttctgatatcgttatgaacaatgaaattcccctagacagccctgcaaaaactgacttctgggattatgaggaaggtggaactggctcctgaatgaggtaggtcatgtattctacagcatagacatgttttgaaaagagcaagtaaatctcaggtgaatttggccaactgcttatccttacatttaagccagttacacacccacacagatgccaaggtgtcatctctaaaatattgggagggaaaaccttggattcaatgctgtcttactggaagtgataaccaagcattactcagataaaaaaaaaaaaactttttgcctattgctgaagtggttatatagtaatgattttacttttaaactttcaaatatttatttttctatatcctggcaatactattgatagtgctcaggagaatcattaactgttattagataaagtataatagaataaataatattggttagttaatgttggattctgaaaacatctcaaatgtattaatgtaaagttgtaataattttaaacattgtaacaaatctcctttgaagatcctatttgtcactgttcgatctggagcgcaaatgaatgaagcctgctgtgacttaggctgaagccactgtatggagttgcccatgtgaagagccactgagtgcagatcagtggctggaatttaggctgtccttccttgagacgtattgatgggcgcatgaagcagatgctcactgggaattgcagacatttgaaagtgaatggtgagagtgaaggagttcgtgatatatttgggatattatatagattccatagtatacccttaagagtcctgatatcacttttgaaaacgttggattccaaatagtgtttctctattgatgtttcagagcctctggagattcagcgatcgacttattcctgaaattcctttgtggccacttttactgagatcatccttctatttgggggcttgaagaaagtgatgcattttaggtgttgaatagatgctgagctccttagcctaatcagtttgaagttctcatttgagtcttttttttttttaatggacaaagacccttaacttgtgggggacctctctcctgactgccagtcatatggtcttgtttggtatgagctgacctggagcccagctccagacatacacaattcctcacataaccctaaagtctcttctcgcttgccctagaaagagcccttaatttctggatcaatttgcaaacaattcttaaacttctaattttgtttagttaatttggaactaaaatgtgtcatcagaaaaccatgtgtcttctatgacaccttatgcatatccacaagagggaaaaattaaaatcctttgttaataaaattattgaatatttgttgctttcccccaactcccaataaccttgtaacatttttccaaaatacaattttgttgaaaaattttaattcatagcccctacttttttccatattgtatgggaaaaaaaaggaagccaagagaagcttccatcagggctctccaaagagcatgcctagtaacactcagattttatatttaagacaactcaaactgtgatctctgaactcagtgatgacccatccagatgttttgaagtgacggagacacaaacaaaaaaagctgttcttgtcagccagtcaccttaaaaaacatcatatctaaaaagaacctgtaagaatttattttcctgataagtcaaacaacatccagaataactgctgaacagccttagttaatgaatgtggccaacttaaactgatataattctagcctaaagataagaaactgtatgttaggaagtctgtgcaaacatattgaggatacagttattattatagtttgggcttcctgaattactaataccatgaagatccttcctgacaaaaaatgccttcattcttgctagctttgtaggcatgagagacatttgggcctactgatatataggaatatctatctagtgcttatgttgtaatttactggtattctttcccaaagaaggacctgtttacagtagctctgggcatgagtaactgagagtagggtggcatgaaaggggaaaggagatccccttcagaaccctagttctacaggtatttggagaagccatgggtatcaccaccatcaaccttgactgctgctaaagaattcctgcaaatatgcctccaaatgaatttcttatctatgctagccatgacacttgattcatccttccattacagcatttatacacagagttattattttatttctttctctacactggactctgagcccctggaggacagctctcctaccatggctatgcccagtgatgctctttgacatggtttccggggctgagctatagctctgttgcctggaggcgtatcagttttccatttttcattcagaatcccagcagtgtctgtttctcgtgaataattagctagtgtgaaagtcacagaatccatagcctctacaaggtgcaaatttattaactgcccatgattctgcaatgaattagtgtttttaaagggaatataagaaaaaggaagtgatagaatagacattattgtagttattttagaattctattttttttttttttgagacaggattttgcatgtccccaaaactggaatgcagtggctggattgtagctcactgcagcgtcaaactcctacctcagcctctggaatagctgggactccagacggagctagaattctactgtcacgagtagggtgcatttaataatctttaaggtctttccaagtgctaaaatttctgattctggaagatttgtccttattgtatcagtatttacttcctttttccaataaaacagtccaacagatgcttacagtgtacccgtggcttatgaaaccaaagacaggaggaagttagaggaaagtgtacttcctataagacaagtaatgttatttaacaaattctcatgcatttaaagcaacataatgagaaaataccaattctactgaagctcattatgagaacattttcagagttcatactatggacttgatatacattaaattcttaagaacttctctccagtattcctggaaactaggtatcacagtccttgggtagactgttttaataaagagagcaggtcaggttatgaaaaatgcaggttttccaatgagctttacttctaatgtatatcgtagatcactgatagatgattgcaaagaaatacatacatttcattttacctccaggaaattcccaagaattcagaatgcctactttgtgttgacggttttctctggagttgcaaacactgagagtgaaatcagtttcgaaaaccatgcttcaaatattcctttcaatttgctcttgtggcagttttcgtcaaacaacctgcttggagataatctatttgcagaacctaggtggggacaaacctgccacattatataattcactgagcaggttttggctctcacttcaccaatccatcttaaatagtggctagtgccctgcatctagcaatacatatgattaagcaatttagcacagaaagagaaaggccacacaacttggcaaccccgtagacatttatctttgagaaaactaaacggatccaactttttgccagagtttaatagcaaagctgtcacattttacacaaagagtatccagtccgctagcgaatggaaagaggggacagggaggaggggaccagaggaggcgggctgctgactggactgttttcaaaggggctcccgtgtttaggggaggtgctgggatgctccacatggctggagagacgaagtagttaaaaattattactagggagggggccggaacctcgggacgtgggtatataagacggtgcctgagcgcagagcggctgctgctgctgtgatccaggaccagggcgcaccggctcagcctctcacttgtcagaggccggggaagagaagcaaagcgcaacggtgtggtccaagccggggcttctgcttcgcctctaggacatacacgggaccccctaacttcagtcccccaaacgcgcaccctcgaagtcttgaactccagccccgcacatccacgcgcggcacaggcgcggcaggcggcaggtcccggccgaaggcgatgcgcgcagggggtcgggcagctgggctcgggcggcgggagtagggcccggcagggaggcagggaggctgcagagtcagagtcgcgggctgcgccctgggcagaggccgccctcgctccacgcaacacctgctgctgccaccgcgccgcgatgagccgcgtggtctcgctgctgctgggcgccgcgctgctctgcggccacggagccttctgccgccgcgtggtcagcggtgagtcaggggccgtctccccgaagaacgagcggggagaggggaccacggggcgcggcgggcagcctgttctcgggcggaggctctccggggcgttggaaacctgcatggtgtaaggacccgggaggaggcggggagaaattgattgtgctgttctcctccctctcttctctaacacacacgcagaaaagtttaaatttttgtgaagcgcttgcttacgtagctgcggagcgagcctctgcttcattacgagcggcatagcctttttcaggagtgatttccactttctttgtgagagagttgaccacacggccgggctcagcacctgccaaaggggtggggtagggcggaggcagagggaacccagagacagaagagccaccgcagaaatgccaccctctgtcgctctgactggactttggtcccagcaccgtgttcactcggatgctttctgtgaccagatcagttcgctgtgggtcgcctccggatgcctgggcattcggtctttgttctcagcaggactactggcaaggaactgaagtgtggtcattgcgtgtaga

SEQ ID NO: 9213 - DNA, 6000 bp, Homo sapiens
ttctagacaagtaaatgaatagttataatggcttgtgctatcttaaaaatataaatgatcacacggaatgtcctatttcttaatagtatgatattaacacacatgaattccatcaacagagagattaaacaaacataacatcagaagtacacaaataaaaataatgtttaatatccacagctcatcattcatgcctaggctctatgtgtacatgatatacctgcatgatttttgcaggagcagattgcaaaagtaagaaacagaatctctctgagaagataatttccacatacaatgcgccttaccattttctgtctctctgctactcctttatgttcattttattgattcttttaaatcaaatttatctgctttcagttaaccatgcatccagtcctgttggtatttcctactactcagcttttcatagattcctgagttttgttcaactggctcttatttttataaatgaaataactatcaccccaactatgcctctgacacatttcctcggagagatgaagaagtggataaattgtcttacttgtaaattatgagctacatagaggagggaggatgcgtttctataccttttatatcctacactgcacatggcttactcatgttcatagatttggtacattcaataaaagtattcaatgtctacataatagaaagcactcctttccaacagtggaggggaatagtgagaagaggcaatttttctacatggtgtcctcatatggtcaatctattaagaagaagaactggctaaggcaaatgtcaggctgcatattactttgtcactgcaatgagaaataaatgtgcgtctgatagagccctggagaggcacttctacttttggctaagaagcagttgaggcaagtttttttgagtatatgacattctgctattgagtccttatggcaatataaatttaggctaaagatggggagaacccttgaaagcctcagaattgtcttagttcattttgtgctgctataacagaacactacagactgggtaatttataaacaatacaagtgtattcggctcacagttctggagcctgggaagcccaggctggtgaaggccttcttagctgcctcattacatagtggaatgaatcacataaacgacagagtatgttcaagagagtgagagatggaactcacaaccatacgcccttttataatcggcatgaatccattcatgagggtgtagccctctagacctaaatacctcccatgaggccgcactcccaacattgttgaactgggatttcagtttccaacacatgctttttgatagacacattgaaactgtaatcctcatgtgggcctatgattcaccgtcagacgtgtagcccccgggatggagagagtcatcctaactttttctgactatgcatgccacgacttacattgtgagaggctgtgaatatcaggtttgttagcataactctctcccaccttgtatttttcactctgtacttttttcaaattagacttctctctgctttccacacatgctgtgtggtttcacgcccccaggctttacttaagtttttctctgccctgcccacgtccctacctatctaatttctccgctttcttcaaagcttcatgaatcctttcttaatcctctattcagaaatgatcccctcctcttatgtcacaatagcagggcattttcactcttcttatggcattttttaaaaacctgatgtagatgattgaattgtgtgcttatgcctgatatcttcaacaagtggctattaacgaattgaggggcaggatccatagctgtatcacctttctttgtatattcctgagtaccaagggtttgtccatttatcttttccatacacagagatgctctctctctctctcttatcttccctctgtctctctctctctctctctctgtctctctctcacacacacagaagtttggacacagtatagtcttatgatacaaacttctaatcagaaatttcatttgtgtctgatagactattgctaccatctccctaacctcactctaagaacatttaatgtctaaattaccttacaggataccagtcaaattttcctctggcatggtttaacccattgcctaagaaaaaagtaatttgacttttttttttttttttttgagacagagtcttgctctgtcactcaagctgaagtgcagtggcacaatttcagctcactgcagcctccacctcctgggttcaagcgattcttctgcctcagtctcctgagtagctgggactagaggtgtgccaccacccctggctaatttttgtattattagtagagacggggtttcaccatattggccaggctggtcttgaactcctgaccttgtgatccgcccacctcagcctcccaaagtgctgggattacaggtatgagccacgcccagcctgaaagtaatttgacttctaataacacagaggagaattcagttgtcaatatttccacctgattaacagatgtgcatgtatgtgtgtgtgataggcacttggccactcccagtgtcaggttgaaaaattgcaggctgtgtgaagatgctatttgacacacagagtatacttttaactgtcttctgtgattttgtgtgtgtgtgtgtgtgtgtgtgtgtgtgtgtgtgtgtgtgctgaagtcattctttggtatccacaggggggactagtttcaatactctcacagatccttggatgctcaagtcccttatataaaatagcataaatttgcatataacctcctgcatattacatcatctctggattaggtgtaatacattatataatgcaaatgctttgtaaatagtcactttgctgtatttttttatttacgttattttgattgtatcattgtttcattttttttaaagttatttttcatccatggttggtagaatctgaggatgtagaactgtggacgcagaaggcctactgtgtagcatttatcaatgcccaagagaaatgaagaattggagtaaataaatgagtcacggtctttcacatctataaatgtgctacttccaccctttcctgcaaagagctgaccatgagtttacttaagtgtggttagtgcattccagaaccagtaaagggtgtgagaagggtaccgtggcaaaataactttctaaatatattgtctgctataagatcaagaggaaataagaggttctctagctgtgaggtgctgagagggccattgcttaaggcagttcagcgatggtgagttgagggccgcctttcccctcctctcttcctgataaccccatcccaggatgccaagtggacgaatcatctgtataaagcgctctgcctggggaggacaaatcgcagacggtatctcccctatgcatgttagcctgtgtctactcttgccccctgccctccctgaaggcaatgcactgcccttttcagcgtgaaatccccaggctggggctggattctgagctctacatttctacctcccccctctccaacccccgctatttctatgtcctcactgataaggaaggagctagggtccttgtggaggccggggcgaggcagttgagttttctaaggagccagagagaaagtgcagatgaaaggacccatcgtcagcgtttgcaggtcgcggtaaccccaggccagattgacatgggctccgcacccgggccggtgattctgcctcttaaccgctcttgcaggagaggtgacgttaatctcacaaacgttttcctacccttctaggagaaataacgataagccccaatcttaaggagcagagagttagttccgggcgtttgccacggctccctcacttcaatttacactcgcacacgcgggtacgtgggtgttcggggtagggcactgatctggggaaggtctcccccccgcgacccaactcatctttgcacatttgcagtcctccctcggtgcactcctggcggggatctggccagtgcagcgcactgggaccgagggcagagcccgcggagtgaggccaggagagacttcaggcctctaaggacacagctgaggctaaggctgagttgaacgcagcccctcccgcggctcgtcccctctccagtgtctctcccgtaaggtgccgctcccaacagcaatgggtcgagatgtagaggaaacactctgtacgttatttttccgcccaccctttagcgcctgaggagacagacagtgtagactttagggtacaattgcttcccctctgtcgcggcggggtggggagcgtgggaaggggacagccgcgcaaggggccagcctgctccaggtttgagcgagagagggagaaggaggtccacggagagacaagaatctccctcctcccacgcccaaaaggaataagctgcggggcacaccgcccgcctccagatcccccattcacgttgagccggggcgcgctcggggcggtcgcctgcagtatcagtatcagcatcagcatcagcatcagcatctgcatgagcatcagctcagctcagctcagctcagcatcagctcagctgtcctgaggcagccggcggctgtgaaggagctccaggctgcccccatccccacgcccttctcggctcagggcgtgcatgaacctgcggatggccggcgggcgagtggcgccttcgcgatcgcggccgcccctctaggcggaggcaccggggaccgaacccgtgacttcgagctccactgcggacgaatcccgggaccgcgcgcctcgcggaagagcggccgccgtgcagcgcggagggatacgcctcggccgcacctcccctcgccgcgcccccgcccccgccgccctccccgcccggctctgctgccgccgcggcggccgctgctgctgctgcttctgccgccgctgccgccgccgctgcctggatatagtgcggcaagagcggagcttgcagtcactttgcgaggaggagcgcgcgggctgcgggcggctggggcaccgcgggagcggcggcggcggctctagcagaggcggccggggcagcgaaaggttctctctccagggctggacttaataactttgaaactgtccaccggtgtcacgtcctgaacatgagcctcctcctctccttctacctgctggggttgcttgtcagtagcgggcaaggtaggagtgtggcgctttattgcatttactttccctcccccttccacccggccaagagaggcaaagagggaggcgcaggaagaatgaaatgaaagaactaaagttacagttattgctgttgttgttattattattttcgttctttctcctagctgtccctaaaattgtatctgttgtgtggagacccttaaataagagaagggaaaatacagaattggagaggggaatcggtgagcaggatatccagggaaaccgcttcttcttcttctttttttttcctctgggattatggctttctcttatttttattatcagaaattggatgagtgtgttaacagtgaaatatctgaggttgcggaaggaaagggcacgatggtgttttacagaagcagcaaaaactatcagtgttaaactcatttgcaaaatatctgctgtgtgcaagacgttcgattcttggagactcttttttttttccacccctttcccaaaaccctaattcctgactatgaagtgaatgatgatggcttatttctgttggaaactaagagaggggccgtggatattgtgtgtaagaaagcaaatggataaaactagggatgtgttgcagtcattcattttgaccccaaccccttattaatacagaaaggtggaatcattttataacattacattgtaattacacctgtagaggatttttggggttgtgggagaactggtggaagcttttatctcttaaaaaaaaaaaatgaatagcctggtagaataacctgagagggaatttgtggaagctatcactgtttgtctctagagagatagatatgaatttatctggctgtttagatagtaaacactcacatgaaatata

SEQ ID NO: 9214 - DNA, 6000 bp, Homo sapiens
tcgatatcttgtcaccctggcctgccttcagcaagaaccctaacaaatcagtttagctagaaaccccttatccttgatgtttcttcttagtacttttttgtccactgacacccccccaaaccctgctactgagttagaagtccacttgtccttgttgttggaattgagtccaatttttctcccccactgctgcagtagttcccatacctatctccatggcctcccctttgaataaagtctgccttaccatctttaacaagcgtcatgaatagtttttttcttggaatgttcctgaaaccaccattgcaaaattataactgagacagtgaaagagacctgacctaaccaactccatcttctaacctccaagctgatcttgtttattcctgggcgtaggctgaactaactttgggaggaacttagttcattgtttatagtttgacacaaagatggtgacaacgttttcccaaaacaaacccccttcttgcctggggactagactgcctttgtaggactaacaaattagccacgagattagaaattatggtttaagagtcattcaggcggaggctgtaagatcctgaccctccataaactgctcctaaaatcagtgtttgagatatttcgcagaccctgcacttgatggatcagctggtgccaccccgacggagaaactggctcatctgatcttgtggcccccacccggaactgactcagcacagaggacagtttcaacttcctatgatttcatctccaacccaaccaatcagcactctcgacccactggtctttccctcacctaccaagaattatccttaaacactctgatccctgaatgcagagagactgatatgagtaatgataaaactccatcttccacacagccagctctgcgtgaatgactctttcaccattacaattgccctgtcttgataaatcagctctatctgggcatcgggcaaggtgaacccattgggtggttatattcctaacacaaagaaatgataaatgcttgaggacgtggatattccaattaccctgcttgctacactgtatgcttgtatcaaatcatcacctgtaccccataaatatataaaactattatgtacccataataattaaaaaaatttttaaatatttttaatatatcttatgcattagttgctttactaagtataaaactcaagtctgcaaattttttctacatgttttttggaggcttgctttctctattatccatgtgggcaataccctcatagacactaaatacaagagacaattctcaaccctctttttagccttggactgtacaaacacctccacctttagctcctgattctctcccagttccttttgtactttttgactgctctttcttgtgttctttctctgggttctttctcttcctacctcttactgcagttatttccttagatttatccataaacattcacttctttgtctgattgatctcattcactgctcctgccttctagaaagttcctcaaacaataatccatagattcgttgcatcagaattaatcaaggtacttgttaataatacagcttcctggggctgctgagattaaaacttctgaaactcagaattttaacataattttaaggaaagaatcataatgaaggagctccaaaggattctggggagaagatagtccagtgatcactgttctagaagatgctgctaatatttatatttatttctttagtcaatcctgagggtttcctgttctctagagcactcattctaacagtctactggtcaccccagctatatttctctctctcaactcatcccaaacctgcaggaattatgtatgccctctatgtttcttattcctttaatgacactatttataacctccacatacagccacctatgctagaaatctgatacctacatgttctctcctttctcacccctacatctagctgataacataatcctgttgaccatgtttgtgaaatatcatctgaatccacccggtttttcatttatcacacggtgaccatttacttcacaacttggtctctttctcaggatattgtaatagtttagacttgactaacaccctgattctcttttctgtaatccatcctgcacatttcaatatgagtcatcattctagagcagcactctcttgtagaacttcctgcaatgatggaaatacattttccaatatggtagcccctaccctcatgtgactattgagaaattcatatgtgatcagtgtcagtggagaactgcattttacatataattgaattcaaatttatatagccagccaggcatggtggctcacacctgtaattccagcactttgggaggccaaggcgtgtggatcatctgaggtcagaagttcgagaccagcctggcaaacatggcgaaaccccatctctacaaaaaatacaaaaattagcctgcatggtggcacatgcctgtagtcccatctactggactgaggaggctgaggcaggagaatcacttgaacctgggaggcggaggttgcagtgagctgagattgcaccactgtactccagcctgtgtgacaaagtgagactctgtctcaaattaaaaacaaaacaaaaaaaatgtatatagccacttagatctataggctaccatattggacaccacagttctaaaatatgagtcttttcttatctcattgctttcaaaaagctcattagctgtaggatgaggtctagacagtagcgtgaatgctcttcgtactctaacctccccttcagtttctaccaccaccaccacctacctcactatcccgatcccacatacactttagtactgtagaaccttgctttttctaaataaaccataatttttcaatctcctagctctggatcctgctgtttcctctatgtagaatgcctctcctttatgtccttcccttcagaatttgacccatttttcaaggtttaataaagaaagccctggccccactcccaacaaaaggaacagccccttatcatggaccttggacaagccatttagtgtctctccgcccagttttctcatctgcaaagtgggaatgataacatttcctcttttatggagttgttgggggattagatattgcgttattcagactccatcactgagaaagcatgcaataaaaatagctgttattattttctgtcctcctgtaacatttaccatgtggtatcaggcatctttcctgataagactctgtctcccctcaagactgtgagcttgttagcaagaaagcctctatcttgttcatggttgtccttcagcatccagcacattgttgccatttgtcaaatgccttggctgggtggcaaataaataacttagtcagttactcacataggattgcatagaatttttttaagtatgacatttttgtgtatatttttagggaggagtaaaagacatatagctgtagcaagaattagaaaaaagaagatgccaacaacttttctttttaagcatcaaatccttctcattactgcccagaaaaactggcataagctgttgttaaatctgtgccccttctcctcggttgactggagtacgagttttaacattttgccattttgactttcctttctgggtcccctgggtcctctcctcccaccccctccctgggtactaagttttcatcactgtcaccacggcaacagcaaggatgcctcattcctcacagttctgcacagctaaactctggtcgcctttgtccactgagctagctgaattctttttaaatacaccactaaatcaactatctgctgtacagaacttcatccattattcaacctttaaaaaaaaacaaaaacaaaaacaaacaaaaaaacaaaagaaaaaaactgatgtatactaatttcttctcctgggaatggcctttttccagacctgccaatactcttgaatacaccatacatttttggtccctaggaacaaatataaaaattgccagtgtacgtgcgtccaatgtaagtgtggtgcaattttaaagcacgcaacagagcattcataatgggtttcccttttaaaagcacagtagaccaaaaataaacctgacaaagggcagctgtagagttttaacacgtggaaaactccacaagcagcagttatgtaacttgaaagaaacatgataaatatttcacaccattagatgaacttccaactctgacactgaaaaaaaagcaaagaacaagaacgcgagacaaatgcacctcaaatctccaaggagcaaaaagcttaaactgagaagggaccaaggctgtactaaaatctgagacctgacttccagcacgagtcttgattgcttttttttttctcgagttcgaggcggagcccgcgaaccccatctcctcagagcgccaccccctcagcttcgcccgttgggcagaattttccaaatatctccacccctaggctgaaaagccagaaagaagttttgagccaacgaggggaagaaaggagttggggcaaaacaggaggcgtttccctacccgcatacatccccgtccccgagacacccaatccccccacccccagcctgcccgcgcctcccgcccccagctcctcgccctggggacagctggcagccccgcgcggaccagacacaaagccgatcaatcccggaggcgtgggggcggagggacgacccgccggggctttcccgggcgctgctctcctcctgctgccccctcgctaggacccggcggacgcctcgtctggttttcacgccctctagcccctacccccacacccccaaaacagaacagacccccatccctgggctggaggacccgcctcttggcagccagctgagaaggcgccccggggagggggaaactgacatcccatctagagccgtccctcctcttcctcccctcccgactctctgctcctttcccgccccagaagttcaagggcccccggcctcctgcgctcctgccgccgggaccctcgacctcctcagagcagccggctgccgccccgggaagatggcgaggaggagccgccaccgcctcctcctgctgctgctgcgctacctggtggtcgccctgggctgtaagttgctcgggttcctctacccttcctgcctggaccagcctgcccccaccctccagccccccacggggcgctggctgacagtgtctgggcggctctgggccgaggtcgccgcggggcgtctgaccttgcgcccaggcgagcgggaaacccagggtgcccgcgagcggacgctgggagcaagggagcgcgaggtcgtgggtttcttgtgaattgcgtctgattttgtcagttctagatacagaaaattaagggttcccactagcaggttctcatctgtttgcaaagttggggtaagttttcagacagagggacgtgattcgaatgcaaaactcactacccactggtaagatgctaagaccccaagaaagatggcatcactgggaggcgggcgccggccacactttgagtccccggggagggggcagcgtccgcgtggtctgggctctgtagcgtcccagctgagccggcgatatgcagcgcacttgtggggcggaggtggagggaattcgtggctgctgagccagaattacttttatcctctccacctgcacatctacattcacttagagaagtctggtctggggactctagccagctgctctgtcctcaggggacatccaacgggacgattgttagaaagattcagaagccacatgatccagtagctggggagacgtcccaaagccaatttcaccggatgattttaaacaggattttcacggattctggactcatgagatttgaaatcctgggaacgttgccgttattttgttttcttcgcgttaactttttaggaaaatggaggaaattacaatagactaagcaatgcagttctacttttgctttttcttttttctctcaccttttttgttttgcttttttcccttccttccttcctcccttcctttctctttctt

SEQ ID NO: 9215 - DNA, 6000 bp, Homo sapiens
ggtttcaccaggttggccaggatggtgttgaactcctgacctcaggtgatccacctgcctcggcctcccaaagtgttgggattacaggtgtgagccaccgcacccggccacatagcttttcttatttgaaaatatgctacaataagaaatgtagaaagataggtcactataaaagaaaagcaaatatttaatatatgaaaagattctctgccatgctcatttttaaactacactaaaaactaatagctcacctgtcaccctgataaaatccagaagtttgacaacatgatctgttttccatactgttgcccaagaaaacaggcactttcatacattgttgatagaaatgcaagatattataacctctatggaaaggaatttggcaatatctaacacaattgcatacatatgtatcctttctctctctttctcacacacacacacacacacacacacacacacacacctcacatctaggagctgattccaaaagtacactggcaaaaatatggtaaaacatgaacacaagacattgcagcactacttgaaatggaaaagactgaaaacaacccaaacattcatcaactgggaagtgaatggataagctgtagtacaaccacatgatgggaacattacgtacctgtgaaaaagaaagaggcttatctctacatgccatggaggggacaccagaataaacggttaagtaaaaaaaggcaggctgggcgcagtggctcagtcaggcctgtaatcttagcactttgggaggccaaggtgggaggattacttgggtccaggagttcgacaccagcctgggtgacatggcaagaccctgtctctactaaaaatacagaaaaagttagctgggcatggtggcacatgcctgtagtctcagctactcaggatgctgaggtgggaggattgcttgagcctaggaggcagaggttacagtgagccaagattgagccactgcactccagcctgcacaacagagcaagaccctgcctcaaaaaaaaaaaaaaatgtttttttttaaatgtaatttgccaatggacatctaaaaaaaggtagggggaagacattaatacacatacatatttacttatatttttaaaaattgaaggatataccaaaaacattttttaaaagtgcctacttagctgaaagtaacagaaacacagaagaggaataggaactacggatccacaagtgtaccttgtcttgtatatttgactttggaatcatgtaactatttgacataaatataaaacaaaatctttttttaaaaaagcaatctctaaatatgtagatattgaatatatctagtggatggcatagctgcatggagaagaactattttgagtaattttaaaacatgaacttgactatacgtatctcatgagatataccctaagtaccaaaataaataaatacatttctaccatctctttcccaaaaagattttaaaccatttttagtaagcatgttgttgttgttagaattgatattgttagctgcaaaaaaataaaataaaatacttaggaatatacctaaccaaaaaggtgaaagacctctacaaagaaaactacagaacactgctgaaagaaatcatagatgacacaaacaaatggaaacacatctcatgctcatggatgggcagaatcaatattgtcaaaatgaccatacttccaaaaagcaatctacgaattcaatgcaattcccatcaaaataccaccatcattcttcacagaactagaaaaaacaatcctaaaattcatatagaaccaataaagagcccacccagccaaagcaagactaagcaaaaagaacaaatctggaggcatcaaattgcctgatttcaaactatgctataaggccataatcaccaaaacagcatggtacttgtataaaaataggcacatagaccaatggaacagaatagggaacccagaaataaacccaaatacctagagtcaactgatctttgacaaagcaaacaaaaacataaagtggggaaagggcaccctattcaacaaatgatgctgggataattggcaagccacatgttgaagaattaaactggatcctcatctctcaccttatacaaaaatcaactcaagatggattaaggacttacatctaagacctgaaactataaaaattctagaagataacattggaaaaacccttctagacattggcctaagcaaagatttcatatccaagaacccaaaagcaaatgcaacaaatacaaagataaataggtgggacttaattaaactaaagagcttttgcatgacaaaaggaaaatcggcagaataaacagacaatcctcagagtgggagaaatctccacaatctatacatctgacacaggactaatatccagaatctacaaagaactcaaatcagcaagaaaaaaaaaaaaatttcatcaaaaagtgggcaaggacatgaatagacaattcttaaaagaagatatacaaatggccaacaaacatatggaaaatgctcaacatcactaatgattagggaaaggcaaatcaaaaccacattgcaataccatcttacccacacaagaatggccataatcaaaaaatcaaaaaatagtagatgttggcacggatgcagtgaacagggaacacttctacactgctggtgggaatgtaaattagtacaaccactatggaaaacagtgtggagattccttaaagaactaaaaccatttgatccagcaatcccactactgggtatctatccagaggaaaataaattattatatgaaacagatacttgcacacacatgtttatagcagcacaatagcaattgcaaaaatgtggaaccagcccaaatgcccatcaatcaatgagtggataaagaaactgtgagagagagatatatatatattccattatatatatatactgtatatatatacagtatatatattccattatatatatatactgtatgtatataccattatatatatactgtatatatacagtatatatattccattatatatatacagtatatatactccattatatatatacagtatatatattccattatatatatactgtatatatctactgtgatatatatattccatatatagtccacatatatatagtccacatatatatatagtccacatatatatagtccacatatatatatattccacatatatatagtccacatatatatagtccacatatatatatagtccacatatatatagtccacatatatatagtccacatatatatatatatagtccacatatatatatcttccacatatatatatcttccacatatatatatcttccacatatatatattccacatatatatattccacatatatatattccattatatatataatggaatactactcagccacaaagaggcatttgcagcaacctggactggattggagactattattcaggaataatagtaattcctgaagtaattcaggaatggaaaaccaaacattgtatgttctcactcataagtgggagctaagctatgaggatgcaaaggcataaaaatgatacagtggattttggggactcagggggaaagggtgggaagcgggtgggggataaaaaaccacaaattgggttcagtgtacactgctcaagtgacaggtgcaccaaaatctcacaaatcaccactaaataacttactcatgtaagcaaataccacctgttccccaaaaacctatggaaataaaaagtttttgaaaaaaagaacaaaaataataaattcttccaaagacaaaaaagaattgatattgctattctggggtcgtttgtgtgtacgttgtatattgagtaattatgttagtcttgttgggaatataattttaagttttggagaaagagatacagctaagaaagataaggttaagtaaaaactccatgcttgtgattttgaagtggaagcatcagtatgaactcatgctattttttatctcaaaaaataaatattttctagctctctacattgaattggtctaaacattataaccaacccagtagcaacaagcacccctatcatctagaccatgatagctaaataccattttctactaagaactgggattccttggagaaatgactgaattcaaggttcgcgggggtatccaatcttttggcttccctgggccacactggaagaagaataattgtcttgggccacacataaaatacacaaatagtaacaatagctgatgagctttaaaaaaaatgcaaaagaatctcataatgttttaagaaagtttatgaatttgtattgagccacactcaaagccatcctgggccacatgtggcctatggcaagcttgttctaggacaagaaatgtacaaaatgtacatagatttaagttcaaaaatgcattttatatatatatatttctgagacagagtctcactccattacccagtctggagtgtagtggcatgatcttggctcactgcaaccttcacctcttgggttcaagccgattctcctgcctcagcctcctgagtagttgagactgactacaggtgtgcacaaccatgcttgactaatttttgtattattttagtagagacggggtttcaccctgttggtcaggctggtcttgaacttctggcctcaagtgatccttctgcctcggcctcccaaattgctgggattacaggcatgagccaccgtgcccagcctcagaaatgcataatttttttaagcttcttattatttactgttggaagacgctaggcagggataaataggtgcagcataaaagactttcagggcagtgaaactactttgtatgatacgataatggtggatacatgttattatacattttcccaaacccgtagaatgtacaacaacagtgaaccctaatgtaaactatggactctgggtgataatgatgtgtcattgtcattgttggttcatcagttgtaacaaatgtaccactctgaggcagcaggtggataatggggaggctatgcaggtgtgtgggctggaggtatatagaaaatctgcccctttttctcaattttgctatgaatataaaaccgctctttaaaaaaaaaggtttattagaaagagagagagtaagaataggaaagagaagatacctgtaaatttaacaagacttcagagacacatctcccatcaagcaattgcaacacatggcccttacttgctcccaatttgagcaaattaactgtaaaaaaattatgagacaaataaggaaaatgtgagcattgactagatagttgattcaattaaataatattcaggtgggataatatggttttgtttaaaaaaaaaagccctcctgcagagatacatagagaaatatttgcagatgaaatgatatattttgaatttgcttcacagtaatccagggttggagacgtgggtagggttacagatgaaactaaattggccttggccatgatttgataaaaactgttcaagttgagtgatggttacatgtgaattaattatgctttctcactgcttttgcaaatgttgaaattatctatgataaaaattgagtttttatcaaagttatgcaaattttgcatgtactctgatatacacctatgtttgtttcagtattaaaatgtaactttttttcctttgagatggagtcttgctctgtcgtccaggttggaatacagtggcgtgatcttggctcactgcaagcttctcctcttgggctcaagcgattctcttgcctcagcctcctgagtagctgggattacaggtgtgcaccaccacgcctgactgatttttgtatttttagtagagacagggtttcaccatgttggccaggctggtctcgaactcctgacctcaggtaattcacctgcctttgcctcccaaattgcaggtaattcacctgcatttgcctcccaaatgttggctcccaatggctgggcatggtgtgagccaccatgcccagccattaaaatgtaac

SEQ ID NO: 9216 - DNA, 6000 bp, Homo sapiens
gctactaaggaggctgaggcaagagaatcacttgaacccagaaggtggaggttgcagtgagccgagatcgcaccactgcactccagcctgggtgacagagcgagactccatctcaaaaaacaaaacaaaacaaaaacctccttctgcaggctttggggccacaccttcccacacaacttttctagtgcactgtggcttttgcagttctgaccaagcaggctccttgctattgatgcggctctgtggtgccagctctagaaacaaactaccatttgttgctttctaaaaaaaagccttttaagctccagacgacattgggcctctctctcctgagctgaaaggttggtttctttgaggtttccaaatggcagcttatgtcttctcagaagggctacagcccatttgttggaagccaaaaaccttacctcaatggcccaggtgagaggacatggctcagggttgcagtctgagtgtgaagcacataaacatctcccataataggcttggtggctgggcctggtggctcaagcctgtaatcacggcactatgggaggccgaggtgggtggatcacctgaggtcaggagttcaagaccggcccagccaacaaggtgaaaccctgtcgctactaaaaatacaaaagaaaaagaagaagaagaaaaaaaatttgctgggtgtggtggtgcacacctgtcatcccagctacttgggaggctaagtcaggagaatcacttgaacccaggaggcggagatatcagtgagccaagatcgtgccactgcactccagcttgggcaacagagcaagactccacctaaagaaaaaataaataggcttggatatggcagagggtgagagacaagtagctaggatctcaaggaagaaggaaaatagagatgtaacatggagctgaaaagaaggtgcaggaattgctttaaaagaaaacaaagagacagaaagtaagacgtgtaatttacaatgtcctgtaaaggttgcctcttgcacacatggactgaatgctgtgactacagaggcacttttcaaactagtacaagaaggaacaagattgcccaatggtgccatcacttagaaaagaaccctttattttacctccacctaattgctgtgcctttgcagtataagagggcttcaagtcttggttcggacggtcagtatgactctgtgccctcagtctccccatctgagaaatgaagattcctgttgtacctgggccagcttcatatgacctgagcaatcactcagggccctgtgttcaaagcattaaactatgcttggtttaatgctctgctattatcatcctggaattcttaataatccttgaacgaggggccccacattttcgttttgcactgggcaagtaaatgacgtagttagcctagttagtacctatctcaaagggttgttgtgagtattaatattttggaaacactttattatttggcacaccagtcatcattcactttaattccagctcccataactgtgttgaaataccaagtggctatgactgtttttattattcaaattccatcatagtagaaagcatttaaggaaaactgcctcggtggaaaagattatttctctccagaccccagattgattttacactgttcatccctctttgaaacatatattccttttcccacttttccgtcctatgagttgttatagtgcctcagagttaaggtatttgacctacaaagctcttagaaaagtgtggggtccagagagaaagataactgagcaattcagttttctcgcaagattccaaaattcttaaagagatcagattaggaccaaaatcttctgatttaacagtgaggggctaagggacaaaacagagggaagccagggagacgtccttcagaccctctcatagcccacgactgcccggtcgcattgtgctgtccatctgccttctaaacatccttccattgtggccgcttctcctcttctttctgggtgtacagcgagcacatcagcccaagcacagccataaacccctgactgcactctctccctcaccacggccatctccccagacccacttttcttttttgagacggagtctcgctctgtcttgcccaggctggagtgcagtggtgcaaccttggctcactgcagcctctgcctcccgggttcaagcaatactcctgcctcagcctcccgagtaggtgggactacaagcgtgtgccgccatacctggctaatattgtatttttagtagagatggggtttcaccgtgtgggtcaggctggtcttgaactcctgacctcaggtgatccacccacctcggcctcccaaagtgctgggattacaggcaccagccactgcagccggccacatgccatatattgtttatccattcatccactgaggttcttccatctgtcagctcttctaaataatgctgcaaggaatattggtgcataagtatctgtttgagtctgtctctgcttttagttatttggcacacatacttccagggcctgcttttgactcctccagtccatttgcactcagcagccgagaaggactttttaccaacacacatccaatcacatcacttttgtacttacagttctttgctggcttaagataaaagacggaaattctcaccaaagtctccagggccctgagctctggcctgcctacctccaagtcccctggctcttccctttgctctgctccagctgtctagacttttccccatccttcaagacagccatgctccttttggatttcaacatgctggtccctttttctaaaatgttcatcctcccgcaacacccgggttttgctagtttttgcttggccaattcatcctctagctttctcatccatcttgccttaaaatgctcctgaatatctcccttcctccctcgggctcagctccttcattcctcgcttctgctcccatggttcctgtctttcgtgactgtccgttcacggggcattattttccaatgtctgtcttccctgctgtaatagtaactgtatgcattcatccactggagttgcttccatcttttggccatcataaataatgctgcaatgaatattggtgtgtaagtatgtttgagtttctgctttaccaggtaagaaagcctggggatgctgtcacagtgagtaacagtgcccacttagacatttggaagccagtgcagacccacagggcagtgctgcccactcccaggactcgggagcatggctgcctccctgtgccaacactgtcagtcactagcgcagaacctggcacacgttggtaccaattcatatctaaactggatgaatgaacagacagaatggaaagtacaggagggacccgagttttggacaaacattacttaccctgtggctcctaagtgctgggcatccttacccacactcccagcttcagtttccctaacctagagagcgcacactaatatttatgttcaaatgttattggggaggttgagtttttatttaatatttgaatgtagattttaaaaatcattatgccagacaggctgggcctcactcgataaacactgatgtttagcatttaacacacttttccccagactggaagaagaggccgagatcccaattcggtgacccagcccttgctggagtactaggtggtatctaatgccatccacccttccgggatctttacggcccacctctgagtgggtcccacggggacctcagccgcattttctttctgcaggcctccctgcacactctggggcgttcgcagctctggagcccgcggggcagtgcgtccggccccgccctgggcctcattatctacgtttccgcgtcacgcccgccgcgaacttggcaggccctcccgccgggttcgggaacactgtgtgcctagcgcccgccctcctcccttccgccggccccgcgcgatccatagggtttgggtcgctgggcgccaggtacccgcacccggcaagcagccacggagcccctcgcgcacttgtcctcgatacccttgagttggggctacgcaggccactcctaggccactggctgggcgtccgaacgtgggtcaccccgcgcacagtctagaggttcagaaagatgctgtggcccactttaaaacaaagcccaattattagcgctcggcggctgtttgcgccggtgcagtgtcagatcccccagcgctgcggacaaccagcacccaaaggaagccgagctggagctaaagatcccggctccggagccatctgaccggttttgagacctccagctcgtcgccgtcctggctgcgagagcttgggcacggcgccggggctcagtctcctcttctgtggaatggcgataactgtatgtgccgggtgactgcacgtggcgcgcggcgggtggcggggatggcagcggtgcgatcccacgcctccaggaccccaccttcctgcggcccccgatcggccccgccccgggggcgccccagctgcacgcgcggcgctggctccaaagtgcgtcacgggcaccggccgcgctccttctgccgccagggcgaggctggcacccggccagcgcgggcagggccacgggtgcccggctgtttcccgggtgtggaaggcgctcaaggtgcgcggcccggggcgcgctactgggggcgccctccgcggtgggcagcgcgccagggatcggcctgggcagccgcggggcgcgcgaaggctgcgctttccctacggcccccctcgcttcctccggcacggcggcaacggagatttcctctcggggaaactacgcggatccttttcggggatcctcgccccgccccagttctccgccccctcccctttgctggggcgcctgggctggcccgcgcaggggaggaggctctggcagcctgggcagggaggcggcggggggccgcggagccgctggccatcgattctccccgccatgtgacgccgtccttagccctgcgacccccagcgcgtcccgggcctgcgcctccgccccgccgcgcagcgcacgatgcttctgccgggacgcgcacgccaaccgccgacgccccagcccgtgcagcatcccggcctccgccggcaggtagagccgccggggcagctcctgcgcctcttctactgcactgtcctggtctgctccaaagagatctcagcgctcaccgacttctctggtaagagcgccctccctggctgtgtgcccccggcaccgcggagcgcccaggtgaaccctcgactgggggcagccgcaccagtggacacggcggggtaggattaaagttgaggcgtgctcacagacacttgtctggtgtgagcccttggcatatagatggctgcgagtgaagtggcgacgggggactgccactcccaagaaggaagggtgtgtaatgtattcagagtttctcgccctgctgttgacctcgtcaatttcctagcattagggacctggtcctgagccacgctcgttctatggaggctccttaaactgagccctgtgccgcgcccagcgctgtaaaatacacgtgttgtggtcggaggcgttgcgccgcgtttgtcacccgcgtagcccgtttgcccatgtaaggagactagcccaggggacacttgacctcgagtccacattggcaggtagaaagggaagcccgcggggactggaggtctggtggaaaggcagtgagggatgaggagatacttagataagagagaggagcctctctgccaaagtgtaccagggtcctccctctccaattccagtttccttcacagaaaataatgacttcctactctcgaataaactaggaggcttttctttttgggaatcgtgatccaggctctcgcagcggatctcagatagttctgagcttacaggtgtgacgccccaaagtgaaagggatttctaggttgacgatagccataggagcacatgcttaagttagcgctgcagttgcttaaggtaacacatgtccttgccgctgaagcacacctggatctccctctggcaaggctggaggcct

SEQ ID NO: 9217 - DNA, 6000 bp, Homo sapiens
ttcatttaaccatttctcagctaaagggcatttggatttcttttccttttcttttctttggtgatgatgaatagtacaataaacatttttatatggatcgtctttttgttttggattatgtcagtggaacatatacacaaagtggatttatcctataaaaagatttaaaaaggactaggcacagtggctcacgcctgtaatctcagcactttgggaggctgaggcgggtggatcatttgagcccaggagtttgagaccagcctgggcaatataaggaaaccttgtcttagagaaaataaaaataaattagccaggcatgctggcacatgcctgtggtctcagctactcaggaggatgtggtgagaggattgcttgagcccaggaggtggaggctgcagtgagctgtgattgcgccactgcactccagcctcggttacagagtgagaccctagctctaaaaatatataaatatcttaaaaatataaagaagcagccaaaggagaggaagttaagaggagtaagtcagaacatagtctatgtggccagcagcctgcctggtttgaaaggcagctgctcccactcactagtcacaaaccttgagcaagtttcttaacttctgcacctcattttctcatctgtaaagtgggcataagaatagtaagcctggccaggcgcggtggccacgcctataaacccagcacttcgggaggccaaggcaggtagatcacgaggtcgggagttcaagaccagcctggccaacatggtgaaaccccttctctactaaaaatacaaaaatttgccgggcatagtggcgggcgcctgtaatcccagctactcaggaggctgaggcagagaattgcttgaacctgggaggtggaggttgcagtgagccaagaccgcactactgcactccagcctgggcaacagagcgagactcccgtctcaaaaaaaaaaaaaaaaaaaaatagtaagcatacctcatagagcagttgcaagggaaaggtaaattatatataaagcaccaagagtcatgcccagcatatagtaagcatggtgtaactgttagctgttattattgctgtcatcatcatcaactgcatcatcattcaatctcattaagtttattttttatttttttagaggcaaggtctcgctaagggctggaatgcagtggctattcacaggtgcagtcataatgcactacagtctgaaactcctgagctcaaacagtcgtcctgcctaagcttccccagtagctgggattacaagcgtgcatccctgtgccccagtgattaagttttattatgtagaaaataaagagcaaacagtacagctgatacggactctctctctctttttttttttttttaagaattttcataactttttagcctggccatttcctaacctgccaccgttggaagccatggatatggtggaggtcatttacatcaacagaaagaagaaagtgtgggattataattatgatgatgaaagtgatagcgatactgaggcagcgcccaggacaagtggcggtggctataccatgcatggactgactgtcaggcctctgggtcaggcctctgccacctctacagaatcccagttgatagacccggagtccgaggaggagcctgacctgcctgaggttgatgtggagctccccacgatgccaaaggacagccctcagcagttggaactcttgagtgggccctgtgagaggagaaagagtccactccaggacccttttcccgaagaggactacagctccacggaggggtctgggggcagaattaccttcaatgtggacttaaactctgtgtttttgagagttcttgatgacgaggacagtgacgacttagaagcccctctgatgctatcgtctcatctggaagagatggttgacccagaggatcctgataatgtgcaatcaaaccatttgctggccagcggggaagggacacagccaacctttcccagcccctcttcagagggcctgtggtccgaagatgctccatctgatcaaagtgacacttctgagtcagatgttgaccttggggatggttatataatgagatgactccaaaactattgaatgaacttggacagacaagcacctacagggttctttgtctctgcatcctaacttgctgccttatcgtctgcaagtgttctccaagggaaggaggaggaaactgtggtgttcctttcttccaggtgacatcacctatgcacattcccagtatggggaccatagtatcattcagtgcattgtttacatattcaaagtggtgcactttgaaggaagcacatgtgcacctttcctttacactaatgcacttaggatgtttctgcatcatgtctaccagggagcagggttccccacagtttcagaggtggtccaggaccctatgatatttctcttctttcgttcttttttttttttttttttgagacagagtctcgttctgtcgcccaagctggagcgcaatggtgtgatcttggctcactgcaacatccgcctcccaggttcaagtgattctcctgcctcagcctccctcgcaagtagctgggattacaggcgcctgccaccatgcctagcaaatttttgtatttttagtagagacaggattttaccatgttggccaggctggtctcaaactcctgacctcaagtgatctgccctcctcagcctcgtaaagtgctgggattacaggggtgagccgctgtgcctggctggccctgtgatatttctgtgaaataaattgggccagggtgggagcagggaaagaaaaggaaaatagtagcaagagctgcaaagcaggcaggaagggaggaggagagccaggtgagcagtggagagaaggggggccctgcacaaggaaacagggaagagccatcgaagtttcagtcggtgagccttgggcacctcacccatgtcacatcctgtctcctgcaattggaattccaccttgtccagccctccccagttaaagtggggaagacagactttaggatcacgtgtgtgactaatacagaaaggaaacatggcgtcggggagagggataaaacctgaatgccatattttaagttaaaaaaaaaaaaagcaaacacaaagatgcttcaagatcttcaggagaagtatggtatacaagtttcagggaccctatttgacaattttcagagtgctctctatgctgattccgagtcgagtgtgtcagctgtgattacagtgcctgtggatctaggccgggttgggggggtgtgggcgggggaagggaagtctggcccggagcaattgctcctgccggtaaccccagcactttgggatgcctaaacaggcgtatcgcttgaggccagtaattcgagaccagcctgggcaacatggcaaatctgtctctacaaaacaaaattagaaaaattaactgggcgtagtggcatgtgcctgttgtcccagctacttgggaggctgaggtgggagaatggcttgagcccaggaagcggaggttgcagtgagccaagatcatgtcactgcacttcagcctgggtgacagaaccagaccctgtctttaaaaagggagttggtggggagaggttctagaatgtcatgtagcaaccagtttaaggactgggactcagggatccaactcccacagtttccctgtgtgaccctaggcatttgacttagcctttctgagcctcaggttttttgtttctgaagtaaaaggattggactaggtaatctccaagatcctaggaacccaggagaaagatgagaaaatgtacaagaatgaacactcaggtggaaatgctgcaatcctgagaagctcccaggatgaatgaaaggcacaggacctcttacccctcacccctgcccccctcaagagctggtttctcaaacctttctcttaggccccttcaaagggggaaaactaaaaattatacaagttatagttcaaggactttaaatagattatttatatgattgctcataaggatgaggctgtgaggagggaacaccttatttaatctaatgaaattccataggaaagaggccttttgtatattgaatcaatttatctgccttctcagtgcatctgtcatattctgaaagattctgggttgatcttttgcgataacctctatggctgtgagtgtgtgtgtgtgtttgtgtattttttaacattttgtataatgattggaggttggtaaaaagtaacacaacagtacttttttaatacaaacttggtgtggtcttgagttgtcttccattggagagcgtacgtgtgccacagattggtgcacctgccggcatctctaggattgcaccaactccctctagctcttcttggtggcctgcaggggcctagggcgcattcacttccctctgcttgactttacgtggtgttctagcgtcagacatcaggcgatgccgtgcattacccaagacactggacagctccggatcttcccgtctaaccactaatcaagttaaaaagaggaaattaacgctttcttagtagtctctgaaagaaactagttatttgcgtaaagatgacttggttttgtgttgtttatccctggggagaagggtaaagaagaccctcaaactggatttgctgctgaagtgcttttaactcacctgtgcggagagcggacttcaagagagggcgtgccggtgctccggacaaaacctggggaatactgaaagccaccaccaccaccgtcattccagcatgcagatctcagtcctgggttggtgttgtagggcatttatttatttgacttgacggcgcctttcaaagcttgcgaggatcccttcctcttcctcgtgtgcatctgccaagcctgtgccccgcgcctcgcgggtggacccgggctggtgggcggggcctgcagcggggtgggagcccggtcgcccggcccctccccaccccgccccgcccatctccgctggttcccggaagccgccgcggacaagctctcccgggcgcgggcgggggtcgtgtgcttggaggaagccgcggaacccccagcgtccgtccatggcgtggagccttgggagctggctgggtggctgcctgctggtgtcaggtgaggggtccgcggggagggggcgcgcttgggaaccgggaggccccgcgagatgccgcccctgatcccatccctgggcgccctgcaagtgacttaagagccttcggggcctcgggagagaagatgcaaacgccacggccggctgctgagacgcaactaggctgctgctgccgtcgattctgtaacaggagaaagccccatccgcgcccggattacagaccgtctgggccctaaactcagggggagactcccggcgtcttttgattccctgtcctcctgcagctctctgctggcgggcgtctaaataaagtagcttccccaaaagacccaagatcccaccgtggctgtcatctgacccttctggagactatcagttcaagtggaggcccccaccagtccccgagtgccctgacagccctccctgaccccaagtctgccccctcagtgccagccctccctacagatgtgcctcccatcacccgctgcacctcccctccttccggttcaggcccgagcaccctgaaatctggattctgtcccccagcgccccagctccatggcttctaaacctaaatccattgaaaccttttctgtcctctaaattgactgcctaggttccaataacaccatggtcacctccttcctttctcatgaactcttccctggccttccgggatacccctccggtttcccgccctgtcaggctgtctctgcttgggaccctcctgctctgtcaggtttctatgtagctaattgtgatgcccaaggccttttctctccttccctggcactgttcctttgggggatttcagccaaaccctggcattaaacacgggctataggcccatgactcgcacatttatatctctcttggtaccagttgggtgatgggtggtggtttattat

SEQ ID NO: 9218 - DNA, 6000 bp, Homo sapiens
aggccaggagttcaagaccagcctggccaacatggcaaaaccccgtctctactaaaaatacaaaaattcgccaggcgcagtggcacacgcctgtagtcccagctacttaggaggctgaggcagaagaatcgcttgaactgaggaggcagaggttgctgggagccgagatcatgccactgcacttcatcctgggcaacagagcaagattccctctcccctccccaccaaaaaaggtgaaaaagaacatgctgtatggaaaaactgcaagtgcagcctctaatggaccgttttgactagaataaaggagagaagggaggttctgggttaaggttacagagcttgcaccacaggggaaattaattcatgtcttatccttaaataaattattacagcaaaaaagttgaaactaaagtacacgaagtacttaccacagggtgtcacagctgtggcaaattttattaaagcacaatccaattttattaaaatacaattcaatgtttataataggttgtattaagatggggaagagtgaaaatcttaggaaaggaggaagaaaaggaggggaggaaattgtcaatgtgtttaaaaatctaattaaacttttcagtcattttgagctcattgttctaaatataaaaatgcatcctattccaactagtttgcaagaacttttggacagcaggaaatggaaattttaatttaaacatgcagagtcgttcaaaaggcttttaaaataagtattattttgtaattgcaaccaggaatttttcctcttccatttggattcacgtatcttcatggggtgtttttccacctttggtgttgttaaaacgaagtactgacacactcaaaatcaaacccccaaatcgatgaatcgtaaagtgataattcaaagttttttaaacgatacctaacagctggatagattgcctaaaaatcattattcactcaaactgggtgaatttcaagatacataaattatacctctaagatgtttttaaaataggcatatttcccctgggcgtggtgactcacgcctgcaatcccagcactccgggaagcaaaggtgagcggatcacttcaggtcaggagttccagaccagcctgggtaacacagcggaaatcccatctccactaaaaatacaaaaactagccgggcgcaatagcgcacagctgtaatctcagctactcaggaggctgaagcaggagaatcgcttgaacccggaaggcggaggttgtggtgagccgagatcgcgccactgcactccagcccgggtgacagagcaagactccgattcgaacaatgcaatggaatatatacatatatgtatatatggaacatatatacatatgtggaacaaatacatatatggaacatacatatgtggaacaaatacatatatggaacatacatatgtggaaccaatacatatatggaacatacatatgtggaaccaatacatatatgcaacatacatatgtggaaccaatacatatatgcaacatatatatgtggaaccaatacatatatgcaacatatatatgtggaaccaatacatatatgcaacatatatatgtggaaccaatacatatatgcaacatatatatgtggaaccaatacatatatgcaacatatatatgtggaaccaatacatatatgcaacatatatatgtggaaccaatacatatatgcaacatatatatgtggaaccaatacatatatgcaacatatatatgtggaaccaatacatatatagaacatatatatgtggaaccaatatatatggaacatacgtatgtggaacatacatatgtggaacatacgtatgtggaccatacatatgtggaacatacgtatgtggaccatacatatgtggaacatacgtatgtggaccatacatatgtgaaacatacgtatgtcgaccatacgtatgggtcccatatacatatgggacacatacgtatggaatatatatatgggacacatacgtatggaatatatacgtatatatacatatgggacacatacgtatggaatatacatatggaatatacatatatgggacacataagtatggaatatatacgtatggaatatacacgcatggaatatatacgtatggaatatatatgtatggaatatacacgtctggaatatatatgtatggaatattcacgtatggaatatatatctggaatatatatatatggaatatatatctggaatatatatatggaatatatatctggaatatatatatatggaatatatatctggaatatatatatatggaatatatatctggaatatatatatggaatatatatctggaatatatatatatggaatatatatctggaatatatatatatggaatatatatatggaatatatatatatggaatatatatggaatatatatatatggaatatatatatgcaatatacatatatggaatatatatatgcaatatacatatatggaatacatatatgcaatatatatatggaatatatatatggaatatatatatggaatatatatataatatatatacggaatatatatatacggaatatatatataatatatatacggaatatatatatacggaatatatatataatatatatacggaatatatatatacggaatatatatataatatatatataatatatatacggaatatatatatacggaatatatatataatatatgtatggaatatatatatacggaatatatatataatatatgtatggaatatatatatacggaatatatatataatatatgtatggaatatatatatacggaatagatatataatatatgtatggaatatatatatacggaatatatatataatatatatatatggcatatatacatggaatatatatatatggaatatatacatggaatatatatatatggaatatatacatggaatatatatatatggaatatatacatggaatatatatatatggaatatatacatggaatatatatatatggaatatatacatggaatatatatatatggcatatatacatggaatatatatatatggcatatatacatggcatatatatatatggcatatatatatatggcatatatatatggcatatatatatatggcatatatatatggcatatatatatatggcatatatatatggcatatatatatatggcatatatatatggcatatatatatatggcatatatatatggcatatatatatatggcatatatatatggcatatatatatggcatatatatatggcatatatatatggcatatatatatggctatagagatggcatatatatatggcatatagagatggcatatagagatggcatatagagatggcatatagagatggcatatagagatggcatatagagatggcatatagagatggcatatagagatggaatatagagatggaatatatatggcatatagagatggaatatatatggcatatagagatggaatatatatggcatatagagatggcatatagagatggaatatagagatggaatatagagatggaatagatatggaatatagagatggaatagatatggaatatagagatggaatagagatggaatatagagatggaatatagagatgggatatagagatgggatatagagatgggatatagagatgggatatagagatgggatatagagatgggatatagtgatggaatatagagatgggatatagagatggaatagatatggaatatagagatggaatagatatggaatatagagatggaatagatatggaatatagagatggaatatagagatgggatatagagatgggatatagagatggaatatagagatgggatatagagatggaatatagagatgggatatagagatggaatatagtgatgggatatagagatggaatatatagatggaatatagagatggaatatatagatggaatacatatatattccattgcattgttctttacaaacattcatttaattatgtaattgctaattaattgcttggttgttataacaacgaagtatttgattccttattttatctcatcatttaaattttatttcgcatattttcacaatgcactggatctattactgaggaatttaattaaataatcattcgaaccatgggctcgaattgtttactgataaagcccgacgaccaaaacagcctagcgactgctgtttggagcccctcggcccagggcccgtggctgttctctccaagggaccatctcgcccctcagccaagtcgcccggaaaacgagcgctcgaccgcctctgccccgctctcgctctgcacacagcaacggtctggtcgctcagccacttcctccttccagcctcatctggttcccaggccgctggggactcccaacgccactgtccaagactctagggtcagcaagcgccccgggcggagaagggcgaggacgaagagcgccgggccgcgaccaggagcccacccgcgccctccgactgcagacatggggaagagacgcgggaactccaaagtcgctgggtctgcgcaggtgtgtgccgcgatcctgtgaaggtcaaggcctcctgtgagggggagtcgtcctggaatgcgatggtgaagtgctccagaccggccataggccggaaagagtgaggaagaagagaatgcaggaggcctgcgatttctaaggcgcgcgcgcacaggggtgctgcaattaggatggggcaatgggagcttggagaaggggtgctagctaggaggaaaggcgcgtgcgtggaggaacggcgcgtgcgcggaggggcggtgtgtgtgtcagaagaggcggcgcgtgcgtagaggggcggtgagagctaagaggggcagcgcgtgtgcagaggggcggtgtgacttaggacggggcgatggcggctgagaggagctgcgcgtgcgcgaacatgtaactggtgggatctgcggcggctcccagatgatggtcgtcctcctgggcgcgacgaccctagtgctcgtcgccgtggcgccatgggtgttgtccgcagccgcaggtgagaggcggggaggagagtcttggcgcagggcgggaggtagggcacgcagctgggctacgggggcggcgatgctgttgggggcgacagacgcccagtctgggaaaccttcggtccactttgccgcgccaaagattaaacccgacctgggctcgcaaatcaaccaggagaaagtggtgttctgggtcctctcttgccgcttgcctgtggccgtgtacgggtcctcgggagcgcccgggtcccacccccgtgaaatggcggtgccagagctttgtgtcgagtttgattctttccgggaaagtaccgcggctccgctggtctgtttgataataaacaaaacatttcccgaaatgcatttcctcaatctggtgaataggcgcccagtcccacgggggagtgagctaagtgtggccaggatttctctgccctcaggattcatacaggccaataaaaaatgacagtcggagtgactgaagcataattgtcagttctcgaggtttactaagcctgcttcagggcgcatccgggaaaaacgtgagccacaaacacgtctgtgactggttttccagaggttttcaggaggtggggcaggaaggcagtaaggcaaatagttctgtgagaatttagttagtgcccaagaaatctgtattttaagataccatgagtgtcttgaagagaaaaagagagtaaagggagtcagttatgcagatgcctctgggtagatggagtcttgactttgttttgcacctgagaagataagcttgtaattgacatggtcagtgtggaaggcctgaactagtttttcagattaactttggaatgccatttgttgagaggagaggtccattcacattgttggggggcttagaattttatttttggtttacttaactacctacttttttcc

SEQ ID NO: 9219 - DNA, 6000 bp, Homo sapiens
catgatgagaagtttgctgtgaaatgcagggggctttggcactagacaggcctggctaggagcccacactgccactcattggctgtgtgatttggggcatgctcagccagattttgatccaacaagcaaaaccatcatgtgatgtgatgtgtgtgtgtgtgtgtgtgcgtgtgtgtgtgtgtgtgtgtgtgtgtgtgttgttatattacagagatttgacctcacataaacatgagagatgtgtgcacagtccaggagagacaattttcccctgtccggtgctggagcctgaagtcctcagggcaggaggccgggaagagaaggtggacaagagatggaggaagcagggacaagctgaaatctaaggctcagctgccaccctcctcaccctgctctccatctccacacctccagcttacacgaccacatgagatccacggggagctggaggagcctggagcctgtctgcatccctgccatctaggacatcagcagagaagccacaggtcgggagctgcaaagatggatgccttgtgccctgccccagcctcccaagggtaaaggaatatggctgcacctttccttccatcttccaagtctcgcacattgctagggtttgaatgtgtccccaaatttcacgtgctggaaatttgattcccaatatggcagtatggaggaatgaggcctttcagaggtgattggttatggtgatcctgccctcatggatgggtggattcattcatggactaatgggttcatggaccaatggttatcatgggagtggggctggtggctttataaaagaggggatgggcatggtggctcactcctgtaatcccaacactttgggaggccgaggcaggtggatcacttgaggtcagtagttcaagaccagggcaacaggtgaaacaccaactctactaaaaatacaaaaattagccgggtgtggtggcaggtgcctgtaatcccagctacttgggaggctgaggcaggaaaattgcttgaacccaggaggcagaggttgcagtgagccaagattgcaccattgcactccagcctaggcaacagagtgatactccatctcaaaagaaaaaaaaaaaaaagaggaagataaatccgagcaccttagcaccctcagccccccttgccatgtgatgccctgaccacctcatgactctgcagagaatctccaccagcaagaaggccctcaccagatttagtccctagaccttggacttctcagcctcccaaaatgtaagaaataaatgccttttctttatcaattacccagcttcagatattctgttataagcaacagaaaatggaccaagacacacacaaacatccttccctgcccatgttacctcagaacttttcagggaggggaattctaggaaatgcagttacagtttagcagacctactgcagtgcaaacccaccacaggccaagtcactgaactctgctagtgtccccatgggacagccatcgcctgcctaactgggaggtctgagtgttataatacctagagaagcaccactggccagcaaaaaatgttggcttctttctgccatcccccacccactctcctgagggaggtgagaggagtccctctaggctattagaaatgcttcaggaagatcaactgattacaaggtaaggaattaatggaaagggatggtgcagattcagggtttgtagggctgaagtgtatataatagatggagccctctttataaacaaatacacaactcactataaaattaggcacaaaagtatttctttttcttttcttttttttttttttttgagatggagccttactctgcactcaggctggagtgcagtggtgctgtctcagctcactgcaacctccatctcccaggttcaagcaattgtcatgcctcagcctcccaagtagctgggattacaggcacctgccactatgcctggctaatttttctatttttagtagagatggggtttcaccatgttggccaggctggtcttgaactcctgacctcaggtgatccacccacctcggcctcccaaagtgctggaattacaggtgtgagccaccacatctggccaaaagtatttctttagaatgatatacaggttacaattttttttttttttttgagacagagtcttgctctgtggctcaggctagagtgcagcagcatgatctcagctcacggcaacctccacctcctgggttcatgtgattctcctgtctcagcctcccaagtagcagggattacaggcacatgccaccacgcctggctaatttttgtatttttagtagagacgagtttcaccatgttggccaggctggtcttgaactcctgatctcaggtgatccacctggctcagcctcccaaagcgctgggattagaggcgtgagccaccgcacccagccatcaaagatgtaaccttgaaacaaactgcagaagccttttcccttagccttaaaatggactccatgtccctcccttcttcaccgtataaactcccttcacatttatctaactgtatgcccgtgtctagttacgtgccttcttagaggttccagacgctaatcttgagacagacagaccaagcctggagattcttctgcaaaattccacatgtgacctcaaggcgtctaattaagaatccagccattgttgagatgatgccagaccacaggcttcctgtggactaggacccaagacagccaccggaacaagacaaacagacagtgtacttagcataatccttgcctgacttccacatcgttttcccgttttaaacccttgccttggccgggcgcggtggctcacgcctgtaatcccagcactttgggaggccgaggcaggcagatcacgaggtcaggagatcgagaccaacctggctaacacggtgaaaacccatctctacaaaaaacacaaaaaattagccgggtgtggtggcgtgcgcctgcagtcccagctactcgggaggctgaggcaggagaatggtgtgaacccagaaggcggagcttgcagtgagcggagatcacaccactgcactccagcctgggtgacggagactctgtctcaaataaataaataaataaataaataaataaataaataaataaataaaataaataacccttgcctttcccactccccataccccacaattcaacgtgattgctttggggataggaatccaaccacttccccttgctagctttggaaataaagtcactttctttccaccacatcttgctcttgttagactctgcaagcagccagcgactgaaccagcattcggttacatcccctgaggcggatgacacttgtgtgatcctgtaaccgatttcttgttagaatgttggcatctttcacccagtcgttttcttgtaattttatttatttgtttgaaaacagaatccttcttgcaatcctgtcattttcagtgccttttttttttttttttttttttttttttttttttttttttgagacggagtctcggtctgtcacccaggccggggtgcagtggcgcaatctccgctcactacaacctccgcctcccgggttcaagtgattctcctgtcttagccctccaagtagctgggattacaggcgccggccaccacgcctgactaatttttgtatttttagtagagacgggtttcagccatattggccaggctggtctccaactcctggcctcatgtgatccgcccacctcggcctcctaaagtgctgagattacaggcgtgagccaccgcgcctggcatcagtgcatactttttgaagtgattccaagttatcgcccgcttttttcgtgtaacatataaatacatctctgtatctagaaatatccaatgcataattcaattgtctgcgaggtatttcatcacgtattttcacgagcgtggccaatttcaaaatagttctacaaagaggaaatgcaagaatgtgggaagagcaaaagaaaagctctatgttgcaaaacccatttttgctaacgtgtccagtgggctcccgggacgacctgtttttaaattcttggtctccctgcaccgcgtccctcctttgctgcgctagctttatgacgcatcttggaagaacagggcagatttaaaaccctctcccaacaggcgtcaaacgacatggtgcaggctcgggctggggagcgggcctgcggctgcccagctgctaaaggacttcctactcgtgcaccgccgccggctccagggcaaaccccacgccatttagaaatgctggaagtttctgtctctccctccccctgctcggaggccattccccccacccccagagccccacctcctccttcactgggccctttctaactccttccccttaaaacccttttcaaaatggggttgactggaggcggaggttgcagtgagccgagatcgccccactgcactccagcctggtgactccgtctcaaaaaaaaggggaggggggcgggggagagttgaaagcttaatatgtactttgggggctattaaagcaaacatttcgactaaaggggcgaatcctcgaattgtgcgatcaagcacccgagaggagagttggggggggtcaggaggggtgggggctccagggaaagcccgggggtctgggccggggtctcgcggggcccttccggaaggatcgcggcccccgaaggtgggcgtcccgcggggctccagtctccaggacgttccgggaggctccgcgctctgggaggccggctgcgtggggtccccgcgctgcagccgcagaggccccccagggccgcggttcccggagcgggaaagtcccgcgcgggggcggtggcctcgggggcgggacggggcgggggcgggggcgcgggcggccgagccgaatcccctccaccgggacgccccgctgctgctcgggaagaggcgggccctgcgcgccctgcgctcgccatggcggtttgggcggcgacgtgagcggctccgcggaccccgagcggggccccggccgcgacctgagccgccgccgagcgcccggggccatgcgaccgacgctgctgtggtcgctgctgctgctgctcggagtcttcgccgccgccgccgcggccccgccaggtgagccgggcctgggcctccgcggcgggacgcgggcgcagccgcagcatgtgggggctgggggactcccggatcgtggggtggggggaatctgccgggtgctcagagtgggtgggaatctgcggggtgctcctggtgggtgggatatgcggagtgctcagatcaggtgggaacctgcgggtgccccaggtgggggtcttgcggggtgcccagggctagaggggcccgctgggagcccgcagcggggctgggatgggcggccaggagttccagacaggagctgggcagcagcaggaagacggggggcacccctcctggcgtcctggccgccgggacacccctctccgggagaggacactcggtgcccctccgtgaagccggtaacctcggctgcgccacctcccccacccgcgcgcccgcgccgggaaagccagcgtggccccagtctccgaatttctcggaatgaacaacagcaaattgaatccagggctccggcgggggccgcctttgctggccactggttctgcagcctggcgagactgcgcttagtccccgcctggagtgcctcccgaaggcctggctggaagctagactcagtccctttgtagtagcagcggtggagcagggaccagcgtcttggacgggtgacccagactcaattccgactttggccgagggcatgtttgacactgggtgtgaaatctagacagttcccgcggtcatagagatggggcagcagcattcaggcagggctcagaactgtccgggtcccatcagtgttggggcggaagaggaagagtgtcaactgagccaggcatttatttattttattgttgtttgagacagggtgtcgctctgtcgcccaggctggagtgcagtgggcagcatctcagctact

SEQ ID NO: 9220 - DNA, 6000 bp, Homo sapiens
tgactagatttctaattcactaatcctctcttcagctttgcctatgctgctggtaaatccatccactaaattgatacatttaaaaaatagatttctgcggagattctatttattcttgggctgactctggaaatttatatttttctggcaaattatatatttcatccaaaacttcaaattgtatttccagagtgactttttatttagttgattctatatttatttgttttctcttttgttcctttctgtttttgttctaaagtttcatttattctacatttttagtttattttttggttcttttgctttttgagtttaatgagttcctattattttccttttatttatttttattttttagagacagggtttcactctatcacccagactggagtgcagtggcaccataatagctcagtctaacctagaactcctgggctcaagcctcttcccacctcagcctcctgagtagctagggctacagctatgcaccaccattcccagataattttaaacaatttcttttttatagagatagagtctcagtgtctcactatgtcacccaagctgttctcaaactcctggcctcaagtgatcctcctgcctcagcctcccaaagcagtgggattacaggtataagccaccatgcccagcctcttttccttttagtgaattcatttactgtataaatttgcctctaaggttcacattgtctgcatcccagaagttttcaaatatatggcagttcctttgtaatttaatatcttattatttatgtgttttcctctttatccatatgttacgtgatgatatacttattttttggttttcagatatatcaaggtgtacagactatatttttgctgatttataattcaactgcattgtagtaatggaacccagtctacataaagctgatatttaaaaatttggttggacttcttttgtgacccagcacatggtgagtttttaaaaccgttttatggacacttataaagaatgcacatcatttgttggttaggtgtgggttctctccatctattttataaaggtaattaattctattactcaattctatatgtttactttttaaaaaaatctatcagtttctgaaacctaattcctaccattgtgcatgcctcaatttcttgtaaatctgcctgtttcactttgaatattttgagtccatatacaagcccatgattttactatcttcttcgcaggttgtttcttttatcaaattgtagtgacatttaatatcctatggatcacctgaaatttcagtttttcttagatgtctgcattttagccttagcttgatatgttttttcatcaccttattttcaactttttatttgtttttattttagatgtgcatctttattttgtattttattttttgagacagagtcttgctgtttcacccaggctggagtgtagcagcgtgatcttggctcactgcaacctctgcctcccaggttcaagtgattcttatgcctcagcctcccaagtagctgggattacaggcatatgccaccatgcctggctgatttttatatttttagtagagatgaggtttcgccatgttggccagggtggtctcgaactcttgggttcaagtgatccgcccgtctcgccctcccgaagtgctgggattacaggtgtgagccaccagccccagcctagatgtttatcttttaagaagcatatagctagattttattttgttattcagtttaataatacttcttttaataggtacttattttaaaggatattgtgattatagatatattcagatattatcttagtcattggggcagttatagtaaaaattataaactggatgacttataaataacaaaaagttattgctcatagtttggaggctggcaggtccaagaccaaggcactggcagatgcggtgtctggtgaggtctccctctttgattcatagaccgtgccttctagctgcgacctcacatggtggaaaggggaaggcaacctccctgtagcctcttttaaaagggcattaatcgcattcacggggtctccatcctcttggcctaaccacctcccaaaagccctaccttttagtaatatcacatggggagttagaatttcactatatgaattttggggggacacaaacatttatgccacagcagatatctttctaccaccttatttggtgatttctgggttttgtttgtttgtttaagacagagtctcgctctgtcggccaggctggagtgcagtggcaccatctcggctcaatgcaaccttcgcctccccggttcaagcgattctcctgcctcagcctcccaagtagctgggattacggacgtgtgccaccacgcctggctaatttttgtatttttagtagagactgggtttcaccattttggccaggctggtcccgaactgctgagttcaggtgatccacccgcctcggcctcccaaagttctgggattacaggcgtgagccaccatgtccggctggtgatttctgtttaaaagttttttcttaaagtgttttttcccacctagtttttcattgaatgggtaaaacattctacatttgcttttattaaaacaagaaatgaattttgctgcatttcaatttatagattttactatcctacctcgtgccaggttctgtgctaagtgctgtatatatctgtgatcacatttaacttttataacaagccaaatgagcaggaactcttatctctatcttacagacgaagaatccaaagaccagggacagtaagtaatttgctcacctggtttgccagcctccatgacacatcgccgtccagttctgcctttaattaccaaagcacaacacgctgctttgattcccctctcctcggcgccagaattcaagagtgaagttaaaccgcaagggctgagttagaagattggcctcagttccctgttcccaccagcaggtggcaccgtctcctagcggaattcttacttgaacgttttgcttccatttctgcagaggcatggtgaacacagttacaccaccaaagtgttcctcctggctgagtttgcctatcttgttcagtgaagacaacccatgaggacaaatggtgttaatgagaagcttttgcggagttacagagatcctcgtatttctttaaaatacacctaataacgttaactctgcaataatttgtagatcatgttaaatcttagctatcttcctcttgccacccagtgtgcttcaagccacatggttcagagcaccatttaatgtgaaactccaattttaaaacaaagtgaaccttccttttacaaaaccatgagacaagttacagagtaatgaccacccacatgaccttgaagtgattttgagtgagtgagtgtaacttccgtggctgccatttaaattggattcaaatccaaatggctccacctccatgtcatcagacctcttgtgccctgattcccttggctaagttcacagtaccttccacatcaggttgtggcaatgattacctgaggttaatacgataaaagcacatggtaagcactcctaaatgatagccaatataaagactcagttctcccaattccaagggtccccaccatgatagaaaaggatcttttggtaaatagagtatgtttagctcttgctaggtctttaaatactttgctgggggccaggcaccatggctcacacctgtaatcccaccgccttaggagactgaggctggaggatcctttgcggccaagagtttgagaccagcctgggcaacacagcaagaccctatttctacaaaaataaaaataaaaattaaccaggctttgtacacacttgtagtcccattacttgggaggctgaggcaggaggatccctcaagcccaagagttcaaagctgtagtgagctatgattgcgccactgcactccagcctgggtgacagagtaagactctgtttcaaaacaacaacaacaaacaaaaacctcaaaacctctttgttggacttaacttccagctcctccatgtagtaccttagtacccttgcagcccgtttctcttttacaagacaacaatgttgttataaactcatttggatgtggtcccgtggaggagtatttaccagaatctagcttatttagcgtcttcagaacacggcacttgcctggaattatactgaccccctcaacccataccaaccacccagagatggctgttcttggctcctctccctggggccctgtccttcccacatcgtcttcttcttctttcttcttctttcttcttccttcttcttccttcttcttccttcttcttccttcttcttccttcttcctcttcctcttcctcttcttctttcttctttcattgagacagagtctcactctgtcacccagcctggagtgccgtggtatgatttcagctcactgtaacttctgccttgtggattcaagtgattctcctgcctcagcctccagagtagcagggactacaggtgtgtgccaccacacctggctaatttttacatttttaagtagagacggggtttcaccatgttggcaaggctggtcttgaactcctgatctcaggtgatctgcccgcctcagcctcccaaagtgctgggattacaggcgtgagccaccccacccagcccttcccacgtattctggcagggaatgctgttgtcccccaagcctaccctaagaggaagacttcttctggggaaagatgttcactgtacccaggccctgccctggctggagctggcaggaagggtcccagagcaggaacttgtgccactctgcccaaagccagagtccctgaggcacacaccccatcaggcaccaaggtgaattccaactgccagttagtatttaactttccacatacgattagattaaacatgtgggttcataaaagcataggattgcagactgcagttgcaagggcttagatggttgtaaggtgaaggtgcccagcaggctgaggcttgtgtgcaacccagaagagagctcgctaacgccagcaagaaggttcagaacagcctggctttggaaaggaatttcatcctgcccacacactgcataggtaagtcttagcacacattctttattttttgaggaattaagtaacaaagttatctatgtgccttttccagaaaatgataaaaggaatgattttcctggtacatggcctggctcctcatccactcttccttctttccttcttgtgttttccttactcatttctttgttaattgccttagaatgaaaattttgagagtttttaaaatggaggattcatggtaaacgtaggtaatcatattgttttctcttcttgatataaaaatgaaagactttgctgccttttataggcccaggtgatgtgagcgatctaccatgtttcaagaaaagaaaactttggggctgggcgcggtggctcacgcctgtaatcccagcactttgagaggctgaggcaggcggatcacctgaggtcaggagatcgagaccagcctggccaacatagtgaaaccccatctctactaaaaatacaaaaaaaattagcctggcgtggtggctggcgcctgtagtcccagctactcaggaagctgaggcaggagaacggcatgaacccgggaggtggagcttgcagtgagccgagatcacgccactgcactccagcctgggcgacagagtgagactccatctcaaaaaaaaaaaaaagaaagaaaagaaaactctggactttggggtcaaatgagtgttactttcctaatagtgtcctgattgctgttgtcatgaataacacacattcatgacaggaatggctggaattaggggatcattctgtagcctggagacagggcacaactaatgacatgtgtaagctcaaatcatggtcttgatcttatgtcttgtacccagttgagccaactggtcacagcaatgaaaacagtgagttattggaatgtgtgacctctgctaggacagtcagtgctggacactggct

SEQ ID NO: 9221 - DNA, 6000 bp, Homo sapiens
agtagctcatgccaataatcctataactttgggaagccaaagtgggagcatcacttaaggccaggagttcaatgccagcctgggcaacatagagaaaccctatctctacaaaaaataaaaattgaccaagtgtgatcatgctcacctttagttctacctacttggtaagttgaggtgggagtatcacttgtgcccaggagtttatggctgcagtgagctatgatcatgccacttcactccagcctaagcaacagagactctgtcacttgtctcaaaaaaaaaaaaaaaaaaaaagtaagtttatttctcacaattctggaggctgggaagtccaaaagcatggcactagcatctggcaagggcctgcttgtgtgttctaccatggcagaaggcagaagggcaagagaatgctcacaaggtgcaaactaaactcatccttctatcaggaatccactcccctgataaaggtattaatccatttatgagggcagagtcttcactcatgatcttaaaggttccactttgcaacactgttgccttggggattatgtttctaacacatgactttaggggacacattgaaaccactgtatcctttaaggtaggaatcaatgtcatatttgtcatatttcgaacgaagaaataaaggtttggagaggttaattaacttgcccaagatctcagagctaaagccaggatcatatctaggactgactacaaagtcctgtggtctccagtgcttggcaggtccagcttcactgatgagtctagagagtagtaactctcttggtgtaagaactaagggagatgatacattaaatctaagtgtaaattagattatgcttaaagtataagtcatatggttattattaatagatccccaagttagcctatatgtgaacttttccatagagaaatgaagcatggtttcaatgcagcatattttaaatggattatctcatacaatgtgttttttgtttgttttatattgtttttgttgttttctgagacagagtcttactctgttgcccaggatggagtgcagtgacatgatctcagctcactgcaacctccaactcccgggttcaagtgatcctcctgcctcagcctcccaagtacctgggagtacaggtgcatgccatcacacctggctaatacaatgtgttttttttagacaccagagggagccagtggttctttccacatcagcttttctgtgaaacatttttcttttttttgaaatggagtttcactcttgttgcccaggctggagtgcagtggcgccacctcagctcaccgcaacctccccctcctgggttcaagtgattctcctgcctcagcctcccgagtagctgggattacaggcatgagccaccaggcccagccttgtgatagatttttctagactgttgcatgtgtggtacacccacatacaatatcagctttagactcaaccctttgactttgccttcacctactgaacagcaacaaggattgtgacagaccaagaatctgaagaaggatgcagtgtggagacgaaacaggtgtcaatgacaaaggtttagttgttatttcaagtcaactgcaaagtggatgcggtatcaagtatagaaactgcacaggacttctccactaagaacatggggagggcaaagggaatggatgttttgagaaaggaggcagaagccaacagagaacagtggttattaccaagatgggtggagtagaagttagtttatagaagacattggcttaggcctggtgcggtggctcacgcctgtaatcccagcaatttgggaggccgaggctggcagattacttgagggcaagagttcaagaccagcctgaccaacatggtgaaaccccatctctactaaaaatacaaaaaattagctgggcatggtggcgcacagctgtaatcccagctactcaggaggctgaggcagaaaaatcgcttgaacctgggaggcggaggttgtagtgagccaagatcacaccactgcactccagcctgggcaacagagctagactccatctcaaaaaaaaaaaaaaagaaagaaaaaagaagacactggcttagagggtcaccaatatctgcatatcaaaactaagaatgaatttacttggccaatctctctactgggtgatcagcctgagccagataatgcagtgggttctgatttataatgccttctttactgtcaagaggggtaaggattaaagttccggtttaaattaaagttgaaatgctttacttggtttgagtattattatgaaaggaccctgaccgtttctgcatgtcttaaactgatgaaagtagctaagtagacttttaagttgtgacaagacaacttgatccaagaaaacatatttcttgtcagaatatgcaattttttttttttttttgagatggagtctcactctgtcactcaggctggagtgcagtggtgtgatcaaggctcactgcaacctctgtctcccaggttcaagcaatcctcctgtctcagcctccccagtagctgggactacaggtgcacaccactacacccagctaatttttgtatttttagtagagacagggtttcactatattggtcgggctggtctcgaactcctgacctcaggtgatccacctgcctcggcctcccaaagtgctgggattacaggcgtgagccactgcgctcggccagaatactcaaatctcaatgttgtacatttactgtcaatcctgtcagtatcagtatattgtatacagtatacagtaattgacagtatactgtcaattataaattgagttttttaaattatgatttacaaatgaatttgtcaaaattaaattaaacccccccacacgcacacacacctggaatcctttacagataggtggtatatgaatacaaggcacagattgtatgtgcatggtggctttggcacaaacagactacttcttttttcaatgttaagtgtaaagcagttctttcatctctgttcagtgcagtgttgagtgtgactaggatttgaagaacctaaaaaaaaaaaaaactcacctgcttgccatcttcttgttttttttttgttgttttttggtttttgctggttttgtttgctgcttttgtaaaaccagtttatcatattctcattaggaaatcaattttcatgaaattaattttttttcctgctaactatggctcaatcttttcgtttctctctgcttctatcttaagaccattcctcaaattgaccatgagaggatttacatctggggcacttggtatatgccaaatggagacaaaatcagaatcagcagcctggctgggccacaggtccagcatcccaagctattaaaatattcttagtgtttccagggaagtgatagatccactttggaagctgataatatacccctcccctagaaacatgcatatacacaaagtgttctaaacaacttccaggtgctcatgacctcccccacctcccaagctcattgaccactgcctcgccttcacgaactccagacctggtctgaacatttctaaaggacgctcgggagttaaaaggagcgaggccactgcagaaatgacagccttcatccacaagtggcccacttcgggttggctggagccacagctgggtggggacagggcctgtgctcaggtgagcactgcctaccgcgcaccctccaggtgcgtcctaccctgaagcggtcggactggaccgtctaggtcccagcgctcgagaggatggcaggcaggggctggtgattgtctggagatatgaatgctttctaaggttgacgtcaaggtctccttcctgagccacagtccacgtgataagctctgtccaggtagaaatgatctcacctctcctgtcgcccagggtcggaaacctgaggcccgtgcgggctggggcaacttagcaggggtcccaagcccgccgcgccccctgcgccccaaacgtgtgtggagggcttggacgtggtccagagggaaaagatggggtgaaccaggtgccgcgcacccttcgaggagcccccgcttctccgtttctgtgagtgactccaaagcacctccgagggccgacacacgcgcggacgaccttgggcgggcactgaccaatgtccccttccactcggttgtgtcgggggtccccaggtgaggcgcgaacgccgccccgctcacctgtacgaggcctttcccggagcagcccggctacgaagcgacacccatggcggagaagctaaggaagactcccgctccctcacaccgcggctgaggcgactgaaccgccccagtacgccggggccctccccaagccctgctcccaagccgaagccccgcccccgcgtctaaggcccacctccaggccccgcccctgaccccgactccgtgagtcaagcctggcctttcagtccagcccagcccgtcgaggccccgcccctgttgttatggcccgcctccaggcaccgcccttgatcccaccttcatgagtcaggccccgccttccagcctagcccggccagccgaggccccgcccctgtagggacagcccacttccaggccccgcccttgatcccgcctccttcggtcaggccccgtcttctagttccgccccgcccgcggaaaccccgcccccgcgcgcctatggcccacctccaggtcccgcccctgagcccgcctccaggcgtccagccccgccttccagccccgccccaagcgccgaggcccggcttccaggctccgccccgacccgcgcggtggggaagagccgctgccgctggttctccggctcttcctcggcggttctggctcccggccgcgccgcagccctgcccagtctctctcccccagcccggagggctcctccgcgccgcacgtgagcgcgcccgccaacagggccactgccgcggtaagtcgtgcctgcgccctgtccggcgtccagtcctcagccgctgggcgaagccggaggagccgggcatctcctccccgccggcccgcgggtccttctccgggtccagagggcttgggcggcgccgtggggcggcccggggtgcaggtggcttaccggcgcgcggcccgggcctgcggcgcgctctgctgcagtgcgggggcggagagctcggggccggagaccgggagggcagcggggagactgggtggggtcccctagggttacccgaccctggcgcggaggatatgatgccggccacgccctcgccgagcggggcggcaggtgcaggtccaggggtgggtcgcggcccgcgcgccctcccggggccggcccacgaagagacgctcagcctttgtttgctggtgccctggctggggaggaggctggggacgcagacctgtgagaactaagggctttcctcgttggggaagaccccagtcttccagccagtccccaggagaagggatccgggccgcagtgcgcgctctgccagcctggcccctgcgccctgcagggttcccggctgctcgcggggactgttacccgcagtgttgccttacactcgcgactgcagccccacaattgggaagactttgctaggatttttttggtaaggcgagggaagaccgtccccccggccccacaagtctgctgccattaggtggcttaaattttttccagtacaatttaattgccactttgaaagaccacattcaaaacagtgtgtcccagagttgattaagcccattggtgatgagtgtttctgtgctgtggactaaggatcattatcaattttattactaatagtacatatctgttatctgttgctaaatgtttttgcttatgtggtagggtcactgtcctcattttcatcgaactgagaaatgttccttcatatagacatatttacagtgaacttttttgggatctggcagttggtttttctcttgaacttgtttttttctttttctaaattattattattattattattttgagacgaaggtctcattatgttgcccagtctggtctcaaactcctgggctcaagcaa

SEQ ID NO: 9222 - DNA, 6000 bp, Homo sapiens
gctgttaaaatgattatctaaatttcagttgattaacactaaaatgtgctcatagtataattgtaagtaaaaacggcatgaaacatatctgcagtgttgtatgtgggtgaatgtactcatgtctccctaagaaaatctggaaggacatatgctaatatgaaaataccaataaggttttttttttttttttcctgggtgatatctacgagtaatcattccctcttcattgttttccatattgtaaaatcgtctgtaatgaccatgcatgactgttacattttgtttttggaccttaggtacaaagaattaagaattaactcctcggccaggcgtggtggctcacacctgttaccccagcactttgggaggctgaggaggcaggatggcttgagtctaggaatttgaaaccagcctggttgacacagaaaaacctcatctctacaaaaaatacaaaaagttacccaggcgtggtggcatgcgcttgtagtctcggctacccaggagactgaggtggggaggattgcttgagcctgggaggtggaagctgctgtgaactgtaatcttgccactgcactccagcctgggcaacggagtgagaccctatctcaaaaaaaaaaaaaaggaaaaaaaaaagaattaacttcttatttcatagcatactaccattgtcagtttatagaaggcctttttcttgttttaattaattttgtttctttgtaatctgttttagataacgaattaccttaaaaataagaataaacaaggccgggtgcagtggctctcacctgtaatcccagcactttgggaggtcgaggtgggcagatcaattgaggccaggggttcgaggtcagcctggccaatgtggtgaaaccttttctctactaaaaatacaaaaatttgccaggtgtggtggcgggcacctgtaatcccagatactcaggaggttgaggcaggagaatcgcttgaactggggaggtggaggttgcagtgagccgagatcacacccctgcactccagcctgggtgacagagcgagactctgtctcaaaaaaaaaaaaaaagaaagaacgaacgaacaataaagtttgtacaagggcagcaagtgaagacttttacccagaagtctgtaagaacagtaggggtgtcagatgccacgccatgccactgtctagggaccaaatgcaaattgttcaccttctcgcttggcgtgaggagcattgataggaatactggtttgcttgtttgtccttggaatatttatttgggttataactctcagcgagattccaactactggactttcaggcttagaatagtgcctcaccaggagtggtcactaacggatatgaagccaaccaaaagaaaccaccatcttggcacgcatctgtgtgttagtttcccttagtgccactacaaagtacaaacaactaggtggcttaaacaacagaaatgtactgtcttgaatttctggaggccagaagtccaaaatcaagatgttggcagggttggttccctctgatggccgtaagacaaaatctgttccatgcttctttgtcagcttctggtagcctcaggtgtgccttggtttgtagatggccaccttctcctggtgtctgtacgttcttccctgtgttcgtttgtcttggtccaaatttctcctttttataagggcagcagtcattttggattagggttcaatctagagacccaactcgattacctctgtgaagactctaactccatataatcttgaatcatcttggtgtggtagaaagaacatgggctttgcaattatacctgtgtttgaatcctggcttcaccacttactggtgagtggtgactgccttgagaaagtcatgtaatcactcaggacttgttttctcatccacataatggggatgtaatgttgctgtgaggattagagatactctagaacatgctgggtaagtggaggctgttactacctatgagctgagggcctttgcttttcaaggtgaacagtctatgaataaacacatctgtaagtgaatctaatgggaagattcttagatgacaaggatttcatctgtgaaccaggtcagctggcatctataccagagtccttccggcctacatgtggtcacttgtttggagccagctgtaattcacaggttacgtttttaggtgaagcctgtataaaaccattttacagcattccaacctggatatgacattcattgaccaatgttgtctaaggctgtcacactggggagaaaaggggtgcagccttctagatacgaagaccagcaatgccttctatacccgcatgtttataatctcaagattctgccccactccgatatcttctaggttgatttgaactgaagacaaggacacatatcttgagacattatcatattctgttcaggttacctggaagattaactatacaagtttcttccattaccaggaataaaaatttgagtcaaatttaatttagtattaaaggttgcaaatgctgatgtgctctgatagaagcgaaagcttggtgaatggggtgggatggggtgggggcaggaaggagacccacaagcagagaggaagaagttggttgtataggtggaagcttgagcttgggaggaaccaggtagggacctctcctctgaataaggggcgctctgggccacttcctctttcttcaaaacaattaagttgaccgtggaccttaatcacactagcagggcaattttgaaacaataatccgaaagaacttttgccagctacggcaacttttttatatcatggagatcagcctgaaagcaagctatttgcccgaccactttttgaccaatttattttcggtttagtcaggtttcttccaagtctgtgctaatctgaatggttaccttagtaattactttttgactaatttattttcggtttagtcggatttctttcaaagtctgtgctaatctgaatggttaccttagtatatcaatgtcctagtaactgtagcaaggacatttttgctggaaatcatttaaagcaggtgtatttgagtcatgtagcatagacagcggcatttactgcgagttttttacatctaatattgtttataagattttatctgttgtcacatttgtgaaatttatgaaaaaaattggttacgaacactatcacaaggtggcaaaatcaagcttagaaatcaattagtgactctgctgtaaaatagtatatatatacacacacactctttttaggtatacatttattaaatgccattagagttggtacaaaatacaatttttagctggtggctctctaccgattacaacgcagccagcacagcatacttgggttttcaagcctcgggagctcacccagcaatacatagctagggagaaggggtagggagaataaaaatcagcgaaagccaggatattaataaagagttttgatggttaaggacaagcaggcgaattaagactctggaaaccgagaaggtgtatagaaaagaaaaccagagagctggacgacaaggacacagtaacagcacaaggggattcatctaaagggcattccgatggagcaggcaggctgcgccccgaaaggtggggagaggttggaagcagatgggcaggcacaggcgagcgtgcactgcctgaaaaagttttcatgatggctccagcctaatttcccaacgctggtctcgggcgccacaaaacctgggcggcccgaccggagccaggtgccagcctcagggccgccgggcccggcgcagcgtccggaattcctgcgatgtctggggcgcggcggtggctcctccccgcccccaccacggcctccgccggcattttccggctaggaggcccgccagcccttcgaagaaccggctccacgcgcggacggtcgcggccgccgcgcttcccggggagagaggcgagcgcggcgcccggaccgcggtgagagccctccaggcccgggcgcgcggggtgggcttcccgggtccccgcccgaaggccgcggcgcccctcctcctccccctcccccgcccggggcagcccgcccctccccccggcgcgggcggggctgcgggcgccgacgcggaagcgcggggcgctagggctgcgggggcggcggcgcgggaggccgcgcgcgctccccgggccgcagtcggcgcgggcgcggggcggggcggggcggccgggaggcggcgggcgatcgcgcacaggcctggccgccgcctcgcccccccttccccagcccctaccctccctcggcctagccgtccccctcctctcccctcccccgggcgaatcacgcgccctcctctgacactcgtagcggacccgagctccgaatttatccttcacgtgacctgagggggttgggtggttggctggggacagagggggagacggaaaggagggaacggaatctgccgttacctgagcaacaggccccgcccgccggctcggggctggggggcgggaggaggacgtcagcacgtcagccggggttttgcgttttgattgacagttgctatagcgaccgggtcggtccgtcgccattttgttggttggtttttttttaaaccctttcgcttcccgcccgaataataataaaaagccccattggagtgaggcgggggtggcggcggcaaccgcggcgggggtatccggggagactgctgctgtcgctgctgctgatcgcggcccaggtcggcctcagagagcggacaccccgagcggggggtgcgggcgccgccgccgccgcttctgctgctgctgttcctgctgctgctgttggtgccgctgccgccgccggcgagcaggcgggaccggtgtgagtgcgagtgtgtgtgcgagggagcgtgtgcgagggcgattgtgcgcgcgagtgtgcgggtgtgtgcgagtgtctgtctgtctgtgcggggactcgggggcgggcggttcgggctctcctggcggaggagccgccgccgccgcccgggccccggcgcttctcgctgcgcaggttcggagcgcgcgccattttgtgagatttacaaaatcctcctcgggaagaagccgccggcagcagccgccgctcggcgcccggcctcgccgacgccgccctctgcgccgggccggccgtgcggccccgccgcctggaatcggggcccggggactgcggtatttgccggggagggggctgtcgcctccccggccccgggcgccgctggaaccgcgagccgaggagagactgagcaggctgcggcgcggccaggagccggagcgccgggggcggagagaggctgccggggcggcgctggctgcggaggccgcggcgggagcgcggcgcgggagcccgaggctgagactcaccggaggaagcggcgcgagcgccccgccatcgtcccggtgagtgtccggcccggccgcggccccgcccggcctggcgctcggctcccccggcggcccgcagccgggccggagccgaggccggccgggcggagggagggacctgccattttaggaggaggcgccgcgggcccagggccggccgccgggggagggagcctcaggccgggtcccggaggagcggcgggcgcgagcggagggaaagttgcggagggtgggagcgggggccgcggcctcccgggagccggggcctggggggccgtagacagcgccagaccttcactggccgcccgagcgaaggggtggaggttgtcttcctcctcctcctcctcctcttcctcctcatcctcttcccccagctcctccctcgtccctcctctcggtccccaccagtgtgggaaccgccggggtgattcgcaaggacaatgcacgggttaagaaaatggggccggctgccgggtgggcgaggacggcggggccgggccgggccgggcgccggcgaaggtcgggagccgctgcctcggcggccctgggggtccgcgctggagcgaggggcactcactggcctccgaagttgggcggggagcgcgagtgtccccggcggctcggggtggagg

SEQ ID NO: 9223 - DNA, 6000 bp, Homo sapiens
cgcctctggcaaggtagaccttgaaggcaaaactgagttgaggtttgttaggacggaaataattactgctgggcatgcagcacttcccaaccgttctgtgaggcaggcagtgttattgccagtttggcacaagggcacaggtgtagaacacgtaagtgccctgggccgtgctacaccaccactgtgtttgagctgagatgtgaaccagggccttctgattccaaattcctcattcctttcatcctagcaggctgcctgcggttagcagaaggggactcctgtatctgctctgcagcttcttcagctgatttataatggaaaacagagtagatattgatttggcaattagtgaaatattatgagaatcatcatagcaaacttcacagtttgatcaaggatcctgccttcaatatctggccaactgatgtgtaaaagcagctgcaagaacttcagagctgacaaaaaaagcaaactccagactttatttcctggaatctgttttgtgagacactggcccatgaaatgctctcccagaaatagtcggatttgtggtcaaataaatttgggcaattctacagaacatgtgtctttttcagagatttatttttaattaaacttatttaaaaatattaacatggtacaatttgcatatagtgaagtgtgcaaatcttcgctacatggctcaatgagtttttacatatatttccacccatgtaatcaccaccgagatctagaatagaatgtattcgtctctccagaggttcctctgttcccttgcagtcaataattctccaccaaagataaacattctgctgacttccttcatcattgataagtttttcctggttttgaacttcatataaatggaatcatttcatgtctagctcttttcactcaacataacatctgtcagattaatacatcgcatgtcaatagtttgtagtttttatggctgtgtagcatttcattcattcattctgctgttgatggaaatttcttgactagagttgtgttatcaatttattgcctcttggctccaaattcaccctttttgcctggtctctggaaatgggtctgggccctctaaatattttccctttgcaatctggctcttgaagcttatcagtggagggtcctggaggggcattgcaggggaaacagtttttccttcctggttcagggacgctggtttggtagcccctgtggtgttacaggagtacttggcaagacagcagtttccccgggtacacccgctaggtgttttgtagcagagtgcatctgtgagacaactggtgaactgctttccttgcaacctagagggcagatttctggcaagttccagagggtggattccaaacatgttcctctaatgtggatctgcagtgatgtctctgccattcagtgggcatagctgtgcccttttagtggggtctagatctcagccctgggattgggggcattttctcagttgctcaatctcagccctaggggcagtgaccattccttatatatggttgtttgtatattctttggaactgtcttgattttattactgttagtctctcattactccactcccttattatagtaaatgattctttgtatttgactttccctggtcaaggtactaagtggtttttctctcctgtttggatctagattgatacaataattttttgcaattatgagcaatgctgctgtgaacattcttgatcatgtcttagtggacataagcaataattgctgctgggtctgtgtgcaggaatgatttgctagatcatagcacatacgtttatctgtagcagaaactgccaaggtatatacagctttccaaagtgtgttaatttacatgcctgctagcaaggtaggagaaatacagttgcttcccaagtagctgggattacaggtgtgtgccaccactcctggctaattttttgtagagatagggttttgccatgttggccaggctagtcttgaactgctggcctcaagtgatctgcctgccttgggctcccaaagtgctaggattacagggatgagccaccatggtcgacttcatgataaaacttcagtggatgaggagctgcctcttatgatgaacaaagaaggtggtttcttgaaatggaatctactcctggtgaagatgctgtgaacattgttgaaatgacaagaaagaatttacagtgttacatagagttagttgatgaagcagtagcaggattcgagaggatcgattccaatttcaaaataagttcttctgtgggtaaaatgctatcaaatggcgtcgcatgctacagagaaatctatcatgaaaggaagagtcaattgatgtggcaaacttcattgttgtcgtattttaagaaattgtcacgaccaccccaaccttcaacaaccatgaccctgatcagtcaggagccatccacattgaggcgagaacctccagcagtaaaaagattatgattctctaaaggatcagatgaacattagcatttttttaagcaataaagtatttttacgtaagatatgtatgttattttttaggcataatgctattatgcatttaatagactccagtatattgtaaacataactttaaatgcactgggagataaaagtatttgctcttttatgatatttgctttattgcagtagtctgtaatggaaactacattatctcttgggtacacctgtatacagaaagaaatttatcatgaggaaatgctcatgcaatgatggaggctggaaagtcccaagatctgcagtcagcaagttggagacccatgagagtcgatggtgtggccccagtctgtgtttgaaggcctgagaaccaggagagccaaaagctggcaagctctggacccaggaagagctgatgtttcagttcaagtccgaaggcaggaaaagactgaaggcccagctccaggcagtcaggcaggagaactttccttttactcacgagagggtcagcattttgttctgttcaggctgtcaactgagtgacccagaaaagctggcacataacattcaccatcgtgctgcaagagctgcaaaaccctctctgcttctaacactgatgctcagcccacctccagtgggcagggagctgggtgccgggaggacttggggttgccagcccagtgtgggcctggacagttgctgagaatctccctccgccctgtgacttcttaattacttagagggtcaccctggttgctcacttcagctcacttgggagattctctctgcttgaggccaggggtaggtccaggtctgatggggtctgaagcttatacaattggggtggggggcattcctctttaaggaaaagaaaacagcagaggtgagtcgtcctgcagcttagcttcactagtctcgtggaaaatttgcctcctaaaatgtctttcctctgagaaagcccaggcctccaaaggcccagccaggctggcgtcagtctggggtcagctgcggggaggctccaggccatgtgtgacacgggagtttaccccatcccagtttccagtggagaagcatcgttctcgtccacccccgtcatgctcttttccaccttctccaggggaagggatattttcagtctgtacaacgaatccactgaaatgttaaggtgggcacagtggtctggggtcttcgaccttgtttatacgtggtgcctgttactggtcgggtctgtacaggcagtttccactggcgttttttaccaggccagcctagagtagaatgaccgcatgttaaaatatagattcctgggccccagacctgccagaatctctgtgagatggaacctttcaacctgggttttaaacaagcctcccgggtgattctgacactcactggatttgagaaccgtggggttgttcagacagcagggacgttgatgttgttccttctgcgttcctggtgatgctgttctgttctcccaaggcctatgcggtggtgagaatctccaaggatacaagacagtgatctggagcgagtgtcctgaaagcagactctagcactcaggactgccaacaccctccccgggtttccttggtctggaattcccatcccctggttccacctgttacatcacacctccccttcaaggaccagtgcagatgccacgtccttcacggggctcagaatgctcaccagcttcctctccaccgagggccacagcccctggagaccccttgagctgagtgctttgtccttgcatactctttctggcctcatagtggggcttggccattgtcccttcactccagatctctcctttcaggtccaggaagtgcatcttgaacttaactttccagacccccccttcagttttccagtccttagagaggtggacttctgattcctttgtctctgtgccctgtagcctcaggtcaggcttaaggcaaggtctcctcacctggcctggggagagtcccaggacgctgcacgtgcctgtgcgggtaggatgctgatgcccagatttcccgttagagagcctttccctatcctgacggctctagctttgtgtgttacttacttgttccactttaattcaaaatgtacccagcaaccagcttgtgcacagttctctggggtttcaggagggatgtaagacataccccttgcccttcaggcactatggccagaaggggggcagtgacctaggcagagggcgggagccagcagatgggatacactcagaggagcctgcagcaggcagaggcagaggagaagggaggtctacacgttctgcactgtatttatctccttcagttccaaggttctctcctggcatctatattgctcatgagttacagagcaaagcctggtgtgatggttacttttaggtgtcaacttggctggattaataaatacctagagaactggtaaagcattatttctgggtgtgtttgtgaaggtgtttccagaggagattggctgtgagtcagtgggctgagtggggaggagctgccctccatgtgggcaggcaccatccattgactgggcccagatagaacaagaaggcagaagaaatgtgaattcctctttctctgctggagctgggatattcttcttctcctgcccttggacatcagagctgcaggctctctggcctttggacccgaggatttataccaagcaggtttctgggttctcaggcctttggccttggactgatagttacaccattggcatatctggttctgaggctcttggtcttggactgagccacactcctggcatcccagcgtctccagcttgcatggcctgtcacggtatttcccaacctccgtaatcacgctagccaattcttctaagaaatttcttctcatctatctgtctgtctatctatctatctgtctacctaccgacttacctacctacctgcctatctatcttttgattaatctacctatcaatctttctatctatccataacctgttgattcgatctctctagagaaccctgactaatacacctggagtgcagaatctgctggagaaactgccattccgttattgactggctggtcaggccatacagcctggtggtctagatgtgtttggaggtagggcttctgtagcacagatagtgcctgttcatggctctgtcccaggtaaggcagagctagcttgtgctgagggcttctgctttgcagctggcctggggtggctaggatctggggacacaggctgccctttccaggctctgtctgctggtgctgcaggtgcccctacctcctccttcagtggaaggctggcccccaggtcctctttaggcccaatacagactcagccaaagatgcagatgtctcatatatgaggattctgagctgtgacttctggtggtaactccactttaggcaggaaaaatgttcaactgcccatgaaaacaaatgaccccgggtcatttgggtttggcacctgctctgccagttgggtttggcacctgctctgcctcctgggaaacagtttggccaatgcactgcatgaggtgagcgc

SEQ ID NO: 9224 - DNA, 6000 bp, Homo sapiens
tgttcccaaaaaggaaacatatttacagtcagtctgtctcctgccaaattgtaatttctgatggaaggggctttctgggtgttattcgcccatgtgagcccgcctctagcgtggagcttggcacagggagggttcagcatatgtctgttaagtgcccggttatggatgcagcctgtagggttccactggcctattgcactttctgtgtcctgccaggatgcgggtggcattctggaggcctctccagctggggcagtccatgagctccagaaagttcacatcaaaggggtggccctggctccatgaggaagagtacaggctctgaaatcagacccagggttctgaataccattcccacctctcaccaatcaactatcaattctgtgcctcagtttctcgtctgtaaaatgagaatgataataatgcctgctaatagggtcatttttgtattaaataactgagaatattgcctgaaatccttgccaacccacattattttgaaacaagtctcatttcatccataaatatggcagcatgtgtctccactagataagagctctcacacacacaataccactatcacacctaaagtattaacaataattccataatatcatccaaccagtgttcaaatttctctaattgtctcataaacaattttgtcattttgttcaaatcaggactgaataaggtccatctattgcaagagactgataggggtactgggattcttttgatctatagcaggggttggcagactttcactgaaaagggttagacagcaagtattttggtctttgtgggcccttctgtctttgttgctatgacttaaacgaatggctatggctgtgtttcaataaaactttatttataaaaacaggcagttggccagatttggtcccaagaaggcagattgctaacctgtgatgtacaggcttgttcagattcagggtttttttgttttgttttgtttggcgataacatgtcatagatgggtagcattgcggatttccatccgaaggcttagaatgtcagggtgtttctctttccctctccctctaatattatcagccatgtacattcggtgtccagattcattaactcattaagggaagtaaaatggcaacattctaattctatcgtcccttcatttattagctgcaatacttttacaaagagaaactcgcctttatctactatttgcttatactgacgtatagtttgtacaggaaagttaagataatacatgcttgatccctttcctttctttaccagcttttaaaaataatgagttgggcttcttagcattcttcaaagataatcaatgtacttttaaaaagaacattatgagcaaatagatttcaacataattgaagtgttttgaggcattgcagttactgcctttaatgatgtttaaattgtctccgttttgccccagcttatgacaagacctcagaagtctttgataacatccttgctttctggtgtgatgagatattctagggttatcttattcagtttataaaatcagccttctccaaaaagccctggttctctctggagggaagtgatatttagtaaccctaatatgatactaaggatacttattgtttccagaacttttcagtagatatatcaaaggatcatttttttaaaggcctcagaaatacagaattcagaatactgaaatttctgaatcagttcaggaccacagctggcgcctctatgggtaaggtaagtatgtgggaggtaagatcccccatgatcaaagctgtttgcgtccctcggcccagcccgatcaaacttctggatgccatcaaagagatctgcctaacctaaagatcattgttctttaaaagaaaaacaagttcattaatcatgtgaggaggcttggggccaggatataaagttaatgacaagggactcccttctattaaaaggactatgtgcaaacaggcatgcctggaggaagccaaggaccacgataaaggaaaacaaacaccttatgattcatctaacataggcccggttacaatcgcaggtgtaaaaggaactgggagctggcagtgagagacaacaaacatcagtggaacatgggatggtgactctttctggctgagcgccacacgttcctaccaggaatcttctattagtcatttgggctggagagtgagatccttcctcgctctccaccgtccagggtcatgtttaatggtgatgtttgttctttccaaggagagaaggcccatctaattgcagggcttttgttttcctgaatggactcaggaaggccatggctgaaaacgagggtgctgagaggctgtaaggagaagggaaggagttggaggctctggtggagtgaggaagagcagggcagtatcccatgtcctctgatgttaggggtgaggtcaggagggtgggtctcaccttctcctttctctgccctgcatcggtcaccatggtttaaaaatcaatgctattccatgagagggctgccacttatcatttcagttccaacacctggaaagtaaaattattgtctcccaaatccacccagcaccataggcttgaatagggatcatatgctctaagaccattcatgaaaacagagacaaccaaggagacagtcacccaatgctgtcccttcagcttgcattattttctgacaagacagctctgccatccatggaagcctgtgtgctcctccatccctggatctttatgcatccttttccccacaaacccaaaccatccctcttaaaatgaaaagcttaggaatactcaccctagactgagtcacgcgtttcttgtacaaactttaattagacttgattttttaaaaatttcccttgtggcttttaattattagacagagcaaatgtctctagtattaaacttatatgtcacatagcctctttatcaatggccctaatacatttcatgtgcttttcagaaagattatattcttcccagagctgtctgaatgtctttttgaacccctcaagactggacaccaaggagtataaataatcattttaaaaaaaatcacattccctccacaaccttgaatctgaaacgtgaatatatgaatagaagggctctggaataactatgcagatttatggagaatatcaacttaagttatatcacgggatccagctatgcctttcttcatggagttggggatttgttaaagttgagatatagtttgggggaagtgtgatttatggttaaagtcatctgaaaatcaatacatttgaagatctctgacataaaggtcccttgcagagctagacgtgattctaaaattgggaacacaggaataaaaatcaaatcttgagtagaagtagctgaaaattgcagtgattcggggaagcttggcttctaactccccactgtttgaagatgggcttgtttgttttttaaaacagccaacataattcagctggaggaggtacaaagaattttctattccttgtttctgtagaaatcgatggactttagcttgtctaattgtcccccctgcctttagtatctaaaataaaataaccctcgttgcttgcattactcaacgcatttctgcgtcttggcgtctatggctaaacgagtattaattagacagtccgcagagagctggctggggatagaaggggaggtgggggagaagggcagggatcacagcagggtggactcgtggccctgatttgggatcctgacagcaacttactaggtggcctgagggctgggtgccaggggaggcagcgggttccagtagcatctgacctgcattagggacaggggcgcggcggagggggcgaagggggcgggggtggggggaaggtggctggggtgaagcccagcttcgcagctagctgtgggcaacagagggagtaagggggggcaatgaggctggggccaggcgccagcagcagccacgccccccacctcccccgatttttagggaaaattctccaaagctctcgcatcctcctctgcctccttccaccctccaccctcccagcctccactgagacctctttaaaaccacccaggggccgccgggggatgaggccggggaacgggctggactgagggcgggggctcgggggcagcggacgggaaacgcctcgaaagcagccagacccggcgactgaaatgaggcggaggagcttggcgaggggaggcgcaggctcggaaaggcgcgcgaggctccaggctccttcccgatccaccgctctcctcgctgacctccgagtcacccccggaagctcccgccactgccgggcgaatagacccccgcggacccccaagcgcgcggggccggggccctagttcaggccctcgctgcccctttaagggttctcgaaactttccccccggtatcagatgagcctcgtcacatccgttggccgtggccgctggggcgctttccgaggaaattcgggactcgagtttcccggggaagaggcgcggcctgagcccggcgagggtggggagggcaggcgcaggtggaccccggcgccccccgagccccgctgtgaccttggccgcgggggaggggctgggccgctgcggggcagtcgcggccgccagagggggcagcggagaagaacttgcccaacttggcggcgcgggctggggcggctctgcgcctccgcgcccgcctccccggcctccgccttctcccctcccgcgagcctcctcccctcccgcgagcctcctcccctgggccctcctcccgtcctccccgccgccgccggtcccggtgcgcgcccatccctgcccgcagccccgcgcgccggccgagtcgctgagccgcggctgccggacgggacgggaccggctaggctgggcgcgccccccgggccccgccgtgggcatgggcgcactggcccgggcgctgctgctgcctctgctggcccagtggctcctgcgcgccgccccggagctggcccccgcgcccttcacgctgcccctccgggtggccgcggccacgaaccgcgtagttgcgcccaccccgggacccgggacccctgccgagcgccacgccgacggcttggcgctcgccctggagcctgccctggcgtcccccgcgggcgccgccaacttcttggccatggtagacaacctgcagggggactctggccgcggctactacctggagatgctgatcgggacccccccgcagaaggtagggacccccggctgctgccgcgggcttttcgggctcgttggagggagggggctgtccagagacgcctccacgcggcttagcgtcgcccccaaagcagcagctgtccccgcacagaagagcggggaacgcagaggggctcgggtgggccggggagcgggggcgctcgctcttgagtcgcggaggacggcagcccccgcccggggcgcactgaggggtgtgcgcgagtgtttcagaacttgtgagctccccctccgcggggctgggcgggagaggagacctggaacttgccgcctccaataacgtgatttccttcttgcgggcgacacctacttccagcgggagacggagcggtgggccttgggcgacgggctattatggggaaaatcacctcgtgttcataccctccctcccccccgccccccccccaccccaccaccatgctgtctcattgctaaagaggctcgtggccggcttccaaaggcgcagtaccctttaaaaaggatttatgcatgagctcagctaaaagcaacccggttaagaagtggctcgcttgctgctctgaggaaggagcagcgtctcccctgcgcccgctttcctttctcggagttggtttgtcagctgtgtcctcgctcatccggcggccctgcccctctgcacggagcgatgcatctacacgcgggtgtgcagagtgtgaaaagcattccagctaccgggaaaaaaacaggggctgagtgaggtgtccggggaccaagtggtatcccgattacaacacaaaaataaaatcaaacagctttccttttctctta

SEQ ID NO: 9225 - DNA, 6000 bp, Homo sapiens
ttatttcaggacacttgaaagctcctctcctccaatatgtctctaattcaagtatcacagtgtctaaaattctaccactaaaatgccattacctaaattaagcacagccttctgtctttatgttgatatttctttaaatatcatgccaatagttttaaaatcaaatgatactaaaggtatataacaacaaacagtcgggcctggctttatcccttcaactcctctgtctcattcccctaccattttctactcttttacccatttcttctggtagttccctatatttctaaataatatgagtaaactatgatttttatgtccaattttaaagcttttctatggacctctggttttagagacaacatctagttctcttacatcccttgccacttcccctgatgctgtaggacagacaggtctgtcccacccacggtgactcagtcattgttgttcatggccgctgcccgttcttcacgatcaaggaggagaattctttggaggaaacagagctttcatacgtgaatcgactgggaagcgagtcaaaagtactgcaactggaagtgtggcatggggagggggccgtggccagtctcctcactgggctcctgtaggactgggaacgcctactccttcacacctaattatgtttgctggattgggttatagttcttcagtgtgtggactcttgtcagttttatatccgtaggccgagcacaatgcctggaatacagagcatgcttaataatcagaggcttttcattgtatttcttatcaacaacactagtaactgaatataaatcacccttcctcgccagtcagtgcaccataccattagaattcttgctttttgatcagtggagataaaatgagtttcttttctccatgttaagtaatcaggttctgattttcccttttctttctctctaatagtgtttaatgctctaatgctttctaagcatgaggtattttcttgagctctgaagcccagtatcttcaaagcccccttcagggaaacctcagttccctgtcagtcaaggcctgtcactggctttgccttggccttctctgggagaatgtctgctccttaagttgatggcatacaagttgaggtggggaaaaattaaagtgtaggatttctgtaggcagctaatgttttattactggagtgcagtgatgcgatctcagctcactgcaacctctgcctcctgggttcaagcaattcccctgcctcagcctcctgagtagctgggactacaggcacacactaccacgcccagctaattttttgtattttagtagagatggggtttcaccatgttggccaggatagtctcgatctcctgactgcatgatctgcccgtctcagcctcccaaagtgctgggattacaggcgagagccatagcgcctggcctaaaatgtattatataagcatcatagtgaccacaaaacaaaaacctgcagcagatatacaaaatgtaaagagaaaggaatcaaagcataccattacaaaaatcatcacattagaaaggaagatagtaagggagtaacaaagcaacaaaggaactacaaaccgccagaaagcaattttttaaatggcagtagtaagtccttatcaataattaatgtaaatggattaaattctgcaatcaaaagatagaagtggctgaatggatattaaaaaaaaaaaatctaggtgctgcctgcaggagactcagctttaaggatacacataggctgaaagtaaaggcatgggaaaagatattccatgcaaatggttaccaaatagagagcaaaaaagatacttatatcagacaaaacagactttaagtcaaaaacttcataagagacaaagtcactatatcatgataaagagataaattcatcaagaggatataacaattataaatgtatatgcacccaacatcagagtacctaaatatatattaacggaactcaagagagaaatagcaatacagtaatagcagggtacttcagtaccccattttcaacaatgaatagatgatccagacagaagatgaataaggaaacagtgaacctgaataacattctagagcaaatggacctaacagacatacagaacactccttcccccagcagctgaatgcacatttaaatgtacacagaacattctctaggatagatcatatgttaggccacaaaacaagttttaacaaatttaagaagattaaaatcatatcaagtatcttttctgaccacaataacatgaactagaaatcagtaacaggaggaaaattggaaaattcacaaatatgcagaaattaaatacacacctgaacaaccagtggggtcaaagaagatatcaaaagggaaatcagaaaattccttaagacaaattaaaatggaaacaacataccaaaacgtatgggatgcagcaaaagcagtactagagggaagtttataaagaaaatgtggtgtatagctgtatctacacaatggaatactatttagccttaaaaaagaaggatttcctgtcatttgcaacaacatggatgaacccggagtacattacactaggtgaaataagccaggtacagaaaaacaaatataggccaggcatggtagctcacttctctaatcccagcactttgggaggctaaggcaggaagactgcttgaacctgggagttcaagaccagctttggcaacatatcaagaccctgtgtctacaaaatttaaaaaattagctgggcatggtggcatgggcctgtattctcagatactcaggaggctgagggggaggatcacttgggcctgggaaatcaaggctgcagtgagccttgaccattgcactcacgccactgccctccaacttgggcaacagaacaagaccctgtctcaaaacaaaccaacaaacaaacaaaaaagaaaaatatgcatgacctcacttatttttggaatctgaaaaacttgaactcagagaagcagagcatataataatggtggttaccaggggcagtaggtgggagaaatggggagtcgctggccaaagagtacaaagtttcacttaggaaagatgagtaagttctggagggctaatgtacagctctaatgtatagttagtaataatacattgtatacttgaaatttgcaagaagaatagatcttaaatattctcaccaccaaaaaaaaaaaaataatgtgaggtgattggatatactagcttgactgtggcaataattttacaatgtattcatatatcaaaacatcacatcctatactacaaattatgtaatttttatttgtcagttatacgtcagtacaactgggtgggggggagggggggtgggaagaagctgtctccatatgaggccgaggtgtcctatatatcctgagcttgtattatcgcctttcaagtgtaaaacctgtaggtgatgggatgcccgaaaggtttgaaaatcaggaatgacaagatcagattttgctttaggagggcaacttgaggcagcttaaagagtggattgcaggaggtagaacttggaagtgagaacgctgttgcacaagtgcagtgagagaggggtagcctcgagccgaaccaatggcaagggccagggctggggagaccattggagagaggggtgggagccacactgggctatcaccgggaatggagagctagaaaagagaggagaaagcactggcacagggggcctgcggagagaaagaaggtctgaagaaaacctggccaaaaggagaagactggagccctgggccatcccgcttgcggaatgaggggccggcgggcttcctggggctgaaccctgcgtggcaaagaagtgggcaggttttctttctgcctgcagaaggcttctcaaatgcctaacaaagtgatggatttcacgcagcccagctcagcaaagagagacacagacatcagagtgttctagaaacaaagcagggccccagggggaaactgcgaggcctagcagggcaggggagccaaacacagggaagaatgccttctccattctccagagggaagctcaacgtgcctggggaagggtgcgaggggcactggcctgttgggacatttacagccaggcctcgggttggttttatccttaaacattgttttatccgggggcaggctttttccccggaaaatttccgctctgcctcactttgctcttccccgaggagtgggctgggagccccctctgctctgaagccatcctgggggtccactgtgggtgttcggcagtagcttctaggggactggccaggcccctccctggggctgcctaaggagaagagttgtttctggggtgacgtgggagcctgtgtgccagggcactggcccgcaagggtaagaacccggcgggctcccgcagcctaacagggagctgcctctgtcacgtgcctgcgaggtgggacacaagttggcttacaagttggttcgacatagccaaatccgcgtgccgcatttccacgctatggagtgctagtcttcatgattgtgccccttgacatgacacaataggaatagaagccgggaggccaagcaaaggccctctttgggggtgggggcgcggcggcatgtgaccctcgccgcctgtggggaagacctgccttgaggacagagcgccaggggtgcagaggccgcctgggactgcccggaggccggtggggagcgcgccagcgaaagcccgtgcgccctcggagccggggaaggcgcgggccatgacccgggttcgcccgcaaaggccgggcagtgccgcaaggcgtgggggcgcccccgcccggtggccccggggctggtgcgaccctgggcacgccggggccggggccggagccgggggtcgcggcggccggggagggggaggagccgcgcggctccgccggcgccccgcgggccagggaaagtgaaagggcggcggggcctcccgcgcgccgctccaggaagtcgcgagcaggaagcgcccgcggcggccgggccgggctgggctgcggagcgcgggcctcggcggcgcaggtgaggcgcggggccggggccggaccgggaggcggggaccccccgcccccccgcccgcacctgcggggcagccggcgctcaggcgccgcagccgctcagcacctgcggcgccctcagggagccgggcgcggggccctgcgcactcggagctcggctcctctccttccttttcttttttttcggggggaggtgggggctggtttggatgttttccgagagccggggacggtctcaagctattttcgcggagggaagtctttgaaatacgacatctagaagagtggccctcggcgacaatgccgggcgttcccggaccggggcaacgctgggattccggggaagtggaggcagagggagcgggcacggggccggcagccgctccacggagtccccggcaggggcgagcttagctgtccagccgggtcccctgcccaccccggcccgggccgcggtgacagctgagggtccagagagccggcaggaggggaccctgcgcattgtctgccgcgatggggacgtgggcgtgcccgcggaattcacctcctccggggaccagccgcccagggaggagccggcacagaacgctggctcggagcgccggcaccctgggcctttgcgttgtttgtcggctgagcagctggttcccggagcccgtgggcctcctggccaatgcgagtgacagcgaccttctgggtttataataaagggcttgacgcgccggaaagtcccctcgccgctggccaccagccttccagcccttacggcccacgccgtaatcctggtgaccgagaaggtacgttcagtctaaggatttgcatttgaacgaaggatactggccaagccccttaccacccccactccccgctaacaccccagcccgcggccccaggtttgaatttccaaaggaggaattgctaaagcctgccctttccgggtctcccttagctctttgcctggaaggtgcctgcctgcctgcctgccggcccttg

SEQ ID NO: 9226 - DNA, 6000 bp, Homo sapiens
aagatcttgtttataatttttgcctctgtggaagtctatgtttaaaaaataatgtgtctcctaggaaaaaaagcttttgtttgcattgttttcctattacctattagccaaaaatagttaacgtccatccagtagagattagtatccacatgccggagttcgtgtatttacagcaaagttattatctttcgttttggtaaacttttacatctgagataaatatagagttgtctttgggcttttaagaatgccggagttaccccgagggcccctggctctcccggcatcctcttggagatcagggaaatctgggtgggaacctcctcattttacaaaaaaagaaactaagaccaaatgggtaacgtcgttgtttaaggtcacaggctggcgctgagccttggctctcagctcccctggcagtcgcgcgactcagcgtccagccctacctgctccagggccctccctactgccagccgctgcctgtcctctcccctgacctgccttgagccagactgggccccctgggccttgggcagggctggatgggcaagttgtccaatgaggccccctcagaactggaaagcctccttctgggtgtggaggtgggcagcaatctgccatttggccctggggtcatctctctggctcagtttgcttatctgtgagcccagatgtcggcaagttcaggctgagaattagagcaaataatgaagagggagcccctttcccagggcctggctcatatgcaccgtggacaacaaataccaaaaaggctgggcacgtggctcacacccggaatctcagcactctgggaggccgaggtgggtggatcacttgacgtcaggagttcgagaccagcctggccaacatggtgaaaccccaccactactaaaaatacaaagattagccgggcgtggtggcaggtgcctgtcatcccagctactctggtggctgaatgaggcagaagaattgctggaacccaggaggcggaggctgcagtgagccaagatcgtgccactgcactccagcctgggcgacagagcaagtctctgtctcaaacaaacaaataaacaaaaaaactacttttcttcttttcattcctagcaaaaatcccctctctggacaaatactactcaaggtcagaatctccctttgcccccagtttttcattgaggaggctgaggatctgagtctctctcttttttttttttttgagatccaatccagtctcactctgttgcccaggcaggagtgcaatggcatgatcttggctcaccacgagtctctttcttaataaccaaccccattaccgggtcaggagaagctgctgcgctgtggctgcatcagggcctagagccgggctgcctgcctctgctgccctgtgtgctggcggataaggtagggaggtttgttatgcctcagtttccttaaaggtaaaatggggtgtcagtcgtctctaccttgtggcctggttttggttaatgaactaatctacacacataacaagggctcaacaaaggttagcgatgacgtttcctgccaatctgagcacctgcacactggaaccctgtaaacagttgagggtgggtggctgacttccagttcccttcaaatgcttctctgagtgtctgcgcacctgcggctctccaggggctcgactcaggtctcagtgatcacagattctaatgaagaaagggtctgtctctgtcatccaggctggagtgcagggggcacgttcatggctcactgcagcctcgactcccacctaagcctcctgagtagctgagactacaggtgtgctggaccacacccagctaattttaattttgttgcccaggctggtctgtcagtgaagttttacaccagtgagacaaacataatatttggggctcatctaaaagctcaaagtgaggctgaaggagccatccaatgtttaaatgaagaggtacatcataattcatttttaataagtatgcagagctgggtggctcatgcctctaatcctggcattttgggaggccaaggtgagaggatcgttgaagccaggagtctgagagtggcctgggtaacagaatgagaccccatctttactaaataaataataaataaataaatagctgggcgtggtggtgcatgcttatagccctagctatttgagaggctgaggtgggaggatcccttcagggatcctgcagtgagctatgatcataccactgcactcctagcctgggtgacggggggacaccctttttctaatagtaataataaattataaaatatataaattataaaatgtgtgcttatgataaatctaaacattactacctaacatacatagaaattttattgtaataaaatttctttacccttgcccattcactatcatatcttcacagagccttctggacttgtatctgcctatgttgttttctgttttttttttttttttatttgtttgtttgttttgagacagagtctcgctctgtcgcccaggccagagtgcaatggctagatctcagctcactgcaacctctgcctcccgggttcaagcaattcttctgtctcagccttctgagtaactaggattacaagagagcaccagcacgcccagctaatttttgtatcttgttttagcagaggtggagtttcaccatggctggtctggaacccccgacctcaagtgatccacccgccttggcctcccaaagtgctgggattacaggtgtgagccactgcatctggtctttttttttttttttttttttgagatagagtctcactgtgtcacctaggctggagtgcagtggcacaatcttgactcactgcaacctctgcctcccaggttcaagcagttctctgccttagcctcccgagtagctgggattacaggcgcctgcaccacgccaggctaattttttttttgtatttttagtagatacggggtttcaccatcttggccagtctagtcttgaactcctgacctcgtgatccaccagcctcagcctcccaaagtgctgggattacagacaggtgtgagccaccgtgcctggccattttttgtttgtttgtttgttttaaataaagcacatcattgtatattcactgctctgcactatttttattttttaatttaacagatcttggagactatatcctatctgtgtacacagaattatcacatcacaactttagaaaatgttttaaattaaaaatgctaaatgaatgttctagagtttatttaaccaagtgtctggttgttctcaggcttcctgtgattataggtatagctgtaagtcagcacatccctgtatccacacatcccgtggtgcctgtgagaatttatctgtggcacagattacccaaaatgacatgaggggtgagaggttttacaaatggtgaattccacgagctttgcaaatcttaactcctttttcaagaataagggaactgtgagtaggacaggtgcacggtactttcattttattttagtctaagtattttctgaaataatttgaggaggcttaaagggaggtgcaagctgggtgcgggggctcatacttgtaatcccagcactttgagaggaggaggtgggagaatacttgagctcaggagttcgagatcagcctgggcaacaccgtgaggccccatttctacaaaaaaaattttttttaaattagccagacatggtggtgtgtgcctgtggtcccagctacttgggaggctgaggtgggaggatcacttgagccctggagttcaaggcttcagcgagctatgattgtaccactgcactccagggtgggcgacagagcaagaccctgtctcaataataataaaaataaaaaaaaaaaaaaggaaaaaaaggggcacagtagacagtaccagtacttggtattttaaatggttttcaaatgaagcccacccaagctcagcaagtccagccggggcctgaggacctgagcaggcgccaggtcacacaaggtaccgggcgcaggaggcggagcccgcagcgggccctgccctgacagcggcacctgcgcggcctccgcaggttctgggatcggccgctggccaggtgcaagggaggggggacggcagccgctgtcctggggctgagagggctccgcggtctggaggggacggcgtcagcgcccgcgggggttcgcagggcagccccggggcgacccccacccccgccacggtcaagtgtcgatacagtgttgccagccgggtgccaactatgaataagtccaagggcgcggcacgtgggccgaaacgcgatccttccgcggagccgctgcgcgcagggccgtccccaccgagcccgccgcgcggcgacccctgacggcgaccctaagccccggccgaccagggcaggagctcgcgcgcgaaacttccccggcgcccgcaggagaccccggcaggggagatggcggggcccaggcagagctcggaggcccctcccggccccaccccgcgccccggccccctctgcccccgacccggtccgggggagccctcgcgggaccccagcctggtccttcgccgcctccccccgttcagccccgacccccctgatccccgcgccccccgcggtcccggcccgccccctcccccagcccgggccccagccccgtccgttagcggatcccacgcaggctccgcgcccggccccgccggcgccctcggcccacacctctctccgcgcgcgtgtcccgccgtgtcgcccccgtgtcccctccgcgtccccccccgcgccgtccccccgcgtccccccccgcgtccttcccccgtgtccccccagcgtgtccctcggccgccccgcgcgcgccggcggaactgtgggatcgccgcgcacaggaagtggcggcggcggcgcggccgagggcggagggcggagggcggcgggatgggggccgggggcggcgggcgccgcactcgctgaggccccgacgcagggccgggccgggcccagggccgaggagcgcggcggccagagcggggccgcggaggcgacgccggggacgcccgcgcgacgagcaggtggcggcggctgcaggtgagcaccgaggcccccacccgaggtcgggccgcccccctcttcccccacgccccgccgccgcccgaggtcgccctcccgccgccggaggtcgcccctgccccagccgtccgacctcgggccgcccggggccccgcgccgcaatgggccggccgcgctccgcggggcgcggggcctgggaaggcgcggggccgggaggaggtctgggcccgggtcctgtgcgccccccgcaaccccggcctccccggcggcctggtccagcgcgaggccccggccgcttcccgcagcagcctcggtggcgctgggcccagcggggaggcccgggggttcggggcgcccgggaggggcccgggccgggccgagggagggcgagtgggttcccgcggggacgtcccatccctccgtcctggactctgctccgggccccgctcggctcccccgtggacaggacgcgcccgccgcctggtttcggggcgcggcggacccgggaccccccccaggggcctcctcctcgcgcgcccaggccaagggagcagtttcacttttgccgctccgcgcggggagggctgcggggcccggggttggctgtgggttcggcccggagaccggcggcgcgtttgcaccgggcgggtcaggggatggggtcagtccgggggcaagagccgtgggggcgaaaacccactcctggccaccccaggacccttggaacattggtcccaagtacttaggaaaggagggttattagtatttgaaggcagttaaaaatggtgcagtgtttttttttttttttttaactttgagagaagtttagtgacatggggaaaatgcttttataaatggcttcccagacctttaaaaaaaaaaaagcacaattttaaaagctttgtctaggagaatacttgagcagttgggttctttttcctgggaaacatgatcttagtaga

SEQ ID NO: 9227 - DNA, 6000 bp, Homo sapiens
cggactcctgactcctgaggcccacctcagcctcccaaagcactgggattacaggcatgagccaccgtgcctggcctcgtcagggtttttaattataaatttaaattttatcgatttgagtacatgtgaagtggcatctcattttcattttaacttgcatttccctgatgtctaatgagcgctgagtgtcttttcctgacataactggtcctttctgtctttctcctgttgttctttccctgacttcttttggattagtcagatattttctattatttctcttttctttattggcttcttagccaaaccccttttgttcattttttccctagtgctttttctcctgggcacagactacgtatgcctcacatatcaaatttaatgtagggtcaatattgtatcacttcagtcttccctcttcatacataaccctttgcatcttgcacctcacacctggagttccacacttcacagtgtgaggagcttatcagtgggttacctctcaccatccatccttcacactgtccttaccttttacttctacacacactgtagaagtatcacaagctattgtttgttttaaacagtcagtggtctcttaaagaaattatgagaagggccgggtgcagtggcttatgcctgtaacccagcactttgggaggccaaggtgggcagatcacctaaggtcaggagttcaaggccagcctggggaagaccccctgccgtctctacaaaaaattaaaaaattagctggcatggtggtacgtgcctgtggtcccagctacttgggaggctgtagtgggaggatggcttgaagccagaagactgaggctacagtgagccgtgactgtgcccctgcacgccagcctgggcgacagagcaagaccctgtccccccaccaaaacattttttttctcttgatctatttcaccagtttgagtatgatatgcctgcatgtaattttctttgtatgtgttctcttcaggttttgctgaatttcttgatctgtaaatcagtatttttcaccacgtgtttggatttggagccatcattttgcaaaaatgtttccttcctagactcatactctccttctggagctccgatcacacatgcttttggccatttcatactgtcccataggtctctgaggttctctccacttttcttcaacttttttctcttcttcagattaaataatttctatccatctgccttcaagatcccaaactcctgttttctccaatctgttaatccaattcagtgaaattttcatttctgttattgtacttttcagttctagacttttcttttgattcttttagatactttgttattctgctgtgaatttctgattctttactcattaagacaatattttcatttaatcctttggacatattatttttatttattttgagatggagtcttgctctgtcacccaggctggagtgcagtggcactatcttggctcactgtaacctccacctcccggattcaagcgattctcctgcttcagctttccgagtagctggggctacaggcgtgcgccaccacacccagctaatttttgtgtttttagtagagatggggtttcaccatgttggccaggctgatctcaaactcctgggctcaagtgatctgcccacctcggcctcccaaatttctgggattacaggtgtgagccaccgtgcccagcctcctttggacatatgtagagctgctttagaatctttgtaaatacagaatctggttcattgtagggggattggtttctgttaactgctttttttttttcttaactatggcttacgttttcctctttctttgtatgtttagtgatttttgtttttttagtgtatattcaacactgataaataacaaatgagggagactcagggtgctcttccactgaaaaatcctgactttcgttctagtttgtagttccattactggacgtaccatgctgggctgtgtaggcttagctttaggctctgtttactgagcaatgtcccaggtgtctcccaggcccctcttacttggcaggacttaacctccaaactctgaccgtcttgtggatcgggtcagggttttgctttagacgttgttaaggcgggcctggagtagtccttattctaggggagggactggcaacctctggctcacaagccacatgtgttgatggcctgtttttgtacagcacttaaagccaggaatggcttttatatttttaaagagttgtttaaaaaaaaaaaaaaaacaagcaaaaatatgaaacaaaaactgcatgtggcccacacaacctaaaatacttatctgggccctttataggtcgtttgctgacccctgggaatgtgattctcaatctagtgtctcagctcaatgtcctcagtgttaatggcattaaaaaggtcttgactgggcacggtggctcgtactcgtcatcccagcactttgggaggattaggcaggaggactgcttgaggccaggagttcaagaccagcctgggcaacagagtgggaccctctctctacaaaaaaagaaaaaattagccgggcgtggtggcactcacctgtggtcccaactacttgggaggctgaggtgggaggatcacttgagcccagaagttctaggctgcactgagataacgatcaaaccactgcaccccagcctaggtgacagaacaagactgtctgaaaagaaaacaaaacggaaagtcctttcctgtagcactactggacctctagtctttgtgccatcctcaactctgtaacagccgcttcctggtaaacccatagagtcgtcccacacgtgtagtccagcctaggccaaggactttcagggaaccctacatcgacttcggctccccactcttgctaagcttcttcccctccagtgccctgccttgccggcctgctgctttagctgcccagaagtctggtctcttgcctctcacaccattacagtgcaccacactacactatgttcacacatttagcagctgtgttcacacccaaactatctcatatatacattttgttaaaaaaaacttcaggactctctaaacttatgatgccaagggtgaagttaagccctggagactgagtcagtagcaagtttgcaattctgcttcttcgattacagtttaatgctcttcctccttgttcttgagcacaagtgtcttcctcattgtggctgctctgtaaatcagggctccccgaccgccagggccacagacacataccggtcaggccacacagcaggaggtgagcttcaggccagggagcaaagcttcatctgtatttacagctgctccccatcgctggcattaccgcctgagctccgcctcctgtcaggtcagcagcagcgctggattctcctaggagggtgaaccctgttgtgaactgcacattggaggggtctaggttgcgtgctccttatgagaatctcatccctaatgatgtgtccctggcttccatcatccctagatgtgaccgtccagttgcaggaaaacaagctcagggctcccactgattccacattatgggaagttgtattttattacatattacaacataaaaataataaagtgcacaataaatgaaatgtgtttgaatcgtcctgaaaccaccccaactttgtctgtggaaaaactgcattctatgaaactggtccctggtgccaaaaaggttggggactgctgctgttaatgactaagaaagaccaggtctcccccttcccatttggtgatttttgttacagattagctgtctccattgtcctgtacctgacttagaccagacagcacagagaccccaggactgtttcatcttcagtgggtccccaaagaaaaagaccacctcgactaaacagactgttgtaactatgcattaggccttatacagaaaagacgctgaaattcggttaggcttcccgagacgctggctatagaaacgaccccaaatttctacgtttgagaacactgacttccattctttataatgtttcctgggcgcctcaagcttcgcatttgactaaactctagattctgacccttttgattatttttggttgacagtttttgtcattttatggctgggagtgatggctcacacctgtaatctcaacactttgggaggccaaggctggaggatcacttgagcccaggagtttgaaaccagcctggaaaacatagtgagatcccgacaaaagaaaagaaaagaaaaaaattagctgggcgtggtggctgcccccgtggtcccagttactggcggagggggtggggcggggggaaacaaggcgggaggatcgcttgagcctggaaggtggaggctgcagtgagccgtgtcccgccactgcactccagcctgagccaactgaggaagaccctgctccaaagaaaaaaagaaaaagaaacacccgcgccccgccccccccgtttacgtgcacaagaagcccatatgcagttaagtgtgaggtttattttgtggcattccgaaatgccgagggccaggtccccacaaaaacatttgcggcgtgagggaaacgggaagagcccagcggtaggcggaaggcacgcgccggggacactcagcggcgagggcctgcgggagcccccagcgcgataaggagcccggccggggagcagcggcccgccgcgggacgcccgagctgcggggaacgcgagggcagcgaggccggcgtctctggtccgggagcgtccaggctcgctcaccgcgcgcgaggcccgcctgccgagtcctggcctcagctccggcgcagggcccagcggggcgcccactgccgagggaggaagatggacgtgtcccgggagccccgctccgcctcccacttcccacctcccggtcccgcgcggccggcccgggcgcacttccgtcggaggcgaagcgcggcgaagacccgccccgtgaagcctcgcgcgccccggaaatggtcatgcggcggcgccgaggccggaagtggctgaggccggcagcagcgggcggcagctgcggcgcaaccggctccggagctgcctggcgcggccgggcgggcggcgccgctcaggctcgggctccggctgggcccggcgcggcctcggggctgcccatggggcgcggggggccgggccggtgacgccggacgcccatggacgcctctgaggagccgctgccgccggtgatctacaccatggagaacaagcccatcgtcacctgtgagtgcccggaggcggggagggcgcggcggtcgttgggcgggcccgggccctggcgttatgcacccggcgcccccagaccttcagcccccggcgcgctccgggctgggccgcttcctggaggtgtgaccagggctgcggctgaggcggggccctctgacttttcggggacgccctctgaccttcccgccgggcgacctctgacccctggggggcgccctcgggccggctgcagttggagccggtggaacccggcggactctgcccgggactgggcgcgcgccggcgtcgagggcgaggagcgggggctgccaccgccccgtcccgcccccgttgagccgcgcgcccgggacctgggggccccggcctcttccgccgggcggttttgcccgcgggcgccctttccccgactacggggaagtccttgggggctcgcagagttgcaggcgttggcgaagtaggaacagtttgttgcggggtgaagcgtcaggcagagccgccgggactgctttcgctcctacacacttccccgccgcgcactcaaaccattttacggatgagaaagccgaggctcgggcgcttaggcgagcttgctccccatgaacagcctcccgctcgagtctacactacggacacctggtgcctcttgggtgtcgtgtcctccccgcacccctcctttaatgcatacacaaaggaactgtttttctgttacgggaaaaatgttccctaaattttagaagtgtgactctccagagttaaatacggttaagaacagtgagcttatggg

SEQ ID NO: 9228 - DNA, 6000 bp, Homo sapiens
cattagaattttaaaaatgctaaagaatacacaaatagctaatatacatagatatttctttgtggacatgtctgaggtgttaatactgttaagtaccaggttctgttattaactacctcgcagtaggtcaatgaatgtctttgaattccatacgcactttcagtccacagcaccttctgagtagttattctaagcgtactaccacatctaaaaagaggcgtacctttaaaaggaacgctccactaaatttggtatttcgacatttacaaaagagttgtgctcccacttacaagatttcactaaatgaagaatttaaatgttcatttgtattaaccattactcgccgagcatcaggcactgcattcaaatgctttgcatagagcaatcttattttgagctccatctcatacgaacgctattcagaggtgaggctaaaccacttgtggctccatgtcacagttttggtgtatcaacctaagtaggtatcattccagatggggatgaaccatggttgtccaaatataggctctgtattgcgtatatcagtacaacagccaccaccaccccttacctggagtactgcaacaatctcctaaagggggtccctgtgtccactcttgtcccctcacagtctattctcagtcaatacaacggccagagtgtgatcgtttttaaaacgcagctagggccagatacggtgcctcatgcctgtaatcctaatactctgggagatcgaggagagaggactgtttgaacccatgagttcaagaccagcctgggcaacataaaaagaacctgtctcctataaaaacatttttaaaattagccaggcatggtggtgtgcaactgttgtcctagctacttgggaggctgaagtgagaagatcgcttgagaccaggagtcgaggctgcagtcaatgatgatcgtgccactgcactccctcctgggcaacagcgagaccctatctcttgaaacaaataaataaaagtagaaggtccttaaaagtagaagaggaaattggaagagagagccagagtgattcaatgtgaagatctgccggttagctgtgactggctttgaagatggaggaaaggagctttgagccaaggaatgcaggtagcttctgaaagctagacaaggaacggattctccctcgaaggctctagaaaaacagcactggcaacacctcattttagcccagagacctacttcatatttctgactccaaaactgtaagataataaacaggtggtgtttttaagccactaaatttgcataatttgttacactagcattaagaaactgagtctcccttcccactttagaaagggctataactctcctaagttctcaatatctccaactatggggtagctggttttctgacaaatagctggcacccaaatctagactgcctgatacaaaatgatctaatttttcccacgtaattaaggttgctctcaggcttgccctttaaggacgaacaataaaagggtaaggttctccactgggatggacgcatgcatatggagcagactgcgcaggctccgttcacaagcacatctagccgactgcgcagattctgttcacgtgcatatctagcagaatgcgcaggctccagcaggcttttttggggatgatgaagaaatgaagaccctctgtttttggtttttttttttcttgctgatgctggtctaataagccttccttttctccaataaagcctattccttaactggtgctatgtgtaaaattgtggaattcatcctgagggctgaagaaaacaggtggaaaccgagtagggatctaccttgaaggacaacataagcttccagggcaagaatatgtgttcacaaatatatacaaagtactctgaagagtactaccttcagcaggcactccaccaatatgtgttgaataaatgaataagaactatttcacaccatataaaatgaactacacatgccttaaaggattaaacatacaaggcaaaactatgaaacagaagaaaatggtggggacatttttgtggtctcaggatagaaaaagatttcttaaataaaattccaagaacataaccgtaaggagaaaaatctgattacataaaaatcaagatttatgttcaacagacaggctacagaatggaaagatgtttccaatacccaaaagtgacgatggaatagacaatggcctggaatttgataaccaaaaaaagggacaaattagaaaagtagttaaagcataggaaaaggatattcacataacgggaaaccaaaataactcaggatacaaagaaatgcccaaattcaaatcattcaaaagttcaatttaaaacaagaaactaccactttataccatgtgtgtgttgggggcagggggcggcggcggcggcaaatgtcagaaaattaaataacgagagcagttagcagggacataagattcccctatctctggagatgtggtgtacacacaggtgtagacattctggagaaaagtatatcaagcatactcatacctataacccagcaatttcatccctaactaagcattccagaaaaattctcaaattggttaacaggattgattgacaatgttcagggcagctttattggtgacagctggtgccaatccaagtgtctattttaagaaagtattaatcaaagaaaatgtggagaaagtatacactatggaatttcagtattggttaaaaggaaataatgtccacacaaaatagatatattataaaaaactgttgtctacagaaaaaagtgagaatcaggtttatagcagaatagcacttaaaaaaaatcacttattttcagggcttataaagaggtccactcccatctccacaaccaatttttttaaaattagaaaacataaattttctggaaactttggcaagatagaaaaaaaagcattatgatgtagccagaggctgagaagtggccctaatggcgtatcagcagggacacctggggctcccctaacataaacactaaaataggaagttgctacaaagaaatttatcctatgatctttcaaaaaatttatagaccaatccctagaaagtgccaaatagagaaaaaacaaaacaaaacaaaaacccatgcccttttggagaaaaaaaaaattactcagtttcttaaatgatctgtcaaaaaatattactcagtctcttaaatctttctttctctcctggttctctatgcttagtccagagaagcaaaacagagatttgagaaatagtccaaatctttcatatcagtttttgagtgagtcttatctctttttctgaaaccaattcctcaggcttctatgtcaatacttaggaaaactgagagaaaattacttgcagtttctccgtctaagggctgcccccgccagaactgcacagaacaatttcatatactttgacactctggttctgctggattaaatccaacctggggttcggaatgtttcacaagatgggatacaaactaaacttgaatttaacgaaaaattctgggaacggctagtgtcttttaaaatacagataggtgtaacattcccttttgaaactacagataaatttgagaattgtccttcattggagagcattattacagagcttagaacattttgttcccaatatattataagtggagtgtgggggtacctgcgagattaactgcacattttcctaagttatcaaatgcttttctgtgtctgaggaaattaaaagacatttttattttcaaaaataaaggtagcagttaagaaaaagcaaagcatacatatctatgtaatataaaaagagaaagcacatacagtgaaagattaacagttgggaccctcaggtgaagggtatctgcgtgttcactgcatgattttttccccaattcttctgtaggtttggagttttatatataaagagttgagggaaggctaaagtcaacagttttaatttagtactcggtctgatgatttgcttcaacctaacatctagctcatgatttaattacttcattactatacatgcctcatgacagatgctcttgtatacacaattcaggtaaaattgacttgaagtccactcagcgtcactgtatgtctaaaaataaagaagcttggaaagcctggatggaaccctgagagacaggctagtccctcaagcagttgctaaagagttgagcggtttcttctgaagttcaagataacactaccgaagaatgttatcaccgcctcgttctacaattcgctcaagtgaatcctgctaaatctttgctcttctcacgagtcagacctactgctattagtggaaactacttatgaaatgaattttatttctaaatttctaatcatcttgcaatgcaatattaggcattgtcctctcggtccgctaacctgatcaaactggggtccctaaatccaaacacgcacatacagcgtgtcttctagtacacaaaaaaatttccaagtagacaacccattgttatctccttggtttacttccttgcttaaaaacaaaaaaacaaacccagatggctaccatatacgctgataaatgattctggtgtgtgttgttctataaagagagcggatttgaaatgagtgaatcgctgagtcccgcgatgagacagggtctgcattttgctcttaaaatctcgggggcgtcaggaccacatcccagctgagcaggctgagactgctgaggagtgcggacgggcgaggaggggacgcggaaaggagggagcggcgacaggcgacccgtccggcacgggtcccggcggtgcccggtccccccgggctccaggccgctcgccccccgcccctccccttcgctccccgcacagctctcccgcccctccccacccggctccctcaagtctccacgaacggaaatgggagtcacagcgccggggaccagcggaaacaaaacacagaggcggccgcgggggggcccttgtgggggaaaaggccccggaacgaggccggcccgcgagggcccgcgctcccctcctccccggcggccgcactcacccactccggaatcggccctgtcgcccccgcccgcactccagagccggctgagaacggcagcggcgagggctccacgtgcagcgtctctccgggtaagacctgcagctcccgcgactagaagtgtgaggtcccagggcccttcccgcggaatcggcgctgagaagccccaacccccctcccgcctcccaggcaccttcgggtccaggactacaactcccggcagggtgcgcaaaacgaccgcccaaggcaacggaggctcacgaggtacaaggaagcacaacgccccaatccgctttgttttacacagtctcactttccctgcacctttatacacttcgataaccctaacgaacaggacgctgactcggaggggagcttgaactaggggaaaggccactcaaagagcgcatgcgtacagagcaaggtttcaaggaggggaaaaagaacgggtcaaattaggcgaagaaaagatggcggaggctgtgccaggggacccggaagcacttaccctccacttcctcctcctgtttggcttctgtctcacctagacccgtccggtcgcagactgtctccgagacgcttcctgtccggtgagcgtcgaccgactgaaacggcggcccataatgcattgcgatggcgggtaggcgtgtgggggcggagccagggccggaagtagagcggaggtggtggcggcggaggctttggcagctcgggactgagtgcaaggtgactgggagggtagctagatcagcgtggccttttgggactccagttctgggttttttcacgaggcctgggctgcctctcacctttactaggaggagagagcagctctgtgtcctggggaccttcacggcctggcccggggtcacagctgacctctacgtttgtagaccttggagtttgccgtagacccagaaataagatcgataccctctctgagggcaaatcggggcggcgcggggggcagggagg

SEQ ID NO: 9229 - DNA, 6000 bp, Homo sapiens
atcttaaaagtgaattcaaaattaaacaaatagaccctatgcttagaggctcagagctggtcagggtgcccattgtcatacctttgctggggatctgagatttgaaaaagtcctggatcccgttcagtggcaggcatcagcctgtgctgtgtaaagctggaaacagaggctagacccgtgaagaagtgtctagaagggggaaaggtgagtcatgtacagtgaatggaggcaccttggctgctggtctagaagctctgttagaggggcaagtagtggggaatgaagtcggtgagctggaacatcctgcagggctccaaacaggttgtggctggtttctttttggaaccagagcaatcctctaggaagtcttaggagaatgccaggaggccacacacagcgcttgggagggatgcttctcatgtatagcacttattcccaggcaaagagagtcctgggaggaaactgacacaggctacctgtgaccaagcaaatcagacagggaaatgttggtcaaagaaggaggacagaagagactggggagcaacaaatggctctcagaagacatgaatgtgttaagccacccatgtgggatggggatcaacctgtggacagcaccggcaggggcgggtgttgacacaccagatggttgggtggggtctctttcagcattctgttccccatcacctgtcactggcgggggcaggatagggacttcaggacccctggaccccttagactttctcatgggggggaaatagtatgcttttagcatacagcaacactccgtttgtgctctgctgctgctaaagaaagattgtttgcctttaggggtgtgtcttgctgaagatccagaagccccagggcaatgagagttgtccctgaggatagtagaaaccacagggtaaaggagtgaaaaagcaacaaagggcagggcacaatggctcacgcctgtaatcccaaaactttgggaggccaaggcaggaggatcactggaggccagaagttcaagaccagcctgagactcccatccctacaaaaagactttttaaattagccaaggcatggtggtgtacaactgtagttccagctactcacgaggctgagcggggagaatgtcttgagccaggagttcgaggttgcaatgagcaatggtcgcaccactgcactccagcctgggcagcggagttagaccttgtctaagaaaaaaaaaggcaacaaaagaggggccaaagggcaaggaatgcccccaggctaacacaggggcatctggacaccaactgaagggcagccagagggaagagtgaagaactgtccacatgacccttcatcctagatgggttacactgcagatctgttctttctggtaacaggctgagcctttcttcttccactatcctgtgagcagagttaggaacaaaagcaggacattcaactttcaagttaagacttgagattttcctaagaaaggatgagaagtggctggagctttggctttgatgtcacatgcagtgaggtgggagctcatggaaaatgaagataaacccactgagaggggcagggagccatgctcgcaacccatctagcaaaaggaccaagaaaaaaagaggagggaagaaagagaaatagagacagaagtgacccaaggactatatgggctatcattctgttatcatcattatttcaagatcaatcatacctataaaatggagagaggcaagaatgaaagagtgaagagagaaggaagaagaagaaaacaggaaaaaaaaaagaggaaaccatttcaagtgcatcaaggataacaaaatacactctttctcatctgtaatcatgtcttttcatttcaaatagaaaataacaactacagcatcatcataataaaataattcatcatatgtgggatagagaggaagaggagacataagaacagcatcacttacataagcctttagtttctgacagtgcttccatttatactgtcttcaccataaccagctgacagatgggtaggcattgttccacactctgatgagaataatgctccctccagctgatctgggctgctccacacatgtttacctggtctatgaattgttactaaaagggttacacatcaatgtttggtgggacaaacattttgcttcaatccattatccatttggagatgtaggcaggaggatcctgcatatgtacagcatgaccttgaggagaagaatccagggaattttcagataaagtttatgtaattttccttaaatattaaagtacatagagtttgatatggtttggctgtgtccccacccaaatctcatcttgaattgtaatccaaattgtaatccccacatgttgcaggagggactttgtgggaagtgattggatcatggaggcggttcttccatgctgttttcatgataatgagtgagttctcacgagatctgatggttttatacggggcttttccttccactttgctctgcacttctctctcctgctgccatgtaaagaaggacatgtttgcttccccttcggccatgattgtaagttcctgaggcctcagccatgctgaactgtgaatcaattaagactttttcctttataaattacccagtttcaggcagttctttataacagtgtgagaacagactaatacagagttgttgcaaaacaaaaaaggaaggaaaacatgaagtagcataaataagataataaatctccaataggcctaccactaatagacaatgttaacatggtggttggtgtgcttccttatagattttgggaataatgcctggcatctcatatttacaatttaaggccttgagttttgtggggtttttgttttgttttctgtttttgtatttttcacgtaacatgataatataaagatctcccctgttgggtttttgtttgtttgtttgttttgagtcagagcttcactcttgtcgcccaggctggagtgcagtggcgtgaccttggctcactgcaacctccgcctcctgggttcaagtgaatctcttgcctcagactcccaagtagctgggattacaggtgcccaccaccacgcccagctaaatttttgtgtttttagtagagacaggtttcaccatgttggccaggctggtcttgaactcctaacctcaggtgacccacccaccttggcctcccaaagtgctggaattacaggtgtaagccactgtgcccggccccatgttgttataaattatttgtaaacattttaaggactccacataatattctactatgtagaataatatcatatgtactacaatttaattacctatattttctatttttggatgtttagattctagttattgcaagtaaaaacacaaagaacttttacatgcataaggatttttctacagctctgatcctttccatagaataaatagatttcagtctgggcacgctgactcacacctgtaatcccagcactttgggaggccgaggcgggtggatcacctgaagtcaggagttcgagaccagcctggccaacatggcgaaactccgtctctactaaaaataacaaaaaatcagcagggtatggtggccggtgcctgtaatcccagcaactcgggaggctgaggcaggagaatcgcttgaaccagggaggtggaggttgcagtgagccgagatcgtgccattgcactccagccggggcgacagggtgagactccgtctcagaaaaaaaagaaaaaaaaaaaaagaataaatagatttcacacagtgcaatttcatgtcataggctatgaacatttcaggactttccaacgtggccatgtgggttcattttgcacccacactgtagggcaatgctggttctgcctggtgcacaggacacatcggtgcaccccttggagggcctccaatcaccctcgtccccatgagaacaccgaggtcgaagcccaggaagaagtgacctgccaaggaagaccatggaggcagtgaccctagagaatgtcttctagtcctaggtcaggaacctgcctctgcgacccgcctgcagagcaggagcctggagcctggacgtcattccctagaaggttcatgggattgtcttttggggactgccccttctcctcttgcctgccaagctggtgagcaacgctatgaaatttgctgggaagtcacctgcatcattgcatggtttgctctctggacaaggacggctcgggctgaaaggccccaaggacgttagggtgtgctcgccaaggctcgggtgcctccagcgactgtctgccgctccgggccccctcctgtctggtccacagctgcacccccagctcagggctgcacacccagtaagtgggtgcttcataaatgtttgcctaataggtgtgtggccacagctggggtgcgggacgaggctagaaagagtcgtcgggagcggaggttgagcggtctttggaggattatgttcagagatatttgaaggcccgcacgtccgagggtggggtggttcccagacggcctttctcctggctgcagtggcttcccccctggcaacctcaaactcccgcaggaaggtaggtagatctgtccgttggtcggctttctcgatcctaatgcaaaccttctgccggccttgagcctctccgacaggatctaaaacgcttccctacgcgcgttggtgttggtctggggtgcagagtgtggaggacccgggggggccggggctggtctggggtggtcccggggaaccctgggctgggccgtgcgtgtgggcggagtggggcgggacgcctggcggctctgggaggccccgcccgcccccatccctgtgcagcgctcaggcccttagaaggtgccgccccggggcggggctgtctgtggcctcagcgctcggcaggcgcgcactcagctccacacccggctctctcggcatctcagacccgggtaagttagggtctcccacctccgcggccctcttccggggcgcaagtggcctagtcgggcaaccccggggggctcctggaacctgcgtctccggacgcgcagcgggcgcgcttcaggctggaagcgccgagacccccagagtgggagacgggataggatgatcagcctctcccctcctttccttctgccattctcacttacttatacaacaaacgcataggaaagcatctcaccaacacagaacaacgaaaacattcctccattattaagttatagacattcttgtatagtatttggaaaacacttacatgcaactttcaaaagaaaagaaaatcaaaaccactcacgggacctgagtccccactttttttcaaagaccttcagctttttggggggaccagctcttgggccttggcatctccctgaggaaagggcatgggacgcggagaatattactgatatctgatcttgattgtggtaatgggaaaagtgggaaactttagaagaaagttgactaagtagcagagacgtgcgcatgtgcccaatctattgcataatgctttgccccccggatttgtcacattgctctatgtgaattgacagttcatttgagtccacatttagattaagaaggaggttccagctccattaaggaaggaccttgtcaataaccatagctgtcatgtatggtccaggtggtggggactttgctgagttcacacagttgcttaaattcagccgtgactctgatttccaatcaccaggaaaaatccctctgctttctctggccagtttcacacaatcatcaggtgagccgaggatccattggaggaaggcattatctgtatccagaggaaatagccaaggatattcaggtaggacctgcttttgataggttattggaaaatgatttgttttgaaaataaagctcacttagaagacatcagagggactcattgctgtcgtcttaaatctctgagggtgagacagctcctgtgtggtttcgctctttctggtagttgaaaggaacacttattattcatgcgttcacgcatgcctgcctgcattcgctgaatgtttattgca

SEQ ID NO: 9230 - DNA, 6000 bp, Homo sapiens
tgaatgtgaccttatttggaaacagagactttgtggatgtcatcaagttaagatgagcccattagaattggcccttatcagcccagtacagtggctcatgcctgtaatcccagcactttgggaggccgaggcaggcggatcacctgagatcaggagtttgagaccagcctgaccaacatggagaaaccccgcctccactaaaaatacaaaattagccaggcatggcggtgcatgcctgtaatcccagcactcgggaggccaaggcaggagaatcacttgaacccggcaggcggaggttgcggtgagccaagatcacgccattgcactccagcctgggcaagaaagaatgaaactctgtctcaaaaaagaaaaaaaaaagcttcttagaattggccctcatctaatctgacaggtgtccttataagaagagaacgacgtgtgaggagagacatgcaggaagaccaccatgtcatgaaaaaggcagagattggagtggtcatgctggaagccaaggaatgccaaggattgctggccaccaccagaagctggaggaggccaggaaggcatctacccagtctcagaggagcacagccctgctagcgtcttggttttggactcttggccttcagaactgcaaggcaacagacaaatgtctgttgtctcaagcctcccagcatgtggcactgtgttacagcagcaccaaaacaccaatgctctggccaagtttcggggctgttctcttggtggaaaagtaaccatctcttaagtctgaatttgcaattcactgttcacgtcagaaagtacaatcttaaacccaagaacatggggcttttgaatccagaatctaatggacatgcatgcgtaaatagaatccgagcctcatgctcttcctacctcactcgtctttggggcagttttgtgggattttcctaaggaaagggtctattttttgaaaacggccccaaggcctacggttctaaatccagaccgtgtctgagcatggacagtctaggttcctgtgtccctgccgcccagtggggccataagtcctgcatcctcctcagtgaagggcggagactgcccatccctgcagtgggtccgtatctggccctgtcccccttggctccttacagggcaagagaggctcagaaggtgcttctttctttctttattgcaattggcctagttcttggcttcttttcctgcctatatcaccagcagggagggaaggagactcctccaacaagaaggtccccaccccaaatagtgccattgtcaatgccaggaatccaaaaggtctcaacccacaaaccacaacacccctctccaggaaggggtgacaaaagctctccttcggcaatacctacgatggataaggcaccacgccgggcactttgcatccatcaactcacacagctacatcattaccaaacctgggctcaccgttcttttaaccaaagatggaggatccttttccgaggctgacctgcactcctagttgccatggagaaagaagaaaccctggttccttcaccgcatggttcctatgaggcctcagcagctgccttgtgcttctctctctggacctcacgtggcctctaggcctcactggacacagaccctgtgaccccagacaaagggtcaggaactttctgaggcccattccagcaattcctgctcagagagacgcatggtttgaaaccacatgatgcatttgtgcagccctccagttgtaacatttgcccaagggctgtgagctgcgaagctagcactggaccgggctcgctcctcagggcctcctgaacccagcggcgcagagagagatgcagaccccgagtcagaaacaacaccacctggccgtgcaaggagctgatgctgagatgcaagggctgcagtggggccttggggagaacttgcagctgccaactcattctggaggtggatacagggtagtaacatgaggcagcgtagtggtaggagcccacgaagtgaggccagtgtgctcggttcaaaccctgcctccaccacttacaggtgtatgaccttgggcgggtgacttcacttctcacagtctattttcccatccataaaatgaggttaataggagtacctaaagcaaaggctgtttcaggattaaattagtaaatagacgtaatatgcttaaaaccacagctagcacacaaagaatgctgcctttgtgttcaggacaattgtgattgttgttactattgacacaagcagtctccttaggtcagacctctgcaaagatatcacaggcctagcaccaaggttttcatggaagcgtcgtgactttcacaggatatgctgttgatgaatagagcaaggtcaagttttaccacaacctttactctagcaagttagctaaggatccactaacttcagactcaagttgtcagcatgtgtgtcgctcaaatcaaaggggacccaaaacggtaacccaaaccccaggcatctctgcatacataattttcccttcattaatttgtttagtcaacaaacttttgccagcttcctaatgtgtcagaccctagtctggctccgtgagaaatcaaaaaatgaatcaagcttcaaagaccagttgagatcagaataaaggtgatctatgtatccatccatctatccatccatccatccatccatccatccatccatccatccgtctatccatccatccatccatccatccatccatccatccgtcagtctatccatccatccatccatccatccatccatccatctattgaaacattgactaacttccatcatacccagcccatcaggatagttgctgccctaactcaatgggatgattttagcagtgttaggaaaatgctcaagaccttcctcttccaaatcctcacttacccctgattggcattcgaagttttactattaaatctttattccttagacttaaaaatacctcttgggagggacaaaatgttgagccattatgagtcatttacaccttagagtttaaaaccagacccaagggcagacgttgatggaagttggaggagccaagagaagagttccctgcccactcagggagaggattgggagagaagggctggagactcgggaccagcctctctaccccctcattttccctcgctctgtgtgtgcctgtggccctgaccctgagaggcaggaggggaaggtgtagtgctagccaggctccctgctactcatacgtgctggagtccaataactatttgatgaacgaagaacaaatcaatacctttctatttagatttcgtcacatcatgtttctgtgactttgccctctggtccaggaaacactgttttatccaagaggagccttgggccagggtcacaggtcagggaattttcaggcttcagcccagaacaggaatgacttgttccaaagaaaatcaagactaataaagatttcacaaaatatctacaaaacagaacgttacgtccatttcattcactgtcacagtgtaatatccctaaaaactatcataatattttaaagcaatttggagtttacattttctctctgcggggtttcctaataatacacaacgaatgccaagaaatcaaagccagttgtaaactaaatgtaatgaacttgtagccaaatcatctcaaagacaaagttataaaaaataatttctaaaaagtgcccagcataaaattatagataatatgggcacattttactattatgctggtacccctatatattccaatattcttaaaatggtgttcagcaaaggcgatgattctatctccaagttagttcattcctttaacagtttcatttcagcctgtgtaactgctttaggtggggtggaggatctaacgaaaaggtctatttcgttgtcaggtaaaattctgcgtggttttacgtaactttcctggcatagatagtgaaatagtatatctggtgggaaacctctaaggatagaggatctgggcctataaatgacctgaaccaaagttgtttttgtttgtgactgttcacttccaaaaacagaccaaaaaagctatgcagatgtgggttatgtcaatcctccatcaataacatttaacagatgcttccgaatgcctgctccaagctcctgacactactggatgtgctgtctttctgtccttcaccgtcccattgccagggacacaagggccaggcttttggtccatgcccagggcgtttgtccacaccagattccttcgctgcatctttttttttaaacaccaaccagagcccggcggattgatgcacactgtggaagacacgcagaagcccaagtaagtccctggccctggagcatttgcggtgtgctcagtgacgaaggggcggaaattcttgtcatgttaaatccatggctctcagcacacttctcaattccagaatcgcccacaacgattttcaaaattgaaaaggaactgggatttgtgccttgagagggtccccaaaccttggagccactcagggtgctggcttttggctacacattcccaccaagagatttcattcttgcaattttcaaggccaaacatctcttaatcagcgaatcattcctcaaagggctggaggcgttcccagccctgaccagttccctcagccaccctcaggtgctgccttcacttccagcagaactctccctagccctcctggacatcgctgtcaagcaagtgtcttgaccttccaagaaagtcaccttcttccgtcagcactggtttcacagtatgccatgtctcttatctccaacttgtagcaaattgtccctctttccacactgtgctccttgacccgtccagctccacattccaccaacagaccatccgaatcacccacagctgcagctgtagaaaaaagcaaacaaacaaaagcagttgctcgttgatcagaatcgaccagcatgcatctagggcccatagcagcctaaaggctgagaagctgagttactcaatagcagaaaagtccaaagcagtgtgaggacaaccgccaggtggtggctcagaggaggacacagtcgctgtgggcaggtggtcagggcgcaggagggaatgagctgtggatttttagtaatctacaacaatcaggcagttccaggacacagggaagtgagtgtgaacagccaatggacccggagccgagagcctgggcaggcgtaggctggactatggacgccctgcaaccctgccaggctgggaaggggaggcttgatcctgagcgcgtgttaggaaggagatgcccaggttcaggtgtatcgtgcattttttttccacagtgcagaaatgacatttctggttggtcttgaatgtctgctctggccaagccacctcctctcatgctagctaaccaagtggcacgtgtgcccacgcaggccattctaaggaacactgtaattgtctagacaattttctctcaaatactccgtcctggaagcgtctggttggcagaagagggaaggcaggagggtggcagcgtcccggctgagtcctcttgcacatgggagctggagtccagccaggctccagagcggctccggctggcaagggacctgaacaggaagatgagactcgaggttttctgcatgtgagtttggggtgaagctgtggatgtggggtgggcgggctggggttgacagtcatctgttttggaagcccttaggccctgccggttagatgtgcatgcagccaggggtccgagcgttctccagaggaagggaccgtgctggcccctacaggaaaggaagctgcaggctggtctgggtggcctccagaggaccccacgcagctggcatgagggcagccaggctcctaatgagccaggaacgacaataatccagttcctgagtgtttgggcagaactcttttcatcgcttaccaggcctgtttgggaggaaggactgaatctgttcagtgttttgaggccacagctcagctcggggagctcagcgccactgcccccttctgtctgctgggactccctcgtttttc

SEQ ID NO: 9231 - DNA, 6000 bp, Homo sapiens
tttatactctcaggagatgtctgaggatttcatctatgcattgctttgtgcatttgctatcactcctgctacttcttcctgctttgctgtagttctttagtataaatatgaatctcttattacttagaaatgattgtgaatatcttttccaaggctgtcttttctctcttaactttgcctttgtcttcatttggaccttgtttaagaaatttatgagctcatgaagatgcattcctatttttttctgtatttgttctatgtctctatttttgctgtttgcatttaggccttcaacccacactgagcttcacagatatagtaaagctggggtccaatatattttctatctatatcgagtcagttatcccaatatttattaaatgacccatgttttcttctcctctccatctaccaagataccatgatggtgctgtcagaggcagtcttagttctgtgaaatatattgactacctttttatacccttgtctcactgtaacatatttcagcactttacttaaaaaaaagcctcttcaagtcagttattattaaccaagcttctaaagagctatgaccttttctaagccaacgtcatgaaaaatacttctcaagcaaataatctattactaacaatccttgtaaaaaaactaattggaaaaataagccaagttttaaaatgaataccagtgattttatgaatcttgtttacttttgttattaagcctggttgtcgtcacctctggttggggtcacatggctttgcttccatcagaagtccatataaacaaaaataaaataattgtacctcatctagatgacacttttctctaactaaataagtaaaacatgagatatgtttcattttcttgatgccttgatgattcaaatggcttttcttttcatattaaaaatgcagaaaagtaactcagttttattacagtcttctgtatgaaggtattattgctctcaaccaggggaaacataacctgtcatcctgctcagaccatggtgactctaattgtttacatatagatattatcataagtttttaagttcttggtcgttttaatcttttaaagaaactatttcaacataatatgattatggctttacaatacactccataaaaataactttcaagagatgtttcatatgattgaagactcaaatggccccaagaaattatccagttctttccaccacattcccctttaggcatctggttgacaatattgcagggcatccattttttttggaagtgcattggaaggagacactgccatgcttctcagagtttgttttactcttttacgcccccaaatttcaagtagtttattttttccctttattgtatccaacttgcatcttttgtgtttctctttattataattctactttatgccttgggatatctttttcttgttcctaaaacattttaattatttttttcctcccatggacttacttgataattttaaacaatttttgggaaaaaagttatttgccttccttttatttccttttctctctctctcttttttttttcttttttttttttttttttttttttttttgagacagagtttcactcttgttgcccaggctggagtgtaatggcacaatatcggctcactgcaatctctgcttcctgggttcaagcaattctctacctcagcctcccaagtaactgggattacaggggtgagccaccatgcccagctaatttttgtatttttagcagagatggggtttcactatgttggccaggctggcctcaaactcctgacctcagatgatccgcccacctcagcctcccaaagtgctgggattacaggcgtgagccactgcacccagcccccttacttcgttgttatatttatgactctttacctcttttcacagtctagcagtctaaaataagcatcctatagaagaactactttgtttaaaatcattgtagaaaagttagctactcttattcctgatatattccaattattagagagaaaaactgaatttttgctcagaacactagctaaacttgggccagctgaatgagcaaaaacaacaaaacaaacacagcattttttttaagttagtgagcaacaattttaaaattcaccttttaaacgttttcccttgcttctttttttattcttcttctatcttttccttgttctgagggaaaataacaagatacttttcatcatgtatagaggggtatatttgaaagagaactcagcactaattctcttctagtcccagtcccagatgagttaaagtaatgtgaatggatggttgaagtatatggagagtgtgtcacacacagacctggttttgttattaatggtgcatgcatttttgctgtagatgaaacaaaccattgtggttgggtttttcgggaagctgactctgagatggatgctagtgtgaagagtgtttatcaaggagtgccttatgatcaacaaccgaggagggaaggacaggaagaaggactgggcgaagaaagagtgagctgggatgcaggccaatgacagtgagctctggagcaagaacagtccttcagggttgtcctgagtttgggcagaattgctcctcaatcagtcactagattgaggacactccaaaaaagagcctgtccttgggtgaagtgggcctctgcagctgagacaatctccgaggtggccaataacttccagatgacatcaccccatgaattggtggtaacatgtcctttcttgaaaggaatctggtcagtgcaactcctcccacttacgtagatgtcaaatggctatacatgtgggtcttaaacaccttttcctaaacacattttttcattcatttgcgcccactggccgggcgtggtggctcacgcctgtaatcccagcactttgggaggccgaggcgggtaaatcaactgaggtcaggagtttgagaccagcctggctaacatggtgaaaccctgtctctaccaaaaatacaaaaattagccaggtgtaatggcgggcacctgtagtaccagctactcgggagtctgaggcaggagaattgattgaacctgggaggcggaggttgccatgagccgagatcatgccactgcactccagcctgggcaacaagatgggaaacaagaatctgtctccaaaaaaaaaaaaattgctcccgctttctataatgacatgagtccaatatttcaaattagaaatgagaaatattacagtgtaccatagtgtattgtgttgtagttcatagctcaattggacctttgtcatcagaacaagtttcaactcaaaaaatctctttagttttgtgagtgctaagatgttttttaaaaatgtattcaggtaatacttgtgcgtctgctgttaatgagatcaagtaataataggatggtcactgccagcaaggtgttggggtctgtgggagaacccacagacaaatgatggcaacacacgacaggaagcagcaaatgtcctgggcgaggggcagcagaaggtccaaaacagcagccatgacacctggcgcaggagaacagcagggagacaaagaagacaaatgcagacatcaacacaataccatcagagaaatatgcagtatgtgttttaggagcagaggaagtggacatttatctaattctgggcatagggtaggctgagaagtcttgaggagccaaaaaagaatgtccaagaaaagctgagttgaatctcaaaagggtctagcgcctgaaacggtttccaaaagcagaaacaattgagtgtagttttgccattataagatgatcagagtgagaatggggctcggacagggtgtggggacagaggtgggtcaggtgcagttgctcacatgtaagagcccctatggctgacacaaaggatactcccagtaagcgaaggtctgcatctgcacagagaggaccaggcctcggagagttagcacatcctgctgaatcctaaaggtgttggagcagaggtaaatgctcgcagcaatgttttagaaacattaatctggttgaggtgggtaaggtatatcacagtgcagaaagatgaaaaaaaaaaaaaaaagaatgaccagttaggacacaattgaaagagttgtaattaaaaaggtgatagtactgtgtttggaaaaagagaaaccacacaaaagacatgttgagaattggagtagacaatacatagcagcacactctcagcagctggacacaaaaagaaatgcacaactaggaacgcttttattattcgaagcttcttgcaaccaaaatattttgctatcactactaagaacagagaattgaagaagcttagattaaggggaaacttgctatgtttggtttgggatttgagatacttctgagacatcaagatgaagatattgacatactactgaacaagcaggcatgaatcttgagaaggagtttttgtttgaaaatttagattaggagtcaacagcattgagctgacagctggggcaaaggaggtgctgagaccatcagggagagagaaggaagaacaaggccaggtcaggacactgaggaacaatggttccattagcgtatgattagtaagagacattcctttccatctgaattgttgaactatttattcatggttttcaatctcataattcaattttgtaatgtgtagtatgattcttcaaatgaatgtgatatccaccctcattaacttttgccatgggatctatgaactctcataaactcttgtagggtacttatctatcttttagacatttaaagtaaatacacataaatgaacagagatggtgactgatagggtttggctgtgtctccacccaaatctcatcttgaattttactcccataattcccacgtgttgtgggagggatctggtgggagataattgaatcatgggggcagtttcctcatactgttctcgtggtagtgaataagtcttatgagatctgatggttttatcagggatttccgcttttgcgtcttcctcattctctttgcctgatgccatccatgtaaggtgggacttgcttctccttgctttctgccatgattgtgaggctcccccagccacgtggacctgtaagtccaattaaactctttcttttgtaaattgcccagtcttggatatgtctttatccacagcatgaaaatggactaacacagtgacaaaatttattattttaaagaatatattactggcccatttaattaacttagaaataatttcaaatcatatttactataaaaaaattgtgtgatacaattctaataatggaacaaagctaacactgcaatggccatattagaatctttattgtgtaaaataaagaataattctatataggaaaaacaatatgcattatgaaataataccaggaaataaaataattcaatccactgtttaaaattacaatataatatgaggaaagatttttatcacatcagtaactatagcggacataatgttcttctattttatttcatttaattttaagttccaaggtacatgtgcaggatgtacaagtttgtcacataggtaaatgtgtgccatggtggtatgctgcacctctcaacccatcacctaggtattaagcccagcatgcattagctatttttcctgatgctttccctccccttacccatgctttcacatgctttcttcctctccctgtgtccatgagttctcattgttcaactcccgcttataagtgagaacatgcagtgtttggttttctgttcctgcattagtttgtggaagataatggcttccagctccatccatgtccctgcaaaggacatgatctcattcctttctatggctgcaaagtattccatggggtatttttaccacctttaatctcttggtgcccactctgagtgagaattgtgaaatttggcctgcatgatttagttgttagtatggctgtggtcaaaaagtcaaaagataacaagtgttggcaaggctgtgtggagaaaatggaaccccgtacagtgttggtggggatgtaaa

SEQ ID NO: 9232 - DNA, 6000 bp, Homo sapiens
tagaaaatacagttcattgaaaagatttttaaaaattacccacgacggcatcattactcagagataatcctattagcaatttattattgaatttcttgcctttttctatctatatatctatatttcctttggaagtaacatgtactatttgtattattttgaagcttttaaaaaattttaacaatatcaccttcacctttctatggcattaaataattaaatattttctagatgttgacaaactatggctgatgggtcaaatctggcccacccccttcttttgtaaataaagttttattggaacacagacatgctcatttgttcacatactgtctgtggctgctttcacgccataacagcagagtggggtcgttaggacagaccgcatggcccataaagtttaagtgctgtatttactgtctggtcctttacagaaaatctctccaaccgttttctatatcatcttgtcctcctataggtattccattatatgtgtacctcatttgttatttcacccgttcttttttgtgggtaatttggtccgtttcctgtgcatcaatattataagtgccattcttctaagtgtccttgggggtcgatatttgcgtatatctatggtgacattttaggataaattcctagaagtggaactgctaggtcaaaactttcatctgtttttgagctttccggtgtctaagtttacacagctgggaagtttacacagtttctacccctgtgactgtaggtgggggaccatttcctttcacttcatgtgaatcattgtgaagttggcatgtagttatgtctcatttgcattgttttcatttctcaagaagttgaaagctttttttttttctttttcttgagacgaggtctcgctctgtcgcccaggctggagtgcaatggcgtgatctcggctcactgcaacctccaaccgcccgggttcaagcgattctcttgcctcggcctcctgagttgctggaattacaggcacatgcccccacacccagctaatttttgtatttttagtagaggcgggtttcaccgtgttgggcaggctggtcaagaagttgaaagctttttcatacttgtgcgccatttgcattccttctttggagaaatgctgtacatttcattgtttattccaggcaatgtcctcaaggaccaagcacagaggaggcgtggggcccctgcagtgccctcagggcagcctgacagagaagcagggcaaacgggaactgacacagcctttcgattaaatgtcaatctttgatttgacaatttggggtcattttctaaatccaacttaaatacagagcagctggaatgtgaagatgtcattcctggggttcctgcagatttctaagtataagacgaagggtgggcatccttatagaggagaattgttagtgtgcgggggatcgaggtgtgagggtggagagaggatcctttctgccagctcaccaccgcagatgggctgtcctggaaggacttggtctcagaccctgagttaaaacggccttcattatcatgatgtcattcattcatctagcacatttttatcaaggactactgtgtgtcccctgctgttctaggtatggataatgcagcttcaacaaaccactgagcttgtccaggcctaaaacacagaacttgccacggtctctcatcctccctcactctgcgttcctcacagcctccacatctgcgaagtgcagcttctatttccctgctcttcctccatctcctgctcaccctctcctctgcacactcttttctcctcgcattccatgtcttttcatcatttttgtcttcaaattctcttctttcttaggcagcctcaactgatattgatcatttcattatcacactccttattgccagagggtagaagttgtgagtctccacggtcaggcagggaaagatctttttagctcttccatgacagagctctcggctcaacatgtccaagactaggagaagagaggcaggtgccagtctcatcctgggcaattgtgtgaccctgggcaggcttctctcccctttctggattccattcttccttatttttaacaaagacaacttgggcattcatgtatttttaggattgatgaggtaatttaggtgaaatggcctgctctccccaggagggaagagtgctagtgggaattctcctgctgcccagagaggcttatacttctggccaggcatctggacactccttacatattgtttccaccagatttgcctggttctaggggcaagaactgtaaagggcctgagatgtcaccctacttgcaagccaaaatttagcctgccacagtttcatgggtgctttggaagacacgagagtcctgggtcagagacaaaggactctattcctcacagtgcagcaaggggcacaaatatcctgtttgtgctggctgcctttgccttctcagtcccacagaggcatgtggagcagcctgtgtatgccgcacgtgcaggcagtttgcattgctgctgcatatcccagagttaagggaaccctcatctttacagtggtctgcaagcagacctgtgcaaactttgctctggaggaaggcattatatttgttaaactggacagtaaacaaacctgcctcttgctctggagggagacgctatctgtatcttccaaggctgtttgctctacacacattcttgaagagatgatctggaatgaaagctgtcagtgtctgtgcacagcaattgtggagaatggtgtatcaacatcctgtcctcggctggacatggtggctcacgcttgtaatcccagtactttggagagccaagtggggagaatcacttgagcccaggagtttgacatcagcctgagcaacatagtgagatccccatctctataagaaaaaatttaaacaaacaaacaaaaatcaacatcttgtccttgcatctcctctgggagatctcagcactacctctgcctgcaagccccccgtgtgggtttcaccccctcctctgcagggaaacagccttggaagttgggatgctacttcccctccatcttagtgtcatagggctgctgaaacaaagtccccaaaactgggtgacttaaaacaacaggaatttattgtctcagttctggaggccagaagtctgaattccaaggtgtcatcaaggccatactccctcttaaacccatagggcaccgtgccctgcctcttcctagctcctggtggtttgccaataatctttggcatttcttggtgtgtagatgcattgttcccatctctgccttcatcttcatgaggctggcttctgcctgtgtctcctcccatcctcttcccttcatgcatgtttgtccctgtgtcctgatttctcctttttgtttttgtgttttggagacggagttttgctcttgttgcccaggctggagtgtagcagtgcgatctcagctcactgccacctctgcctcccaggttcaagcgattctcatgcctcagcctcctgagtagttgggattacaggtgcctgccatcatgcccagctaatttttgtatttttaatagagatggggtttcaccatgttggccaggcttgtcttgaactcctgacttcaggtgatccacccgctttggcttcccaaaatgttgggattacaggagtgagccactgcacccggctgttttccccctttttataagggcaacagccacgttggattagggcccaccctaatgactcattttaactagatgactctgtaaagactctccaggccatctccaaataagatgccattctgaggtactaagagttaagacctcaacgtgtctttctgggggatactattcaacccatagcacatcccctcatcccccatggaataaccgggtcagaggtggagcaggtaggactgaactagagaatgtgccccttggtgggtggccctttccctaattaaggcacctttctttgggctgagacttctctgcaaagaggggagggggaaaggatagttaaatttgtaagtttcatggcactccaagtcaggttctgtggctttctgctcttcctttttctggttttcagatgcagatgctgttgctgcacagatcctgtcactgctgccattgaagttttttccaatcatcgtcattgggatcattgcattgatattagcactggccattggtctgggcagtgagtacaattcattatttagtaggatctcaaatacctagccaagtagttaaactttcatgagcgccccctctcatcccagcattttgctgctgcccagccttaattactggaggcaaacatccttttggtttgctgacttgaagttttatttgcccacatgaatgtaaagtcagtctggggtgccgcaagggctgctggccatgctcatggctttgtcaccaaggaacctgcccggttaggagtggccaaaggcagctgatgaaatagaatcctgcaggtgggagggaggcactgaccggggcagcggggagaagacaaagagacctattcatgcaatgcaggcgcaccagctgtttttacaataaggtgcatgtggcttttgagaaagtgggtcatttggatggagggtctctaatagggaacaatttttctttcaaatacctgaatcacaggtcagttcaattcgccacctgccccactgtgtggtccacacttcgttcactttctgccttcggtaagagaaaccaggaaggccgagcagttctcagtcaggactccttgctcggctggctcagcaggtcggccccccgccatgcagtttctctcttgaccttgagacctccagagtctaaattcaccttgcactgtggttcctgggccaggccacatagcgagataaagtggggcacagcagccccaccccttggaattcaaaacagaaactgggctgcaggaaacaggctgctgacagggacgcaatttcaatacaggtttcattattcacgggccagctccgcactgtgtggcagggggacagttgttagtgttgcactctgaaagagctgttggttaattcctgccttcctcccttttcccagtccacttcgactgctcagggaagtacagatgtcgctcatcctttaagtgtatcgagctgatagctcgatgtgacggagtctcggattgcaaagacggggaggacgagtaccgctgtggtaaggtcatggctcttcccctggggaaacagaaggaagcagcagaagccaaccctgacccttcccatctgtaaaatgggtccaagtcattgccatttttaggtcatgtcttcagctgggattgaactggcgtttgcccaaagacatgttgggctggggggtcagggagggccttccatggagctctggctctcttggggagaccacataagcaataagatgagaccagcgagaagtctcagggatccagagtcactgctctgtgatggggaggctgccgtggacaagaagtgggtcagatttggcagaggaggggtttgagctggctgtggagaaacccctgcctatggtctcagggttccactggccactaataagcctttctttctgcacatcggccagtccgggtgggtggtcagaatgccgtgctccaggtgttcacagctgcttcgtggaagaccatgtgctccgatgactggaagggtcactacgcaaatgttgcctgtgcccaactgggtttcccaaggtaagttaaagagcatttccaacccatgggcaaaacacagagaggataacaataaagaaagacaactaccatttagttgggcactattgggtgctttaacgctctcagattacatcctcacatccaccttaggatgcccgatatcatcctcacttcacaggcaagcaaaccaaggccagacaggctaagtgacttgctcaaggcacatgggaagtggcatgtttgggggttcccagggccaggccaggatcggagatacgaacatgcaataaaaagtttcaaagtagaaaacaa

SEQ ID NO: 9233 - DNA, 6000 bp, Homo sapiens; identical to SEQ ID NO: 1004

SEQ ID NO: 9234 - DNA, 6000 bp, Homo sapiens
ttttgcctagtgttgctttggctatgagggccttttttggttccatatgaattttagaattgtttttttctaattctgtgaagaatgatggtggtattttgatgaggattgtgttgaatttgtaaactgcttctggcagtatggtcattttcacaatattgattctatccatctatgagcatgggatatatttccatttgtttgcattgtctatgatttctttcagcagtgttttgaatttttccttgtagaggtctttcacctcattggttaggtagattcccaagtattttttttttttcagctattgtaaaaggggttgaattcttcatttgattctccacttggtttgtgttgctgtatagaagagctactgatttgtgtatgttaattttgtattcagaaactttgctgaattattttatcagtcctaggaactttctggaggagtcttaataatgttttctaggtaaatgatcatactgtcagcaaacagtgacagtttgacttcctctttactgatttggatgccctttatttctttctcttgtctgattgctctggctaggatttccagtactgtgttgaagaggagtggtgagtgagagtggacatccttgtcttgttccagttctcggagggaatcctttcaacttttccccattcagtactatgttggctgtgggtttgtcatagatggcttttattacatttaggtatgatgtcccttgtatgctgattttgctgagagttttaatcataaagtgatgctggattttgtacaatgctttttctgcatctattgagatgagtatgtgatttttgtttttaattttgtttgtgtggcgtatcacatttattgacttgcgtatgttaaaccattcctgtttctctggtatgaaacccacttgatcatggtggattatctttctgacatgttgttgggttcagttagctagtatttagttaaggattttaacatctaagttcatcaaggatattggtctgtagttttctttttggttatgtcctttcctggttttggtattagggttatgctggcttcatagaatgaatttgggtgggttccttctttctttatcttatggaatagtgtcaataggactggaaccaactcttctttggtagaattctgctgtgaatccgtctggtcctggacttttttgtgttggtaattttttaattaccatttcagtctcactgcttgttattggtctgttcagggtatctaattcttcctgatttaagctagggggttgtgttttttttaggattatccatctcttctaggtttgctagtttatgtgtgtaaggatgttcatagtagccttgaataatcttttgtatttctgtggtgtctgttgtaatatctcctgttttgtttcttaatgaggttatttggattttctttcttcttttcttgggttaatcttgttaatggtctatcaattttatttatcttttcaaggaagcagctttttgtttcatttatcttttgatattctttctgtttgtttcaatttcagttagctctgctctgatcttggttgtttccttttctgctgggtttgggtttggtttgttcttgtttctcttattccttgaggtatggccttagagtgtcagtttgtactctttctttttgatgtaggcatgtaggcctattaactttcctcttagcactgcctttgccatatcccagaggttttgataggttgtatcattattgttgttcagtttgaagaattttttaatttccatttggattttgtttttgacccaaagttcattcaggagcaggttatttaatttccatgtatttgcatggtttcaaaagttccttttggagatgatttccaattttattacactgtggtctgagagtgattgatataatttcaagtttcttaattttactgaggctcctttttcggcttatcatacagtctatcttggagaaagttccatgcgctattgaatagaatgtgtattctgcagttgttggatgaaatgttctgtatatatctgttaagtccatttgttccaagatatagtttaaatccattgtttctttgttgactttctggcttgatgccctgtctagtgctgtcactggagtattgatgtccccactattattgtgttgctttatatctcatttcctaggtctattagtaattgttttataaatttgggagctccagtgttaggtgcatatatgtttaggcttgtgatattttcctgttggacaaggccttttaccattatataatgtccctctttgtcacttttaactgctgttgctttaaagtttgttttgtctgatataagaatagctacccctacttgcttttgttgttcttttgcatgaaatgcctttttcacctctttaatttaagtttatgtgagtccttatgtgtcaggtgagtctctggaaggcagcagatggctggtgagttcttatccattctgcagttctgtatcttttaagtggagcacttaggccatttacactcaatgttagtattgagatgtgaggtaccattgctttcatcttgctatttgttgcctttgtaccttgttttttgttttcacttttccacttgtatttttgttttataggtcctgtgtgatttatgctttaaagaggttctatttaatgtgtttccaggattcatttcaagatttagagctacttttagcagttcttgtagtggtggcttggaagtggcaaattctctcagcatttgtttgtttgaaaaagactgtatctttccttcatatatgatgcttagttttgctggatacaagattcttggctgataattgttttgtttgaggaggctgaagatagggccccaatcccttctagcttttagggtttctgctgagaaatctgctgttaatctgataggttttcctttataggttacctggtgcttctgtctcacagctcttaagattctttcctttgtcttaactttagataacccgatgacaatgggcctaggtggtgatctttttgtgatgaagttcccaagtgttctttgtgcttcttgtatttcgatgtctagatctctagcaaggctggggaagttttccctgattattctgcaaaatatgttttctaaacttttagatttcttgtcttccttaggaacagcaactattcttaggtttagttgtttaacataatcccaaacttcctggaggctttgttcatattttcttattctttgttcgttggatttggttaattcaaagaccttattttcgagctctgaagttcagagcattttgcatttctataagtgtatccaatgttttctgaattttttattgttttttctttatgctatctagttccttggatatgtctcccttcacttcgttcactcgcgtctgtgtgaagagaccaccaaacaggctttgtgtgagcaacaaggctgtttattgcacctgggtgcaggcaggctgagtctgaaaagagagtcagcgaagggagataggggtagggccattttataagatttgggtagataaaggaaaattacagtcaaaggggggttgttctctggcgggcaggagtgggggtcacaaggtgctcagtgggggagcttttgagtcagatgagccaggagaaggaatttcacaagataatgccatcagttaaggcaggaacaggccattttcacttcttttgtggtggaatgtcatcagttaaggcaggaaccggccatctggatgtgtacgtgcaggtcaaaggggatatgatggcttagcttgggctcagaggcctgacaacttcttttatcagtttttggatttccttgcattggtctttccctttctctggtgcctccctgattagcttaataactgatctcctgaattctttttcatgtaaatcagggatttcttcttggttgggatccattgctggtaaactaatgtgattttttaggggtgttaaagagccttgttttgtcatattaccagagttgattttctggtttcttctcttttgggtagcctctgtcagagggaagatctagggctgaaggctgttgttcagattcttttgtcccacaaggtgttccctcgatgtagtactctccgccttttcctatgcatgtggcttcctgtgagccaatctgcaatgattgctgtctttcttttgtgtctagccagccagtgagtctacagggctccagtctggtacagggggttgtctgcacagagtcctgcgatgtgaactgtttatgggtctctcagccgtggatcccagcacctgtttccagtggaggtggcaggggtgtgaaatggactctgtgagggttcttagccttggtggtttaatggtctatttttgtgctggttggcctcctgccaggaggtggcgctttccagagagcatcagctgtggtagtgtggagaggaaccggcagtgggtgcggccccagaactcccaagattatatctcctttgtcttctgctaccagggtgggtagggaagggccatcaggttggggtggggctagggggtgtctgagttcagactctctttgtgtgggtcttgctgcagctgctgtgggggatgggcatgacattcccaagtcaatggggttgtgtacctaggaggattatggctgcctctgctgagtcatgcaggttgtcagggaagtcggggaaagctggcagtcacaggcctcacccacctcccatgcaaactgaagggtcagtctcactcccaccattgccccccaaacagccttgagtctgtttccaggtggtgggtaagctgagcttgagaacttgccccaggctacccacctcccagctgggaacgaaaagggcttggttcttcccccacctgtgggagtgtgcgcacgggattcatgccctccccccagttctggccaggaggcttctcacatggttccaattgttaaaaaattcagctggagatttccttctccctgtggtgtttttcccccgctcctctggctgccttcctgatggatctctgtggtcccaggcaggaatggcctgcttggggacccagcgagctcccaaggcctttcctgctgcttcctctatccctgtgttttgcttggctctctaaattgactcagctccaggtaaggttggaaacttctcccacaaacagaccttcagtttctccagtgggggtgtgtgtttgggagaggagggtctccctttcccacttttgcagttggggcactcacagtatttgaggcatctcccaggtcctgcaggagcagtcggcttccttcagaggggctgtgggtcctctcggtatttctggtttgttcttgtagtcgatctggggctaaaattcacagtgccagcctcagcatgctgctctgtcggagtcaaagctacagcctagtcctgcctcccttctgccatgagctcctcattttctcagtagatgcaatttcgaacagcaataacaacattgtagttttttacaacaagcataaatgattgtacttttgggcagcggaattttatgtaaaatgaggaaatgggtggtttccagcctgcttgcctcttggtggtgactcgcagctttcagcatttagaatctcttgctactcattgctttcaggatgccacagattctcttttgtctggagaaatgtatgtgataacctggcactcacgccttggtgtctaggtaggtatattaacctaccaaggatgtatgcattttagagacgttatctggaaagatcaattcatgactcagagcatgtttttccaagtgcggcatttctaggatacagcatctggacagggaaaatgtttctgagcagtggagtagttaatttttttttgttttttttttttgtttttttgttttgttttgttttgttttttttttgaggcggagtctcgctctgtctcccaggctggagcgcagtggcgcgatctcggctcactgcaagctcc

SEQ ID NO: 9235 - DNA, 6000 bp, Homo sapiens
tggtgaaaggagggggctgtggcccatgacaaacagcaagaaaaacccagcccatcaccggagacctaagggaattcatcctttcgctaacatgccaattcctctgaccttgatcctggaatttcttgaaacaagggggcaccaagtcacatatcagggccccacttggtaatgatcaaggcctactttgagctcggacctcttacagctctgttgaatccagggaagacactcacctacccactcacaggtgtcagcggccctgcctttggctatgtcaatccccacggacaccaacgatgacacaaaatggcagcaaacagtggaagatggtagtcagagaaggcaacagagttctcaggaaatggagtccagaagttgtagaatttggactgtgggtatggcaggagtgggggttgggggaggcgttgtagatgaaggcagggagaggcgcaaacaggtggggtgaacagcagaggaagaggcagacaagtagggcacatgtgaccttcacgaagtacaatttcaaagactcactgatggaatagccgggtcatggggagctgtggagcgcttgactgggcacagagctgggtctcattacgagaaaactgaacagcatgatgagaagtttgctgtgaaatgcagggggctttggcactagacaggcctggctaggagcccacactgccactcattggctgtgtgatttggggcatgctcagccagattttgatccaacaagcaaaaccatcatgtgatgtgatgtgtgtgtgtgtgtgtgtgcgtgtgtgtgtgtgtgtgtgtgtgtgtgtgttgttatattacagagatttgacctcacataaacatgagagatgtgtgcacagtccaggagagacaattttcccctgtccggtgctggagcctgaagtcctcagggcaggaggccgggaagagaaggtggacaagagatggaggaagcagggacaagctgaaatctaaggctcagctgccaccctcctcaccctgctctccatctccacacctccagcttacacgaccacatgagatccacggggagctggaggagcctggagcctgtctgcatccctgccatctaggacatcagcagagaagccacaggtcgggagctgcaaagatggatgccttgtgccctgccccagcctcccaagggtaaaggaatatggctgcacctttccttccatcttccaagtctcgcacattgctagggtttgaatgtgtccccaaatttcacgtgctggaaatttgattcccaatatggcagtatggaggaatgaggcctttcagaggtgattggttatggtgatcctgccctcatggatgggtggattcattcatggactaatgggttcatggaccaatggttatcatgggagtggggctggtggctttataaaagaggggatgggcatggtggctcactcctgtaatcccaacactttgggaggccgaggcaggtggatcacttgaggtcagtagttcaagaccagggcaacaggtgaaacaccaactctactaaaaatacaaaaattagccgggtgtggtggcaggtgcctgtaatcccagctacttgggaggctgaggcaggaaaattgcttgaacccaggaggcagaggttgcagtgagccaagattgcaccattgcactccagcctaggcaacagagtgatactccatctcaaaagaaaaaaaaaaaaaagaggaagataaatccgagcaccttagcaccctcagccccccttgccatgtgatgccctgaccacctcatgactctgcagagaatctccaccagcaagaaggccctcaccagatttagtccctagaccttggacttctcagcctcccaaaatgtaagaaataaatgccttttctttatcaattacccagcttcagatattctgttataagcaacagaaaatggaccaagacacacacaaacatccttccctgcccatgttacctcagaacttttcagggaggggaattctaggaaatgcagttacagtttagcagacctactgcagtgcaaacccaccacaggccaagtcactgaactctgctagtgtccccatgggacagccatcgcctgcctaactgggaggtctgagtgttataatacctagagaagcaccactggccagcaaaaaatgttggcttctttctgccatcccccacccactctcctgagggaggtgagaggagtccctctaggctattagaaatgcttcaggaagatcaactgattacaaggtaaggaattaatggaaagggatggtgcagattcagggtttgtagggctgaagtgtatataatagatggagccctctttataaacaaatacacaactcactataaaattaggcacaaaagtatttctttttcttttcttttttttttttttttgagatggagccttactctgcactcaggctggagtgcagtggtgctgtctcagctcactgcaacctccatctcccaggttcaagcaattgtcatgcctcagcctcccaagtagctgggattacaggcacctgccactatgcctggctaatttttctatttttagtagagatggggtttcaccatgttggccaggctggtcttgaactcctgacctcaggtgatccacccacctcggcctcccaaagtgctggaattacaggtgtgagccaccacatctggccaaaagtatttctttagaatgatatacaggttacaattttttttttttttttgagacagagtcttgctctgtggctcaggctagagtgcagcagcatgatctcagctcacggcaacctccacctcctgggttcatgtgattctcctgtctcagcctcccaagtagcagggattacaggcacatgccaccacgcctggctaatttttgtatttttagtagagacgagtttcaccatgttggccaggctggtcttgaactcctgatctcaggtgatccacctggctcagcctcccaaagcgctgggattagaggcgtgagccaccgcacccagccatcaaagatgtaaccttgaaacaaactgcagaagccttttcccttagccttaaaatggactccatgtccctcccttcttcaccgtataaactcccttcacatttatctaactgtatgcccgtgtctagttacgtgccttcttagaggttccagacgctaatcttgagacagacagaccaagcctggagattcttctgcaaaattccacatgtgacctcaaggcgtctaattaagaatccagccattgttgagatgatgccagaccacaggcttcctgtggactaggacccaagacagccaccggaacaagacaaacagacagtgtacttagcataatccttgcctgacttccacatcgttttcccgttttaaacccttgccttggccgggcgcggtggctcacgcctgtaatcccagcactttgggaggccgaggcaggcagatcacgaggtcaggagatcgagaccaacctggctaacacggtgaaaacccatctctacaaaaaacacaaaaaattagccgggtgtggtggcgtgcgcctgcagtcccagctactcgggaggctgaggcaggagaatggtgtgaacccagaaggcggagcttgcagtgagcggagatcacaccactgcactccagcctgggtgacggagactctgtctcaaataaataaataaataaataaataaataaataaataaataaataaaataaataacccttgcctttcccactccccataccccacaattcaacgtgattgctttggggataggaatccaaccacttccccttgctagctttggaaataaagtcactttctttccaccacatcttgctcttgttagactctgcaagcagccagcgactgaaccagcattcggttacatcccctgaggcggatgacacttgtgtgatcctgtaaccgatttcttgttagaatgttggcatctttcacccagtcgttttcttgtaattttatttatttgtttgaaaacagaatccttcttgcaatcctgtcattttcagtgccttttttttttttttttttttttttttttttttttttttttgagacggagtctcggtctgtcacccaggccggggtgcagtggcgcaatctccgctcactacaacctccgcctcccgggttcaagtgattctcctgtcttagccctccaagtagctgggattacaggcgccggccaccacgcctgactaatttttgtatttttagtagagacgggtttcagccatattggccaggctggtctccaactcctggcctcatgtgatccgcccacctcggcctcctaaagtgctgagattacaggcgtgagccaccgcgcctggcatcagtgcatactttttgaagtgattccaagttatcgcccgcttttttcgtgtaacatataaatacatctctgtatctagaaatatccaatgcataattcaattgtctgcgaggtatttcatcacgtattttcacgagcgtggccaatttcaaaatagttctacaaagaggaaatgcaagaatgtgggaagagcaaaagaaaagctctatgttgcaaaacccatttttgctaacgtgtccagtgggctcccgggacgacctgtttttaaattcttggtctccctgcaccgcgtccctcctttgctgcgctagctttatgacgcatcttggaagaacagggcagatttaaaaccctctcccaacaggcgtcaaacgacatggtgcaggctcgggctggggagcgggcctgcggctgcccagctgctaaaggacttcctactcgtgcaccgccgccggctccagggcaaaccccacgccatttagaaatgctggaagtttctgtctctccctccccctgctcggaggccattccccccacccccagagccccacctcctccttcactgggccctttctaactccttccccttaaaacccttttcaaaatggggttgactggaggcggaggttgcagtgagccgagatcgccccactgcactccagcctggtgactccgtctcaaaaaaaaggggaggggggcgggggagagttgaaagcttaatatgtactttgggggctattaaagcaaacatttcgactaaaggggcgaatcctcgaattgtgcgatcaagcacccgagaggagagttggggggggtcaggaggggtgggggctccagggaaagcccgggggtctgggccggggtctcgcggggcccttccggaaggatcgcggcccccgaaggtgggcgtcccgcggggctccagtctccaggacgttccgggaggctccgcgctctgggaggccggctgcgtggggtccccgcgctgcagccgcagaggccccccagggccgcggttcccggagcgggaaagtcccgcgcgggggcggtggcctcgggggcgggacggggcgggggcgggggcgcgggcggccgagccgaatcccctccaccgggacgccccgctgctgctcgggaagaggcgggccctgcgcgccctgcgctcgccatggcggtttgggcggcgacgtgagcggctccgcggaccccgagcggggccccggccgcgacctgagccgccgccgagcgcccggggccatgcgaccgacgctgctgtggtcgctgctgctgctgctcggagtcttcgccgccgccgccgcggccccgccaggtgagccgggcctgggcctccgcggcgggacgcgggcgcagccgcagcatgtgggggctgggggactcccggatcgtggggtggggggaatctgccgggtgctcagagtgggtgggaatctgcggggtgctcctggtgggtgggatatgcggagtgctcagatcaggtgggaacctgcgggtgccccaggtgggggtcttgcggggtgcccagggctagaggggcccgctgggagcccgcagcggggctgggatgggcggccaggagttccagacagga

SEQ ID NO: 9236 - DNA, 6000 bp, Homo sapiens
ggagctaatagttgatgagacagttgggagtctaaaatgtttgagagagctgcatctttaatgcattattttatctaatctttctatatataaataacttgggaaaatcctaatatgccttgcacatagttgacagtttaatttgaaaggaactaatatcacttctagtatattcaggttgtagggagtaaactgacatttactgagccacctccccattgcactgggcaatactagctttctctgttacttattccttataaatcataaggagcaagttggtttcattttaaaagccagacagttgagacttgttgaggctcatagagatgaagttgttgcctgagatcctacagttaggaagtgacggagcatggaacccagcccttaaaaactgtgctgttttcttctgtaccgtgccacctacatagatgtggtacctacacccacctcccttcttacagaatcatgaaatctgtctgttggggtggggagaaaacaagcttgggtatgcccatgttttttgtttttggtaggttacacaaaagtgattgtaattcaggtaattagttttcagaggtgtctgtgtgttctataacccttcaattattagctggctaagtgaatatttttcatttggatcagaggatgagcagggctcatcaagcttaccattgacagagtgctggactaggcgtctcagattgtaccttgagtgtgtggtttgtaaattgactccaaagctaaaagaggtggttgtttggtcacgtttaagattattgcgtactactctttgcaggccccgccctgtgtcattgaacttatgacttgaagccctgagtataggagataatttttcttgttccttgtttggttttagtggcaggtggttttttattttattatttttttgatagagtgcccatatatcctgctgtttacatatagttccagaataagtttctggtttggaagataaattatatggtcacccagacagtactagagagatctggtcatgataactaattacattttggttaacatggttatatcacctgaaggagtgcttatttaaatttggtcttacctttttttctctttctatttggtcaaatgcagcaaatatttatatttacacttctctatttggattaattcttcagttgcaatttaatttatccagatgcgtggaatagaaccaaaactgcattctaattctgtgcaaaacaataaaatactactttctgagaaggatgccttctcttttgggaagaaggggaatctgctctgtttcaaagcacctttgtgttcaaggtttggctaaatctgctcatcaccactaggggactgtttctttttgcattctacaagtattactcccattacagaagctttttaagaaaaaaatggactaccaaggaacccacctacatgcttttcataactatacctattttattgtcttataattttacttgagaggtttgcgtgaatgatgaactgtgacaaaaagcatatataaatataaaaatacaagttaaaaagcctcatgttagctgaagattcttccatgtgtattcttataaaaataagggaaccctggacagtgctcattgtattttgttgaagaaatgttaacttctttaaaaggaagaaaaacatatatatatatataacatactgtatattcagaaccatttttaaggaatgtagtttatctcttgaaagactgaaattcaaggctgtgactgtgactagagtgtaaaatatagctgcattgcattatagtattttatatatttctacaaaccaaattgacctgtttttggttttgtttttccttttccagtctttaccaggtgctggtctctgcatgtgttttgtttaagttggaaaaatctagacacgacccacagagtggtatggtatccagtgagaagggaactgtccgcagtggctttgaaggatatgaggaagcctaggcggagagttgagaattcagccttgagctagtgttagggtactatttggtacctctcctgtgggcagagcgactttactagagaagttaggagttagggctagcatgagaacttcatgcagtttgagcattcatcaggcagcagaatatagcttctatatttaccttgcataaatcagatttgacaatgaagaacaatgttactgatagtaacagtgcttcccagtgattgaggaagtgcttgttttctttttcagcactttgttctctgaacaaataagctgcagcagctactatgacacataacccaccctatttcccccccaacggccagatgaaaccagaaatacccactgtgtttttctctcccttctttggaaagcacgtggttgctactgccattgggaagagtgatacctgattagccaggtagccttctgaaaattgaaacaagtggcctgaggatgacttggatggctgttgggtagcagagagccctggaggcagggtttcataactgcgaacagcagttttcattgtaattgacacagcagttttcattgtaattgacaagcttcccttatgcagaaacatttaacgatacctttttaaataatgtttactagtcatctgattagattttattaaaaatttagatgattcgtcctacataatgtcaaagcatttgtttaaaaacttggaagcttttgggggtggggaaggtggtcatagaaatatgatcatcttcaggatttggcaggtatgaagtgatacaaacctcaacttttaagatttttttttttttttttgcttttctctggcaatcaatcttatttatgccagccgttgacacttagaaaggatttaaatcacttttcatagcataattattgtattgcttaatgctttaaaaaggcacgcagatgggattgagacatttctatccaggcagttttttctgcattagacctaagaacctaattttgtagggcagtagtctctaggcattatgtttagctccttttgtcagtgagaagtgtgttgtaaagtttctaatactgtggtctgttttgaacggttttgagaagaggtagctttagtataatttataggacttaaaaggaaaatgcctagaatcatcagaaaaagcatggaaaaacattcttctctgaggttgccttattggaaaaggagaaatcatttagaagttaatgtgtggaaggcattaggttgaataaaattgttgttcgtattgatctgtcagctgcaattacaattaactgaaaatttagtatttgtctctttttcaggagagaagccgtcaaattttaatacatttaattttaggtatatttaaatgtctgttttgcagagtgattatcttaatccagaactgaaaaattcctgatggtcctactgaagatttatctaatggtccacaaatgtctgttttgttgaggtttggcggacataataataaatcattttttagtcttctgaaaacttttctcctcctccctcttttctctgcttcttatacccttcaacaaaaagcattaaaaggaaaacataaaatcacgcctttagtcagtgccgttatcctctcagaggttgttttggaaatactgcctgatgaaaaggaagagaaggaaattgcttcttttaaagtttgctttttatcttcttgcagcatcttctaactggcagaaataatacaatttttgagttgttttgtaagttggatatttttagttttgtgtggaatgtcgtgtttcccattagggcagggggcgtctcacaagatctaggttactgtatgacaactatatccatttactggagtttaagaagctttataacaatacatttccagagactaggcagtacttggttttctgtatttaaattttctgagggtagatgataacatctagtaaacaccacctgcctgttccatccaggaccctaactggccataaagttacccccaaactctcttaggattcatagtattttaagatttcatttttgtgcccttattacgaatataattagtgttttctcccctttagggtgctttaagatcttagtgcctgtcctaatctgagcataccacagtaagacaagaaagggcaatgctgtggtaggcagttagctgctgaagttaggccacttagttatgaggtagatgaatttctgtcctcagctcaaaatgataatattctcactgacaaaagtatcagctgtgatcatatagattgctctttcctgtggaactgaagtgtattaaaaaaattttttttcttccaataaagaatgtctcgttgcgccgggtttgctagactgaaagtttcctcatcacgtggcgagacctcctctacttcaatctttgtcttttgtctctgctgccttgcagggttggtacagtaggcttcactagacttagctgcaactcagaatttctcctccagcacctgagtaaatgctgatggtcttgtggagagtggattaagagtacgagctaagttctcaatcccaattaagaagcggaaaatttaaactgtcttcttcaaagtttatcacaaccaccaccatcaagacagcaaaccaaaggacaaagactttgaccctgctgtgttgctctgtgtagtccagttcacgtatggtttacagacttggctggggttactaaaaataaataaaaagttggacacttctgtcattggagcgctattattcacaagttaccagaatgagagctgtactggacacagcagacattgccatagtggccctgtattttatcctggtcatgtgcattggtttttttgccatgtggaaatctaatagaagcaccgtgagtggatacttcctggcggggcgctctatgacctgggtaacaattggtgcctctctgtttgtgagcaatattgggagtgagcacttcattgggctggcaggatctggagctgcaagtggatttgcagtgggcgcatgggaattcaatgccttactgcttttacaacttctgggatgggttttcatcccaatttacatccggtcaggggtatataccatgcctgaatacttgtccaagcgatttggtggccataggattcaggtctattttgcagccttgtctctgattctctatattttcaccaagctctcggtggatctgtattcgggtgccctttttatccaggagtctttgggttggaatctttatgtgtctgtcatcctgctcattggcatgactgctttgctgactgtcaccggaggccttgttgcagtgatctacacagacactctgcaggctctgctcatgatcattggggcacttacacttatgattattagcataatggagattggcgggtttgaggaagttaagagaaggtacatgttggcctcacccgatgtcacttccatcttattgacatacaacctttccaacacaaattcttgtaatgtctcccctaagaaagaagccctgaaaatgctgcggaatccaacagatgaagatgttccttggcctggattcattcttgggcagaccccagcttcagtatggtactggtgtgctgaccaagtcatcgtgcagagggtccttgcagccaaaaacattgctcatgccaaaggctctactcttatggctggcttcttaaagctcctgccaatgtttatcatagttgtcccaggaatgatttccaggatactgtttactgatgatatagcttgcatcaacccagagcactgcatgctggtgtgtggaagcagagctggttgctccaatattgcttacccacgcctggtgatgaagctggttcctgtgggccttcggggtttaatgatggcagtgatgattgcagctctgatgagtgacttagactctatctttaacagtgccagtaccatattcaccctcgatgtgtacaaacttatccgcaagagcgcaagctcccgggagttaatgattgtggggaggatatttgtggcatttatggtggtgatca

SEQ ID NO: 9237 - DNA, 6000 bp, Homo sapiens
catatttcgaaataaaggagcttgcatgaatgacgatttccaaacttctctcgtgtgctggtagttacaccaaatagcactttcttcatatggccaaccataacactgaactgctccagctactgctcttacctggctgatgcccttcttgccatgagcagtggcgtcccttgccaccccaccttctaaatacacaccttatcgtcaatacacaccttatcacagttctcttcctggtaactctagctgcccacacctctggactttgaggactcctctgccggtggctgagtttcctcttggtatcatcagactctgtcattttgtccaccctctgtcacttatgtgtgttaaaaggagcaaggccactttgtccaccctctgacacttacgtgtcccacattaaactgaaattatgtatttaggtacttccacttttattaggctatgaactatgagagtagggaccttgtcttatttatgtttctttcccccatgtttagacacttagtagagtgaacagactgtgcaccattggagtattgcggtggtttagagatgctgggtttcagaactgaattttctggaaaaaataataataataataataatatggaccattttggatatatcaacttcttagtctttacttggcaaaaggaacaaactaccagctctcattaccatcttttccttaatattttcaaaatgtgtgaaggcagttatttcagaaaaagggacaggccttcccaggattgagtaggcggtcttattttgtgggtgggtgtgcaaggtgcagtatatttttgcagagaggcacgcatatgcagaggctctgtggcaggatgggtccgtcttggggttggagggtgcagtgacaagtgggtagagtcttgtaagctggaaaaggggttgtttggttctattttaagttttcttttttttttttttttttgagacagagtctcactctgtcacccaggctggagtgcggtggcacaatcccagctcactgtaacttccacctcccaggttcaaactattctcctgcctcagcctcccgagtagctgggatcacaggcatgtgccaccacacctggctaatttttgtatttttagtagtgacggggtttcgccatgttggccatgctggtcacgaactcctgatgtcaggtgatccacccgcctcggcctcccgaagtgctggggttacaggcgtgagccactgcacctggccttattttaagctttatggaaacaattttaaacatggcagttgtatgcattgttttaaaaggattcttggagcactgtgtgtaaaggcactggaaaggggcaagtgtgggagaatcattgggaagctcctgcaaacatgcaggcaacaggcagcccacactgcggtgtggcgatggagagcaattgagtcaacaggtgtttaggaagaagaggcaaacaggactggggttgagcatggcaggagaagagaaggaagagtctagaataatccaacaggtaaaggggctactttctgagaaggaaaagatgggagaaggagcatgttgagcagatggaattgagagtttactgttgtttttttttgtgtgtgtgttttgttttttggtggggacagagtctcactatgtcacccaggctggagtgcaatggtgcgatctgagcccactgcaacctccgcctcctggattccagtgattctcccgcctcagcctcctgaatagctgggattacagccaccatgcccagctaatttttctatttttagtagagatggagtttcaccatgttggccaggctggtctcgaactcctgacctcgtgatccacccacctcggcctcccaaagcgctgggattataggcatgggccactgcacctggcctagttttattttttttaacagctttattgcactataatttgcagctcataaaattcattcaagtgtataattcagtgttgttgttgttgtttttgagacagggtcttgccatgttgtttgtgacccaggctggtcacaacctccggggcagaagcaatcctcctacctcaacctctggagtagctgggatcacaggcatgagccactgtgcccagataatttcagtgatttttcatacatttacagagttgtgcaagcatcgccatcatcccattttagcacgtttgccttacctgagaaagatcgccgtgcccagtggccattactccctgttttcactgcaccccaggcagccactaacctacttgccttctctctagatttgcctgtggagggcatttcatatcaatggaatcatacaatgtctggtcttgtgtgtctggcgtcttccactaagcgtgtgttttcagggttcatccaagttgcggcgtatcagtatttggttcctttccattgcctcagcgttcctttgtggatagaccatattttgtggatggatgcttgtcttagttaattcaggctgctccaataaaatagtgtaaactaggtatttctgttataagtgacagtagtgtattcctatagttctggaggctgagaagttcaagatcaaggtgctggcagattcggtgtctggtggggcctgcttgctgtatcctcacagtggaaagaacagccaggctcccttgggtctctttaatttagtttatttgtttgagacagggtctcattctgttgcccagactggagtgcagtggcatgatcatggctcactgcagcctcaacctcccaaactcaagtgatcctcccaactcagactcctgagtacctgggactataggcatgtgccactacaccctgctaatttttgtattgtttgtagagatggggtttcaccatgttgctcaggttagtctcaaactcctggactcaagtgatccacctgctttggcctcccaggatttcagatgtgagccactccgttcagctggtgtcccttttaaaagagcactaatcccatgacataatcacctcccaaagtcttcactttcttttttttttgagatggagtcttgttctgttacccaggctggggtacagtggcgcagtctcacctcactgcaacctccatggctcctgggttcaagcaatgctcatgcctcatcctcccgagtagctgggacaggtgtgtgccaccatgcccagctattttttatgtttattttttggtagagatgggttttcacgatgttggccaggctggtctcaaacatctgacctcaagtgatctgcccgccttggcctctcaaaagtgctgagattacaggtgtgagtcaccatgcccagccgccagggaatgtatttagcagttggtagaggaggaggaaagaagttcagagaggtagatgggaaacaagctctggtgctggaggggccagaggagtgtgtgggccaagtggaggctgctaggctgcttaaagaagtggtctgccgcagagtgctactgagaggtaaagtgaggaaacagaaaggacctctgccattggtgacttgaaagtagtggtggttgccaggcgcggtggctcacgcctgtaatcccggcactttgggaggctgaggtgggcagatcacgaggtcaggagttcaagaccagcctgaccaacacgtgaaaccccgtctctactaaaaatacaaaaattagctggacatggtggcacgtgcctgtagccccagctatttgggaggctgaggcaggagaatcgcttgaacccaggaagcagaggttgcagtgagccaagattgcgccaccgcactccagcttggtcaacaagagtgagactctgtctcaaaaaaaaaaaaaaagaaagaaagaaagtagtggtggcctggtgaagattggattgggtctggagtgatcggaaattgaagtatgagatttcatgaaatttttataactgtactggcctgtaaatgaaagactcaagcttaaagaacgtgttgtaccttcagttcagtttcttccatttaccatatttgcctttttatttgattgactacatccaacttgtttagcaatctacccagctaaccgcgttcactcacgtttaactatatagcattgctctgtatttgtctttcctttcagactgagcagtactggtgaaatactatttgtcctcatatatcaattaggattgtggttggctataacagaaaacctgatagaacagtggcttaaacaaattagctgttatgtgcagaaaacatacaccagacattacagcatccggggttggcatgtggtgccttcatcatgccatctggggctgcaggggctctgtcgttccactcagccatcgttagtttgtgactttcgtgcatgtttcatgacaggtgcaagatgtagcttcactccaacatcatgcctttgttctaggcagaaagaggaagaaaggaggacaaaaggcttatgccaggaagtctgcctcctttccaacagccttttgacccacagcttctactgacatctcattgtcaagagctgtcacatggccacctagatgcaagggagtctgggaattacagtgttaccatgaacaaaaccagtgctcctttagtacagaaaaggagaacaaggcatgttgggtagatgcctgccacactttaaataaaacagccaggcatggtgatacatcccaatagtcccagctacttgggaggctgaggtggaaggaaggatcacttgagcttaggaggtcaaggctgcagtgacccgtgatcgtgccactgcactgcagcctgggtggcagagtaagaccctgcctccaaaaaaacataaaaagtttagaaatgccatatgatgggaggggctgtgctcatttaaaattaccggctggcaacaacatatagtctagcagctttggagctttgatcctggaattaattttgtcagttacttggagccctagcacttctatgctgtctgctcctgtttcctgttctcccccagaatccacgagggcgggaactatttatctttcatctcccacagtgcctggcccagaagccttgctaaatatttgaacaggattgcccagtgagtttgtgcacagttgtgtttgtggacacgtgtcttctgtagctctgggttgggaatgatttgtatccccaaatggctctctcatttggttattttttgatttgcttttagatacttttctgctgtgagaatgtaagatggatccagaagagcaggagctcttaaatgattacagatacagaagctactcttcagtgattgaaaaggctttgagaaattttgagtcctcgagtgaatgggcggatctcatatcttcacttggcaaactcaacaaggtatgtagggtgtatcctatttggattgcatggaggtggggacgtaattgtctttttattattataagaaattacatgattatattatttgtattttataatctttatatcattacatattatacagtataatctttatattatttcaaggaaataccattatatatacaatgatgattacaataattagaaaatatagaaaagaaaaaaaccactcataattctgtcctccagtgttacccactgttaacctatcaatgtatgtacctccttccagctttttctgagcataaaaatatatatagtgttcgtatagttgaagtctttttcttaacaatgttaatgtctagacaagataaaatttaaaatggtcaaattaggtattcaaagactgttctttgtatactccttaggatttttatttatttttcttctttgatctacttttttgatccttttactgctgtctggtaactcctagaagaataaaagttgaaataaatattgaaatctgcccaaaacttgtgtgtgtgtgtgcatgtgtgtgcatacgtgtgtgcatgtgtgtgtatggggtcagatctaggaaaaccaaaactggtcacacgtgggcttgaccttgtactctatatcaggggtccccaacccccaggccgctgaccggtacca

SEQ ID NO: 9238 - DNA, 6000 bp, Homo sapiens
ccacttccaaaatgccattggagtagtataatccagcacccatgtttataatcccacatgttctttgaccttgaccaaggttttaatgcaaaattgactcatctgctattggtttttaccttcctttcagtttgtctcctttaatatatatatgttttttttctttttgagacaggatctcaccctgttgcccaggctggagtgcagtggcatgatcagggctcactgcagccttgacttcctggaatcaggtgatcctcccacgttagcctccttattagctgggactacaggctgcaccaccacacccaaccaagttttttattttttggggtagagatggggttttgccatgttgcccaggctggtctccaactcctggtctcaagcgatctacctccctctgcctcccaaagttctgggattacaggcatgagctgctgtgcctggcctaaaatgtttttggtaaagggaaaatatagcaatctgttatatgctggaatcaaaatttttctactagatgaacttttggggaaatttagtattctgttctaaattaaatgcctttttcaagtaattactgctaatgagctcttgttttttcatgtttagggtggttgatgcagagtagtgcatataggggctaaaatcagacttagacacttgggggttcttgcatctctgtattttctcacaactatttcagtgattcttaatgagtggcatcttggcatagtgaactttaatgtgggaccatagttcacaaactgtgaccttaggccagttaatccttctgacccttgctttccctgttgatgaaatggaagtaacactacctactcgtagggctgtcaggaggtcaaatgtgtcaacgtctataaaatgccttagccaagtggttggcacatagatagtaagtgttccacaaatgttcatttccctgtagttttactaaccattttggtgcaatattatattctttataaagtcttgtgttttggccttttttttttttttttttttaaagactgtgactgttttctagggttttgaggggagtgataaatgttctgggtttttaggatttcacttgaaatcctcctatataactgctttttctctgtaatgctgcttgatcatcttattggaaataagagattttttttcttgtgtgttaggcatcaaaactgtgatacttctattttccctttgactcctttggctattataattctagaaaattatttctaaaattgctatatggaaaaagtactttcttctgtcacttctttaattcgttagtgtaaatgagccaaagtttataagagaatgttagttaactgtataaattttagataatgacataagtttaatttatgtaatctaattttagatctagtttttcttgatttctgttttgtagcttttctgttgttgcttatttttaatgggcatcttctgagttatctttttagatcccagtgtgcactgtattttatcttttcatatgggctaaattttgtaaattgtgaaatatgcgagcatttatataacatataaaatgaagtaataaaaaacaacttggtattttcttccagcttaagaaatgaggtagtacttaactagtacttttgaagctccttgtatcatactgattttttttcatctgctacttgtaatacttcatactactttagttattttgaaattagatataatttttagtttggtgtcattacaaaacactgtcacattagagaacatattgcacctgccatttagtttattagctcctgggttagtctgaacttgcctgtcatgctgatgcattcatttcagtcccagtcttacattctggatctctgtttattagtgtatatatatatatttttggagacagagtttccctcttgttgcccaggctggagtgcaatggcatgatctcggttcactgcagcctccgcctcctgatttcaagcaattcttctgcctcagcctcctgagtagctgggattacagggatgcgccaccacgcccagctaattttttttgtatttttagtggagatggggtttctccatgttgatcaggctggtcttgaactcccaacctcaggtgatacgcccacctcggcctcccaaagtgctgggattacagagccactgctcccggccttgtattttttatttttcttttctttttctttttctttttctttttttttttttttttttttttttacaaatcttggtgtatcagtgctttttattaggtgacttgatttctccccaacccctgcctgtggaatacagacaccaagagactaagctcagtacctatctgagcataccgtgtgtttaacagcctgtggaaactgtcctgtccctgaagatacgctgtagattaattttatgcagtgattttaagacaactaaaaaaaatggtttgtaagtttaacttcaaaaaaccatgtaagctcggttcctggattgttcgtagaccttcacattgcctttggcaaactgagctagaacatactgtagaagatttgagggtcatgagaggttcctgtggtaaagagagatgtttgtcattagcatttgattgttactccatagtttgtgaatggctccatttgtggggcagatgatgaaaaatatactctatatttttctcaaaaaaatgaaaatatgactgtctagatttttaagcttctttaagaagaaaatcgtatctgtagcttatctgcaaagcacatttggtgtgtggaattatctgcttattgtcatataaaaactctgaccttgtattaacatttttgtttttgaaaagtggctagcctgaaggaaggatatatggaataatcactagagtccttatttaaagtaatccaaggtgaagatttctggagtttattgttacttagcatatgatggtttggttgctgtataagtcagcagaaaattatgtaactcagagatactttaggtggcctttcatatgagtaatgattaatggataatgtttcaaaaaggtgtcagaaattttgatgtgtcttacctttagatttttaaaatagtaatgaaatctaatttctaacaatttttaataaagaatactgataattgattctactgtcttacaaagaacttttgtgtcagtaatatctacttctatcgaaactggcgaggtgtaagtagcattgtaacattttctgggtgaagaatatgatgttgagagcctaaaggatttgattatatagttcatagctagagattgaatttatgttttctttccccatagttcatgtcataattttaaagactgaccattttaggggaaaaattattagaaaatgatgtcctttgagtaaagataatcttgattcaattatttttacaaataaaactattctgatgcagcactctagtgttcatccatctagtcatacaccccccacaatatgataccagctagttgtaggtctagtgtttaatgtaataccgtaacaggcatttgaattggaatggtagttcttcaggaatggaatctggaatataggcaaagatttcagagacaattcctaatttaaaaataactcatattgtctctgaggttcttttccagtgaagtgtttagtattgctgctatttggagtacaaagttggagcttttaaagaacctgggagttcaaaagtataaggagaaataaatgaaaagcagaaatattttgaggcaataagtatagactcaaatctatattatgacccacttgtagcaccacttggaattctaccaataagagatttatttgggcaaactataatggttgttggaaattgcaaatcttagtgtgaattattttagtccagttggtttctttctttctcttacctgaaatgaactatactgaggcaataggagctttgtatagtaatttaggagtgtaaaacaacttagggaaaaggattattaagcaggatgattgggatgacatcatgtgaaatttaggaattggaggcattgggaattgagagggtgctaacaaaggaaaacagcttattttagaatttgtctggaggatgtagaattgaagaagttttggtatttcttctgcagcggccccagtgcccttgaccaggaacatctcttggagtcagtagttttcatgaggctgacctaggaacttggccaacatatgcaacattgttctatttaaaatattccttgaattaaattcgatagtatcaatttaaaacataaagttttcactcaactcctttagaagttagattttagcttgtacttgtctttacctcttctgctgattatcagttgacaacactgagattactttcattttcctgtaagtcattatgaatttttctggtcaaccatgagttatcagtggaagcaataagtaggaagtactgtaaaagaattacaataaaataagagaaaccacttggagagcaagagggcttgtggacttgggggagcggttgtgagaaatgtctcagaacttaatttacaaataacattggtagattgacatgttgtctttcctataaagtaactttacctctgtcttaatagtaaactactatgaaagtgaattcgtgttcctcttgatttgtgaactgatgaaaattacaaaatgtggagttttttccccagataaagtaaatggtggaatattcaggtttatttgatacctagaaaatacctgaaattttccgtggtaataggcacattttgaaactgttttttttttctctgacaattgaatatattttatatatagttgattttgattattgaagactaaggaaaatttaagtttgaatgttagaaaatgaattttgcaaatttgaagtaattttattctttatgttttgggattgtagttatgttagatattcctcagttggggtaattgtcttgcatcattatctcttatcataatctgtttttcttcacacagtgttatagttttgccgctggactcttccctcccttcccccaccccatcaggatgatatgagacttgaaagaagacgatgcatacaggtgactcaagttttgaaatacagtaaaactctggctaagagaatgtgggaatcgatggtctattttgaatgggggaggtttctgataaatagcagttagtggggggaattgtagatcagtaaatgcaaaggtagttgggctatttgttaaacttacttttgaactcagattgataatcagtgatttatagtggtgttattacaaatacagcatagtaaatgctagcacttaggcttttcaagagctaatattttggtgggaattggaataattctgttaatgtaaataacacagtcacctttatggttgaatgcatgtctcccccagaactctattagaatatggcagatcttttatgggagtagatgttagtaggatatcatcaaaaagactgacaagttaaggatattatacccatacatacggtttcttaaaaagatatgctctgggattttgtttattttttccttgttcccaatatccctgcctcccatttcctttcttcccaccctccccctcttatccttttgtcatttgtatttttatacagaagaagcagtgtgaaggcatttttgaaagaatattttttgattgctctataattaattgaggtgatcttttacatgggaaactggaggctattccacacatggctatgttcaaatttctgaaaatgtagtgcagctaatgtataaagtgttaataacttttgaacttaaatgttcttaaattaggcatattataaggcattttgttgaactaagtgacttaacatttgaaactctgtcagagagccttatttgattatatttataaactgtttgaaaatgtgattgctaactggaaaagaaatatttatataaattttgaattgatacctaacagatgcctaattatatcattggtgtagtttttgtgattggtttttat

SEQ ID NO: 9239 - DNA, 6000 bp, Homo sapiens
tagctactgaggaggctgaggcaggagaatgacgtgaacctgggaggcagagtttgcactgagccgagatcgtgccactgcactccagcctgaacgatagagcgagactccatctcaaaaaaaaaaaaaaaatatctagtctatgatccaaaaagtttcactcctaggtatttacccaagagaaatgagaatatatgtctgcaaaaagacctgtacagtgtgtccatagctgtcttattcatagtagcctcaaaatggacacaactcaagggcccgtcgaaagcagaggcaaatcatggtgtgtccctgcatcgtgaagagaaacaaagggctgatgcaacatgaggacgtctcaaagacaagttgcacttaagaagctatgctaagaaaacaaacacacagaagcctacatcattacatgtatagaatgttcaagaactgatgaaaccagtccgtggtcacaaaagccagaaagtggttgcttctggggaccagaagggaaaggggcataaaggaaccttttgaggtgaatagaagtttctgcatcttggtttggcacacatgccaaaactcaccaggtgagcatttaagatcttgcgtttttattatatgcaaattatatctcaaataacctaaaaaacaatgcttgtgacaggtgtgcccaggtgccatgcatggaggtgaggggccaccacatgccaggaggaggctgggaggcatcctggggaggggaggtcacgttggatcggggtttccaggcgagatttggaaaagcaaggggagggtgagcccagtggagggctaaacctggccgaaagcccagagataagaaagagctcagccttggtttcaagcaccaacggcctaaaaaggaaacccagttatttaacagaatccattctcttttaaggctcagtgtgtatctgagacaggaccatttcccctctccagtgcaagcttcttcatggactttgttcagatttcaattttataatagctttttctattctcctcgtcagtatactttttttttgttccaactgataaattattcttgctacttagttttaaaaacattattcaagagtattgccttattaaaataacttgatgctttctattttttttttctccttaaaacataaaagctacagattctcgttgacactggaagcagtaactttgccgtggcaggaaccccgcactcctacatagacacgtactttgacacagagaggtaagcgctggccccttggctggtgtgctgggccggggcactgcatgatcaacatgcttcaaaatgcaccagagcatgacagccagaaagctgtttcattttaagggggataccaatatgtatgtgtatgtatacacacatgtggacatgtgtatgcatatgtacatgttcattccatccacaaatccacagcaggagtctcctcatggccttcacgcatttacatgagattcattttctaaaaatccaagtcaaacacaactcctttagttatcccaagtcgcagggagcttgtggccctttggtgtttattgcagcagctttagttctgcagtggaggtgggctggagcaggggacgaggtcttgggagtctgtgaggccactctggccgagggtgtgggtttgcttcctcagctgaagggatacatggaaacccacctttgcatagttcagtaggggttacggtgtggttcatggaagccatttctgtgggttggtttgcaacactcatttggaagagtgagttttgtgagcacaaagtattaagggccaagactggggctgcacatgagcaattatggggtggagttgagaaaaaaaagtgtagcctgatggaggtctctggaatagaacaagccttgcccatgcaggcttccgagcagccctgggtggggttgtggggaggcccccagcggcttgtggcagccttcagctctgcaggagcccgtggggtctagagtcaccgccctctgtgaactggaagctgctctaatgctgtgcacgttttgatgtcacaactatttttacgattctgaaatttaaattcaacagacagccaggtaaatttaaattcaacggacagaacaggtaaatttaaattcaacggacagaacaggtaagctgacatgctggtttgttttttagggtcatgaaccttctagaggctcggaactgtcacattaggtttccctactgtaaattcttttcctgacttccctttctcgctttccttatcctcagtgttttgttccgggaaataaaggccagctctagttggggacaaaaggagggggaaagaataactgaagtcttctgaaaatgccaggcaatttaataaagccagatgatttgctgtgtatgaaagaaagcatagaggaaaccctgtatatctatgctacctacaccacatcctgggctccactttggtgccataaatgatggggcctcctgcacgtatggctgcaggtgcttgctggggagagggctgtggtggccagtgctctatgaggcttcagaaaaatatggctggcccctccctcaaggaacctatagcttggtttatggcttcatgtgttggtaagctttcttcattgatattcccggatacaactcctgcctatgatcactatgtgcccagctgttgctataaccacaaacgtgtgtagaagtcgtggtggtgtttctctctgtgtgtgcagcagaggtttggtttacgatggcttatgctgccccgtcccactcagatctgtgattcatccaagtcctcagtccccaaacagccctcacctccaactgttcactctggactgctcatcatggaacaggacttggagttggtccaaacccctcattttgattcctgcggcacaggagttcagagagacaggggacttgcccaagttcaagctttgaggccagcagtccccaaaccttcagccaacacctgctttttataacaagtgctttgtcattccctgaagtaaatgcaaaggtcatatgacttatctacatacacagctcaaagtgccctgacgtcatatggggggaatacaagggaagtaatgtataaccggctaatcagtacctcagtacgtgaacactctggctccgtggtgctggtagaccacgcagtaggcagatgctggaggtgagttaacatcaccatggacatgtacacccagtgtagactgatcaaggcaagctgacttacactcacacaccccaagcagctcagcttgctgtcttagactgttgtgctgctataagagaatacccaaggctggggagtttataaagaaaagaggtttatttggctcatggttctgcaggctgtacaagaagcatggtgccaggctctcaggctgcttccagtcatggtggaaggtgaagcagagccagtgtgcagagatcacatgggagagaggaagcaagggtaggggaaggacgtgccagactttttttcaacaatcgatcagccctccctggagctaacagagtgagatctcagtcattattatgggcaaggcacaaagccattcttgagagatccgacctcactacgcaaacactttccaccaggccccacttcctacactggggatcaaatttcaacatgagaattggaggggacagatatccaaactctatcagttgctgatgtgattttccagaatggacaagaatcttaggaaagttccaagaaaaacagaaagagaatcagcttccctggatttccatagtagcgaatatgcaatgtatactaaacctgtgtagaaaagatggtatgcatatgtgaatgggaggtgcattctgtgctcatatgatccagcagatttcacccatgttgatgcccagagcgactttggaaagtggtgtgggatgggaacaatacttcattttgcatgactgcccttcacattccaggataaccagcatgcttatcaaacacacccccaaagtttccaaaacttcccctaggggacaggaccttccccattgagaaccgcttatctgaatagtccctgatagtcccagccctgtgttgtttccactgctgggctctagtctgtacgacacgttttccacgtttccccctcactggggctcagcacacaggggcagaaccaacacacgtggagcttgcatttcctcgtttagcaattctttcccacttagaataggtttttctctcatcatctgtagatgcaagatacaacagaaagaagcagtaaagcacagtaaagtcaaggttagggtgatgtggatggtgactttccagatttaaagggaaccatgcaagtcaagccctgtggatggctacttttttcatggcagataaatagcagttctgtggcagccgctcatcgccagagtccatcaaggtcaaagtatgcttctcaatccacacatcctttcgctatgcagaggcaattgttgaaaccttcaagggtaaataatactctgcattatcaagactatgtgcaatatttcatcaaccgtagacaacccaccgcatctttctcagctcccttcaactgtgttcagtgtttggttgagctgtggttctctttcaggctaccgtgggacacatctctcttacttacctgctagccctgttttgcattcaagtggcagatggttcctgttttccatcctttgggcttctctagtccatatgcatttgatgaatatgaaaactgggatcatccagaactcatttgatgactaagccttccctcctgctaatctcacaagataattcaggatttcttgccaccattctgaccactcaaggttctgatctgtttcttcttttgtgggtaaataaaaagagaaagaacacaccagtgtctggggaaagcccctcaatggttggtttcaccccattgccacttccaccattcaaattcagtgtaccttccttatttgcgagtactgcagagactgacttattacatataacacatcacgcaccttttgggtgtctaccctggtaccgcctttcttttcaagagaccattcttcaacagaactgtaaggtttcttcttggctgaatcagatgtgacgcatcccacttctgcgtttgaggcgagttctattccttcagctgcatccctgctaccatgcttgctttgcagattaaattcttagattgatattaacttgtttccttttatctgctttttacatgctttattatggttgatatgctttatgattgaaagatatgaatattttctttcaatgtcaattatgtataattaatttgtctaatgctttcgtgtaactttagagctggcctaagttatactttcaaccattgtatttgatgggagccaagagactgtccttttgccttctcaatttttgacaaaggtttcttttctgagctgcagctctctgccctgtgatgtgtctgtatttgcttgtgcttctgatctctcttagttataataaggttctggttgggtttgtccgcctctgattcacgtcctcagtctttggatattcaggtctaatgcttcctgaaacatgttacagtaattggagatttggcgtggggttctttgacaagatctctttgatttatggaatgagatgtcaggctaccattagtcatttgtgagctcgtctttatcagaatccatcttttcatggtggtgaatgttccaatgagttactatagagcaaaaaaagaaaaaaagaaaagaaaagatcatgtattttttaaatgtacatcttttttagccaataaaatctcacctccagctagttggcttgaagagagatccagtatactcatcccttgaccctccacgaatctattcaggagattaagtatatttccattaaaatgtctccttacttctgtactatatccgggttgaagctcacagagcaagagaccaatttattttcctcaactaatgtttgtaagggacttctttaaggaggctaaactggatacagatcaaatggctt

SEQ ID NO: 9240 - DNA, 6000 bp, Homo sapiens
agaaatcttgctggtcaagtgttgcaggttgggttcacctagaaacagaccctgaacaagtgatttttttttttttttgagacagagtcgctctgttgcccaggctggagtgcagtggcgtgatctcggctcactgcaacctctgcctcccgggttcaagccattctcctgcctcagcctcccgagtagctgggattacaggtgcccgccaccatgcccggctaattttttgtattttagtagagacagggtttcaccgtgttgcccaggctggtctcaaactcctgagctcaggcaatctgcccacctcggcctcccaaagtgctgggattacaggtgtgagccaccgcgcctggcctgatttttttaagtgctctcctgggagaaagtagtaaagagggcagggaagtagacatgaaagggcaggcagctaaggaaggatgcctttgcaggtgaagtcccagacttggcctaatccaacagggactctgggggcatcaatcgcactgcagactttgtcctgcttcttgcactagctactggctgtctggccggatgtgaatttcaggcacttctggctctccatactgggcaggtagttccagcgcacagaggtgatagcttgagtagcaaatcaggcggaagctgggagatgagtgcccagagctagcaaaaaggtctgggcaggcactgacagcaccactgcagagtcgctagatttttcagttaattctgaaagtacctcaactctgtactgtgcatgcagaccatagtggctgaggttccctatctgtcagccatggagaggtcactctctggagtagggaggaactactctctgggtgatagaaatattcccacacagaacccagctcacaggctggatgtgccctctttctcctctctgctgcctaactcaggaaataactccaaagacctgggtcagttcagatggggactgaagaaagcacatgtgaggatacgcctataaggtaatatcttcaggaaccctctcctgagcccagggcctcctcagcatttcttggaggctgccaggaagcaactatcctccatgcatctaaatgccgggggagcaaatctcagctacagaaatgacttattcaagggcagtatggcagcgtgggatgatctgctcatccgagaaaactgcctcgatgggaattaacacagggaggaggaaacttccaaagccttccgctgggaaatctttgcctttaatgggaggcaggatgggggtgggggaagaacgaggcggcatgtggtaaccagacgtcacagcgtttcacttttcaccatcaacttccaggacgcacgcaggtgtgtctggcgtggccttcgtccctgccggggatcctggggagctgtggctcagacctctggtttctgcgcctcctcactctccaaacccaacctcgaggttcccccgccgctgcgcaccctgggaagccctttctcaccaggagctctcaccccaatatcattctctccctcctcctccaactcctccgagcccaggtccgacatggtctcgccccagcctggatcacagccgcagcgcctctagcaggtgggtagcaaccgcctccaccgccgcgtcccgcgtcgccatggagacgcggccggtcccgcctccctcccagcccggaagatggggagcggggacaggcgacgcggacgaagcgggaggagccactggcagcctttgcgtactgtcatagcaacgggaagggcacctcgaccaatcaccgcccgggaatacggaggggcggggcggaagggacgaggtggagccagtggcagcactctggtgccgtcatagcaacgaggggccgcttcggccaatcactgctcgggaagcgagggggcggggactgggcagggcctgagcgggttctgtgcctggctgcccaccggctctctgacctggacctcgccgtcgctggcccctgaaatccatcacttttgtcggctgttctgtgacgccacaacgaggagccacctgggtactgggccctcaagaggaaggacgcgggaaacgcgtccgggccaactctcgagagggtttcacccctgcccagtgcgggcactgcccgctcccttccgcccccaggcctcgcaggcccctccggggatgctgcccacccccacttacctttctaggctctgctgacccttcgggattcgcggctagctgtgatgtgtccgccaagatctcttctcttgtctgtaaacaacttcactctcaaggaggcagctctggcctctcagcaggtgcggcctacagtgatgtccgtccgggttttacatccttccccgacctcgacatgagtcccagccccctcgggcctctgactctcaggtgtcccctacgatcgccgtcctctcctctcgctcctggctcccctacactgtcacacacccacacaatcacagacgcacacgcatgtacacgtgcaggcttggaaatctgctttacctgacgcactccgcctgccgaaggcccctcacatctcccatttcctctgccatcatcccagactgcaaagctgtgttatttgttgttgctgcaggagctggggaggagtgactgaataactataggatttggtcttgatgggagaatcccagaagccaaatccacgcggtgaataagctgctgatcttccagagcacacatcccctagagattcttcccaatgctaatatgaaaggttacaaccataacccatcatcaggcccaaatatattacttactgaataaatacacaagttacaacaacacacgagattccaaaattatgtcgttttttagatgcaaagataaaaatgttgtaaacaccaaaatttaacagcttttcttatggggaaaagtggggagttagggataacagatgattattattttcttctctacatattggcagttacccagttactacaattaagcatgtcctatttttataataaaatgccagaagcattttaaatgttagaaatctagaatggtaacataagtatatgcaaataaatactcgttttttacatttaaaatgtcagaaatttagctttcaaatttgtcctaacaatgacagtaaccagtgtttactaagttctgacactgtgtgtgggcactgttttaagaattttatgagttatcttattaaatcctcactatcattcctccattgaacatctaaggaaagggagttatagggggttataaactaaaaataacctcctaagccccaccacagccaactgaatggacccctcttggccaagagggccccagaaaccttaaaaactgcgttctcagccatgatgggaagggaggtcgaacatgcctcactaatacccttgtgcagtttagacacaacaactaacaagcattaatgttaaaatagagatcataagactgacagaatggacgctgtggcagtaagataccaacttacaaacaggacctaaggccatgccaggcatgagttaagtcatgcatccctacacttaaaagaataaactatattttaactacctggagaaggtcttatgactcgtgttttacatcctgtacttgagcaaacaatcttactgtgaatctctcaaatcgtatcatgagttcctcagactgttgatgtactaattaatacgtaaactactgacactgaaaaggatactgatttgtttctgaatcatgacgtttcactgattgtcttgtgcatatgcagaaaacattttagcctgtatgttgtcatctgtagccaatgactgtaacctctatattgtccctccaatgaaaaaagacaactgcaatatgaggagtccccttcccattcctcaactttcttataaaagcactgcaacttgtaacagactttggaacacacccaactttgttggtgtgtcttccccattcaatcttcaaatttggctttcaataagcctttatcaatttccgcctcaacagccttaactttggtcgacagcagttaagatccttacccaagatcatacagctagtgggattcaaatcaagccagctgacccaagagcaactgttgcccatcactatactgcctcccagatctgtgatataaagaaataactatagttttctggcagtgactaaaccatctaccaagcagaggaccactagttcaaatgccttggattgcaaacaccagagagtggcttaagcaaaccacatggttaagcaaaccctgttctggatcacatcattagcagctagacgtctagctatagctattaaatcctaaggtttacaatttgatttctatcccatacgaattagccagggtcttccctcccaaatctttcagtcaatctatagtaatttcaccacactgtgggtttggcaattatccaaataattgacaccaaaggcaagaaggggtgaacaacaggatgggcctcccggcatctcctgcagcagcacctggactggattctaaattcctccttccagaaagaagctgcatcccagcccagatccagctgagagccacagctgccaagaggcagtcggagctctgggcacctctctgtgcacccaggaagccccaggaggacttcatcaagccaagtcgatgcctcactcagagccccaggatccctgactcctaaccccacagtgacctggaaatgcctggtgatgccagaagcagcgctttccaattctgaaggccctcaaaatgcttgttcagcccaccttcctcctttcctggggcgtgggagtggtggggagatgagaggcagaaagatgaggacatcatcaggaggtttttccttactggaaaatgagaggaaatcctctttcactacttaaaaatcaaaaggggctgtccatattcctctggcaggggtctcccatcatcccccgcgaggcattcccattatcccctgcggagctttcccatcatccacagaggcccttcccataacccccaagtgggaagttcgcgcaagtgcggctctgcagggaggagggagggccgaggggaaggccctcgagagagtggagggcaacagtggccacggttcctctgtacttcgtttcttccgtaagaaatgatcttcttgtccttcttaagtataaatggagcgatccatttccttttacccattaaccccttcaaaaagaagaaaaacagtcccaggctggccatggttgatctctgcaggggcgctggtcagggtgccttctgcttcctggtgggatggcctaggccggggaaactgttgaaaccaccctggggctgccttctgtattttccacaaccttccaggcccacctcccagctggaggccctgcagcttggcagttgccatggcgactgagtccctaagtgtgtctcttctgagctctcctggacagtgtggagaaaaggccttaagaactgaggggcttcagtaaaatgcaaacagattttttttttgtaggcactgttcagataaaaagcagggactttcaacaaaatgagttcaggtccatcttaactatagaactatgaggttgtttattagaataattgtactctggtaaatttaccaatttcatatatatgcatatttataaacaaacatattagagtatatagatagaaaaagttctatctacatgtagaatcgaaaactttttaaaatagtgttggtagtatcacacattgccatttagtggatagagacagacccgagattggagccctagctccgtatacttctttctgaagtcagtctactcatctgtaaaatgggctgttgtgaggtcaaaattagatattcataatgagagtagcatagtgcctagcacaaagtaaagcacttagtaaatgggagctattactattaattgtactgctgttaatcttacaataggttaagcaccttttgtctatcagtatgtttgggggggaattttaactcaagtttatcttaatcgttttcagtcgtgtttttttc

SEQ ID NO: 9241 - DNA, 6000 bp, Homo sapiens
ctgggcgtggtggcgcatgcctgtagtcccagctgctggggaggctgaggcaggagaatcacttgaatccgggaggcagaggttgcagtgagcagagatcgcaccagtgctctccagcctggcaacagagcgagactccatctcaaaaaaaaaaaaaagaaaagaaaagaaattgagagtgagatgtgacagaaggagtggggcccataggccaccctggcacacgacatgttcccctgtgccctctttctagtgtgaggtcatgtggtgattcaccctaccttgaatcttcttcataaaacaggagatttcctctggaagacatcccgctggatgaaaaggaagcagctcagtggcttcataaactgtaccaggagaaggtaagcaggctctgctcccgctcagggtcccggtctcctgaagaggctgtggaaggggtgctggcgagcaggcaggtgacacgtgggaactccgtgggagacaggagtgccacccaggtcctaaatactcctgatccttctttcatttcttctttctgttgttttgttttgtttttgtttttgttttgttttgttttctgagacagggtctcactttgtcacccaggctggagtgcagtggtgcgatcctggctcactgctgccttgacctcctgggctcaagcgatcctcctgcctcagcctcccgggtggctggagctacaggcgcaagccaccatattcagctaatgattcaaaaaatgtatctttgtagaaatgaggtcccactatgtttccaggctggtattcaactcctgggctcaagcaatcttctggcctcggcctcccaaagtgctgggattacaggcatgagccaccacacctggtcccttcttcttaatgtttgagaaattaacaaactacagacaagtatgaagggtaacatgatgcctgtataattatggctggtaacatttggtcacatttgtttcattttcttaaaagacattacaggtatgtaacagacatagatggtcactagactccttgtataacagaaacaaattagggatgttagagcattgctttgaaaaccacactcagttcttatttctttcccccacggcttactcagcccaagaactactttctctttgttttatacgcacaaatgcatggggcattcgatttccactgtcggccttgtgggagaggagataaccaggaaatcctcccaggatgtaaaaaatatcatcgtaaatgcattgatgggctctcaagaaaataagggaaatcggtcgggtgctgtggctcatgcctgtaatcccagcactttgggaggccgaggtgggcagatcacctgaggtcaggagttcaagaccagcctgaccaacatgggtgaaaccccgtctctactaaaaatacaaaaaattagctgggcctggtggcgcatgcctgtaatcccagttactggggaggctgaggcaggagaatcgcttgaacccaggaggtgggggttgcaggagccaggatcgccccattgcactgcagcctgggcaacagagtgagactccaactcaaaaaaaaaaaaaaaaaagaaagaaaaaaaaagaaagaaaaaaaaaaagggaaatctccaggactgaaaagggaggtggggctgagactcggtcctgggcctgggagccagcagcaccatgcccacctggtgctttctgcctgccccatcccctgaagtctcgtgctgtgatgcctacatggaaacagaagataaagatttcccctcattcaaggcgggacgttagaaccaaaaaccccacatgatgctgggaccctctaagaattggaccctcaggaaggttaaactggaaaagaaaattacctcccagcacagagaaatggccttgaaacctgcctttctcctcttgggctcaagaaagtcttcctgggaattcataattacaggcctgtcctccaacaggcttgaagtttgaatttatacaaacaacatagttcaagaagcacacagccaaaatgtgtgtgccaggacactcggggacattccggaggcagggagctgggtgctcaggggtggccaggacacgatgacacctgcctttgcacggacacagtgtgtggctggcagggggcaccccaaccccagtttccagcaggaagctgagaaccatgaagagatcaaagagatcaactagaaaaaatatcttgaagccagtgagctcagtgataacagtctccaaccatctttaaaagagagcgggtcggccaggtgtggtggctcacatctgtaatcccagcactttgggaggccgaagtgggtggatcacgagatcaggagttcgagacaagcctggccaacatggtgaaaccctgtctccactaaaaatacaaaaattagcgcagtagtgggcacctgtaatcccagctactcaggaggctgaggcaggagaatcgcttaaacccgggagacagaggttgcagtgagccgagatcgtaccactgcactccagcctgggcgacagagtgagactccatctcaaaaaaaaaaaaaaaacaaaaaaaaacgagagagttgatggtgcccttcactacttcccaagcatcctagagtcccacgggctgccccgcccacgggcagtggctgcggagtgtctgctctatcaggcatggtgatttcctgccagcctgtgcctttgacattcccaccagaggcagaaccttctgcaggtggccctggccaggctcctctctcctcccagctcctcattagcctcctttgccaggctaggaaaccgaggtatgcgaggttaaggaactttccttgggccgtgcagctgagagtgcgctttgcagggatttgcatccaggccgcgggactcacacaggccacacctgccacccccactgcctctggctcgtgggaggtgtgggatgtggcgggtggccggggcagtgctgggcaggcaggtgttggtattcacaacgttgctttcttgaccgattattttcctgggagacttcctcagtcaaagggttgatatgcttgcgagctctcgatgcacgctatcagattctccaaaaacgtacagccagcttcgcctgcacctgcagcttctgtgatttgtgctcttaattgacgtggcgctttttttaggttgagtcgtttttcattgccaacaatcttctcctgcattgaaataatagcttgtaaagaagcctcacgcttcctttttctctgttgactcttctaggacgcgctccaggagatatataatcagaagggcatgtttccaggggagcagtttaagcctgcccggaggccgtggaccctcctgaacttcctgtcctgggccaccattctcctgtctcccctcttcagttttgtcttgggcgtctttgccagcggatcacctctcctgatcctgactttcttggggtttgtgggagcaggtaatggacactgtcgctaacagctcacactctgacgggcctcacagtatcagccacagggtccgggacctggtgactcatcacagtggctgtgggaggcaggggcctggctgttatggaccctggagccaggatccccccacggcctgcgggcctcagagcctggattcttgcactgagctgagggtcgcctccccagagagccgaacggccgccacctggcgccatccccactgcagccccactggctggcgcccttgaggatgccgacgagagggtccccgagagggtccccagcccccctgtctgcttttgggctcttaggggtcaggctgggctggccattcgggaggtttaagcaggacatcatcattcagctcctccccattgacccccagtgacttccccactgtgtgcccaccccaggcacaatgccaggcccaccacgactcatcagctagcctggggccgaacagacacccagcctgtccctgtggtgagctccggcgcccacccacaccccgtaattgaggggtctctgtccgtggagacacagtccgtgtgcatcgccccgtgagccgactccccaggcccagcagctgggccagctcctcccctgctcctgccgcccctgccaggggccttggtgggaggggtcctgagaggcagtgactgccaccagcctctcccattggactacgagatgacttgaggccacccacagaggacaggatgtgacctgcttacatccgagggtcctgctcgtccacctctgtcacctgttgggtttgcaaggccgagctgttagaatgccccgaagcccttctgctcccaccagccaaagacccagaggggcaggcagggcaaggtccacgtgtccacctgcctcggacccagccggtcagaagacgtgcccctcacccctgcctgagcagaccacggtctgagagggctgtctccccgcgggccacacctactcactgacagcagaggccactgggtgcggggcagagggacagggtctggggcagaggaaggaagccccagtaacacgttttacagcaaaaaggcaaagtcatccgtctcacctcttctctctctctcctgtcttgaaagcttcctttggagttcgcagactgataggagtaactgagatagaaaaaggctccagctacggaaaccaagagtttaagaaaaaggaataattaatggctgtgactgaacacacgcggccctgacggtggtatccagttaactcaaaaccaacacacagagtgcaggaaaagacaattagaaactatttttcttattaactggtgactaatattaacaaaacttgagccaagagtaaagaattcagaaggcctgtcaggtgaagtcttcagcctcccacagcgcagggtcccagcatctccacgcgcgcccgtgggaggtgggtccggccggagaggcctcccgcggacgccgtctctccagaactccgcttccaagagggagcctttggctgctttctctccttaaacttagatcaaattttttggtttttaatcagttatcttgggaacttaacctggcccctcacctcttctgcaccccccgcccccgaaactgtctcgtaatgaatttctgctgtcctcctgggagtggacggccgggtcccgtcccccgggagcatcgctcggctcagcaccttggctcccagtgggggccccgtggagggcgcccgtagtgataagcacaccggcacgaacgtcaggtccattcctcgaagtcggagccctcactctgccctgtcctggggctggctgagggcgaacgccccacctcactttctagagccctgtctgtcctagctcctatctgaccttgtgtgtaaatacgtacatctgtttttaaagtggatgggcccctgagaactcagtgaaatgcagagttctccatgcacctaaagctcctttgtcgctctcatggctgtcagatcctggtccctccacactgggtgctggggagggaggaccctcggggctaccgcgcgcccccccatcccacagatcaggagccaaggagggagaacagggcagcctgtgggactctaggatgcttcagaagaagcgacggcaccgtcaaccctctgttttttaaaggtggttggagactgttaacactgagctcattgacttctagagattttatttttactggttgatctcttggtggttttcaacttcctgctggaaactagaggtggggcaccccccaccccccagcctcgcactgtgtccttggggaaggcccgcccccatcctggccggtgtcactgtggcccggccacccctgagcgcccagctccctacctcctggacgtctctgagagtccaggcagagcagagggcagcgctcggccggtcatgctggctcccttggccttgcagcgagcccctggcccacgccgagcgagggatgcttctccctacagcatgtccactcccccggcatggccaggtggggcccctggggcaatggcagtggtagaacgctcaacttggttgcggta

SEQ ID NO: 9242 - DNA, 6000 bp, Homo sapiens
gtgagtctataaacatttcacaattaaaaaaaagtctactcaggagctgaatttaataaaatgagcacttttgactgctttgtgaagcgtggcatttttttttttgtttttttgctgtgagttcatggtagtaaagaacatgagtgacatgactgcgcagtctggcccgagttcatgccattgtggttgccccagcagcgcgaggtcagcagcgtagaaaggcagcagtgtgaaagctatgagcttgcgggtgccctgagagccacactctgagaactgtcactcctttgccttcctcctgacactcctagggcctctgcatgtcctgtagtagctcctgtcttcaaagttcccccatccccaactacaggatgtccacctccctgagcccttctctgctgctcgtggccttctggtcactcactccccctgggcggttgctcggtatcctcatgatgggaagctgtgacctctttaccaggtctactgctactggatggcaaggatcctgtcttgcttactttcatatctccagggctagtcccagtgaatgatcacttaagtgtttgaattgcattgaattacatgatggttgtgttttaataattaatgttaataataacacctgccatatattaagacactaccatgtcccaggagtggtactaagtgctttacatacaaggggtcttcaaaaaaatcatggaagatacgttatgaaaaaactatgcatggatttcaacactttttgcaccaaaataagctcctactcactgagcaggatctagtttgaggcactaagaaggataagacatcagttttaaaagagcccctatcagagcaacatgaattctgctaaaattaaatcaagaaccaacattggccgggtgcagtggctcacgcctgtaatcccagcactttggggggctgaggcaggcggatcacctgaggtcaggagttcaagatcagcctggctaatatggcgaaaccccatctctactaagaatacaaaaattagctgggcgtggtggcaggcgcctataagcccagctacttgggaggctgaggcaggagaattgcctgaacccaggaggcggaggttgcagtgagccaaaattgcgccactgcactccagcctgggcaacgagcaaaactccgcctcaacaacaacaacaacaacaaaacaaccaacatcaaatttatggtgaagcttgggtggaagaatggtgaaatcattgatgctttatgaaaagtttatgaaattctttggacagtgccccaaagaattagtagtttgcaaatggatatcttgttttaagaagggacgagatgatgctgaagattaaggccatagcaagcagaccatccacatccattttcaaggaaaaaattcaccttgttcatgccctaattggagggaactgacaacagcagaaatgacagccaacaccgcagacatctgaactggttcagcttatgcaattacgcctgaagggtgagcaagcgttccactcagtgggtgccaaaaccctagtacccaggtccgtggccgaccagagcagagcttcccatggaaacttcaaacacacgggatcaagatcctgaagcatttactcaaagaaccataacaggagatgcagtgtggccttcccagtaccatcctgaagacaaagcagacacggcaatggctaccaagaggtggggtggccccaccaaagcagaagcagactggtcaagagcagaggccacagcaacaggtttttgggatactcaaggcattttgcttgttgactttctggagagtcaaaggacagcagcgtctgtgtattatgagattgttttgaggaagatagcaagagctttggtagaaaaacccctggggaagcttcaccagagagtcctcctccaccacgacaaagctcctgctcattcctctaacaagcccaacttcgtgagggtttctatgggaaatcatgaggcatccaccttgtggacctgattcggctccttctgactgattttggtttcctgatcttaagaagtctttaaaaggcacccatttttattcagctaataatgtagagaaagactgcgttgacatggctaaattctcaggcctcccagttcttcagggatggactaaatggcatcgtaagcaatggcatcattgcttacaaacatgtcttgaccttggtggggcttatgttgagaaataaagcttatattttctgttttcatctttggattccatttttgcatgaactttttgtagttccctcatacgtattctctttccatccttaaaaagcagctctgtgaggctggtggtggtctcagcactatacagcggtcattgagcctggaggccttggggtgctcttctgagtggcagagttggcttcagacccagtggtcttggatactgccacttaccagacagaacccattaactgccaaagtcaccatactgtggaagatgacacaaaaatttgaaaacaaaattaaatcatttattaacctcacaggaaaaatgcagttttctgtacacgtccagcataattcattctaatccagaactaattgaaattggactcaatgaaataggggttgccaccgtgaaagtgcatggctttatcttcaggcgcagctacaaggcactgggctctgtgtccgcagtgttttgtcagacagcgttgggtgagaggattgggtaacgacggccgtgactctcgcctgagtactggaaggcccgtcctggatgacacatcgcttcctctcgtttcagttgtcgacaacagtagcaactgggcagtgtgtgggaaaagctgcggtgtcatctccatgccagtggctgctcgggccactcacagggtccacatggaagtgatgccgctcttcgccgggtatctccccctgcccgacgtcaggctgttcaagtacctcccccatcattctgcacactcctcccaactggacgctggtaaggactttggaagaaaaagtttaccttcagtatttgagcaggtgagcactttgtgcgagaggtgataaacttatgactgagcaggttggagaactagcggcgtgttttcagtgccggtagaaactggtactagaagcctcatccgctgttagaatcttaggcacctgctctgaaagccaagcctctgtgcacagagtgctctgtaaaggggcagcctcgggtggcattctgcacgttcagcctggctccgtgtggctttgcccgtccccaggtgagtgtcggcgcagcttgggtctaacttcctgtgtgttttgcagacagctggatagaaaacgacagcctgtcagtagacaagcacggggacgaccagccggacagcagcagcctcaagagcaggggcagcgtgcattcggcctgcagcagcgagcacaaaggcctacccatgccccggctgcaggcactgccggccggccaggtcttcaactccagctcgggcacacaagtcctggtcatccccagccaagatgaccacgtcctggaagtcagtgtaacatgacaacgccagggtgaacacacgccacttcccagctaggagtgcactttatgggactgtgactggactcttccgttctggctccagccagaccttcagtggtcctgcctggccgtggggacatcagagagtgtcatcacgcagctggccagctgagttctgttgttgttttcatgccgcctgtgatctcagattcctgcttttctcaccccgtccccatgctggtgtccgacgccgcttactcagagccctggcctccctccccctacctcacacgctgctcatgaaagtttccacccacgctgtctccacggaacagcctccgtctgctggctcttcgtggaaggccatttgtctttcaggtagacactcagcagccctcacggtcttagtgacgtgtgtgcctttctggtcacacagctgcccagtttcctgatcggggtggatttgtgtcccctaaggggtaaaacagccgtttaccgcagatcctctcattgtgcttttctagaataacacccttctaggggaggcgggtgggggagggagggatcataaccccttctgtgccttgggatgccggagctgggggacctggaggcccatcagccggagccacgtgaaaggtactgaagaaagctgagacccggctgtgaggagcgcctcagcggtgaggtggtttagggataaatgtttctggaaccctgtggtcccccataatgttgatagaatatcatatgcactgggagttaaatatatttaatttaatgatcattatatatgtgggggttaatatgttgtttttctgtccctttaaagtctttacatgtaattgtagctgtataatcgttatttttcttttgcatcttaagtcttagaaattaagatattccatcgtgaggatgagagaggtcctcagtgtgtttttggtctggttgtagggaaggactcaagtcctggaatgtcctccactggtctactgagttgcagtcacactgttccaatggattatttgctttcggttgtaaatttaattgtacatatggttgatttattatttttaaaaatacagactaactgatgtaatgtttatgtataagttgcaccaaaaatcaaggacaaaaataagtgtgtttgtttttacaggtgtgaaagtcacagcttgtaaataagtgttgtatgtattaaaccttttccagttctccaaagcgatgtatttttgtacacttgaaatagagtactcttaatttactgggcaaatgtgcttggaattgaacttgacaagattagctcaagcagatagagtcgggtccagcagtgggtggccctcgtgtgaatccccgtggatgtgcaagttgtggagagaaggagcaccgggttcctgcccagcactgtgcttgcgggaggcggtggggcatgggaggaaggaggcacagaccggggaaatatgacagccgtcatttccagtattctctgtgttgtcttttagctcattcaataaataaaggtggtgtgatttttttttcctcctgtctttttcatttgtagaaactggagacgtgtaaagaagataaataattgtgtaattaaactttccagaaatttatcttcctcatgtgcagtttaacaaacttggtcaaactagttagcaaattagaacttcagaatctaatgatagtttagggtttctaaaataaggttttttattgtaaaaattgacgattgccctgcatttctaccaagtcctgtgaataaagagatgggagatttgattccgtcagaagagactgtaatccgtgtcgtcagcctgggagccttccccagtgtaatgtagctttctctcttaccttctggaagagggaatgtttcatttattactgtttgattttcttgtatctggttctactcccaggatgaaattatccaactacatatatatttagaggaagaaagtgaaggggaaatttaaaatgtttacggcgcttaattgcctggaaatgaaatgaaatcaaatttatcagtttttttccccctaattacccaaaagatcttttgcaaactatgttacatgaatgcttctgcctctttaagacaaagaagaatgtcacccaaaattgtcatttttttcttaatgttcatcataaaagtcctaaaagagtaactgtaattggatgtttattgtttttatctaaagtaaggtgtatgtgtttgagacaagctggttttgttgataaagagatgttaaataattgtgaagccagatatgcaatgtgtatctgaaaagcaaggaatttgcagccgttttacaaatatctgtggaacatgtaaatactgtcaaatggaaaataaaataagttataatttttgtgaatttcatgggatgtcctatgattggaaaaattataactcttctgattctaatgtggaaattgttgtatttaatctgaaaatgactttacctacaaca

SEQ ID NO: 9243 - DNA, 6000 bp, Homo sapiens
caaagtctcttcctgcttttgcccgtatgtgtggtttcatgcacagtacagatataggcaggtgggttttttccataaaaggtttttataaattttttcttatggaatcacagtattccatcaagtagatatgcaatttacacagccatttgatcatagtttgacctatagttgttcctaatattttataatataaataatatgaatattaatagcactataatattcctttctcttattttttgattattttgctatgactaagtagtggggaggaacaaaaacttttccttgtaaatagagtaatgtattgttcattagaagaacaatttagaaaatacagttcattgaaaagatttttaaaaattacccacgacggcatcattactcagagataatcctattagcaatttattattgaatttcttgcctttttctatctatatatctatatttcctttggaagtaacatgtactatttgtattattttgaagcttttaaaaaattttaacaatatcaccttcacctttctatggcattaaataattaaatattttctagatgttgacaaactatggctgatgggtcaaatctggcccacccccttcttttgtaaataaagttttattggaacacagacatgctcatttgttcacatactgtctgtggctgctttcacgccataacagcagagtggggtcgttaggacagaccgcatggcccataaagtttaagtgctgtatttactgtctggtcctttacagaaaatctctccaaccgttttctatatcatcttgtcctcctataggtattccattatatgtgtacctcatttgttatttcacccgttcttttttgtgggtaatttggtccgtttcctgtgcatcaatattataagtgccattcttctaagtgtccttgggggtcgatatttgcgtatatctatggtgacattttaggataaattcctagaagtggaactgctaggtcaaaactttcatctgtttttgagctttccggtgtctaagtttacacagctgggaagtttacacagtttctacccctgtgactgtaggtgggggaccatttcctttcacttcatgtgaatcattgtgaagttggcatgtagttatgtctcatttgcattgttttcatttctcaagaagttgaaagctttttttttttctttttcttgagacgaggtctcgctctgtcgcccaggctggagtgcaatggcgtgatctcggctcactgcaacctccaaccgcccgggttcaagcgattctcttgcctcggcctcctgagttgctggaattacaggcacatgcccccacacccagctaatttttgtatttttagtagaggcgggtttcaccgtgttgggcaggctggtcaagaagttgaaagctttttcatacttgtgcgccatttgcattccttctttggagaaatgctgtacatttcattgtttattccaggcaatgtcctcaaggaccaagcacagaggaggcgtggggcccctgcagtgccctcagggcagcctgacagagaagcagggcaaacgggaactgacacagcctttcgattaaatgtcaatctttgatttgacaatttggggtcattttctaaatccaacttaaatacagagcagctggaatgtgaagatgtcattcctggggttcctgcagatttctaagtataagacgaagggtgggcatccttatagaggagaattgttagtgtgcgggggatcgaggtgtgagggtggagagaggatcctttctgccagctcaccaccgcagatgggctgtcctggaaggacttggtctcagaccctgagttaaaacggccttcattatcatgatgtcattcattcatctagcacatttttatcaaggactactgtgtgtcccctgctgttctaggtatggataatgcagcttcaacaaaccactgagcttgtccaggcctaaaacacagaacttgccacggtctctcatcctccctcactctgcgttcctcacagcctccacatctgcgaagtgcagcttctatttccctgctcttcctccatctcctgctcaccctctcctctgcacactcttttctcctcgcattccatgtcttttcatcatttttgtcttcaaattctcttctttcttaggcagcctcaactgatattgatcatttcattatcacactccttattgccagagggtagaagttgtgagtctccacggtcaggcagggaaagatctttttagctcttccatgacagagctctcggctcaacatgtccaagactaggagaagagaggcaggtgccagtctcatcctgggcaattgtgtgaccctgggcaggcttctctcccctttctggattccattcttccttatttttaacaaagacaacttgggcattcatgtatttttaggattgatgaggtaatttaggtgaaatggcctgctctccccaggagggaagagtgctagtgggaattctcctgctgcccagagaggcttatacttctggccaggcatctggacactccttacatattgtttccaccagatttgcctggttctaggggcaagaactgtaaagggcctgagatgtcaccctacttgcaagccaaaatttagcctgccacagtttcatgggtgctttggaagacacgagagtcctgggtcagagacaaaggactctattcctcacagtgcagcaaggggcacaaatatcctgtttgtgctggctgcctttgccttctcagtcccacagaggcatgtggagcagcctgtgtatgccgcacgtgcaggcagtttgcattgctgctgcatatcccagagttaagggaaccctcatctttacagtggtctgcaagcagacctgtgcaaactttgctctggaggaaggcattatatttgttaaactggacagtaaacaaacctgcctcttgctctggagggagacgctatctgtatcttccaaggctgtttgctctacacacattcttgaagagatgatctggaatgaaagctgtcagtgtctgtgcacagcaattgtggagaatggtgtatcaacatcctgtcctcggctggacatggtggctcacgcttgtaatcccagtactttggagagccaagtggggagaatcacttgagcccaggagtttgacatcagcctgagcaacatagtgagatccccatctctataagaaaaaatttaaacaaacaaacaaaaatcaacatcttgtccttgcatctcctctgggagatctcagcactacctctgcctgcaagccccccgtgtgggtttcaccccctcctctgcagggaaacagccttggaagttgggatgctacttcccctccatcttagtgtcatagggctgctgaaacaaagtccccaaaactgggtgacttaaaacaacaggaatttattgtctcagttctggaggccagaagtctgaattccaaggtgtcatcaaggccatactccctcttaaacccatagggcaccgtgccctgcctcttcctagctcctggtggtttgccaataatctttggcatttcttggtgtgtagatgcattgttcccatctctgccttcatcttcatgaggctggcttctgcctgtgtctcctcccatcctcttcccttcatgcatgtttgtccctgtgtcctgatttctcctttttgtttttgtgttttggagacggagttttgctcttgttgcccaggctggagtgtagcagtgcgatctcagctcactgccacctctgcctcccaggttcaagcgattctcatgcctcagcctcctgagtagttgggattacaggtgcctgccatcatgcccagctaatttttgtatttttaatagagatggggtttcaccatgttggccaggcttgtcttgaactcctgacttcaggtgatccacccgctttggcttcccaaaatgttgggattacaggagtgagccactgcacccggctgttttccccctttttataagggcaacagccacgttggattagggcccaccctaatgactcattttaactagatgactctgtaaagactctccaggccatctccaaataagatgccattctgaggtactaagagttaagacctcaacgtgtctttctgggggatactattcaacccatagcacatcccctcatcccccatggaataaccgggtcagaggtggagcaggtaggactgaactagagaatgtgccccttggtgggtggccctttccctaattaaggcacctttctttgggctgagacttctctgcaaagaggggagggggaaaggatagttaaatttgtaagtttcatggcactccaagtcaggttctgtggctttctgctcttcctttttctggttttcagatgcagatgctgttgctgcacagatcctgtcactgctgccattgaagttttttccaatcatcgtcattgggatcattgcattgatattagcactggccattggtctgggcagtgagtacaattcattatttagtaggatctcaaatacctagccaagtagttaaactttcatgagcgccccctctcatcccagcattttgctgctgcccagccttaattactggaggcaaacatccttttggtttgctgacttgaagttttatttgcccacatgaatgtaaagtcagtctggggtgccgcaagggctgctggccatgctcatggctttgtcaccaaggaacctgcccggttaggagtggccaaaggcagctgatgaaatagaatcctgcaggtgggagggaggcactgaccggggcagcggggagaagacaaagagacctattcatgcaatgcaggcgcaccagctgtttttacaataaggtgcatgtggcttttgagaaagtgggtcatttggatggagggtctctaatagggaacaatttttctttcaaatacctgaatcacaggtcagttcaattcgccacctgccccactgtgtggtccacacttcgttcactttctgccttcggtaagagaaaccaggaaggccgagcagttctcagtcaggactccttgctcggctggctcagcaggtcggccccccgccatgcagtttctctcttgaccttgagacctccagagtctaaattcaccttgcactgtggttcctgggccaggccacatagcgagataaagtggggcacagcagccccaccccttggaattcaaaacagaaactgggctgcaggaaacaggctgctgacagggacgcaatttcaatacaggtttcattattcacgggccagctccgcactgtgtggcagggggacagttgttagtgttgcactctgaaagagctgttggttaattcctgccttcctcccttttcccagtccacttcgactgctcagggaagtacagatgtcgctcatcctttaagtgtatcgagctgatagctcgatgtgacggagtctcggattgcaaagacggggaggacgagtaccgctgtggtaaggtcatggctcttcccctggggaaacagaaggaagcagcagaagccaaccctgacccttcccatctgtaaaatgggtccaagtcattgccatttttaggtcatgtcttcagctgggattgaactggcgtttgcccaaagacatgttgggctggggggtcagggagggccttccatggagctctggctctcttggggagaccacataagcaataagatgagaccagcgagaagtctcagggatccagagtcactgctctgtgatggggaggctgccgtggacaagaagtgggtcagatttggcagaggaggggtttgagctggctgtggagaaacccctgcctatggtctcagggttccactggccactaataagcctttctttctgcacatcggccagtccgggtgggtggtcagaatgccgtgctccaggtgttcacagctgcttcgtggaagaccatgtgctccgatgactggaagggtcact

SEQ ID NO: 9244 - DNA, 6000 bp, Homo sapiens; identical to SEQ ID NO: 1002

SEQ ID NO: 9245 - DNA, 6000 bp, Homo sapiens
tggctcacacctgttaccccagcactttgggaggctgaggaggcaggatggcttgagtctaggaatttgaaaccagcctggttgacacagaaaaacctcatctctacaaaaaatacaaaaagttacccaggcgtggtggcatgcgcttgtagtctcggctacccaggagactgaggtggggaggattgcttgagcctgggaggtggaagctgctgtgaactgtaatcttgccactgcactccagcctgggcaacggagtgagaccctatctcaaaaaaaaaaaaaaggaaaaaaaaaagaattaacttcttatttcatagcatactaccattgtcagtttatagaaggcctttttcttgttttaattaattttgtttctttgtaatctgttttagataacgaattaccttaaaaataagaataaacaaggccgggtgcagtggctctcacctgtaatcccagcactttgggaggtcgaggtgggcagatcaattgaggccaggggttcgaggtcagcctggccaatgtggtgaaaccttttctctactaaaaatacaaaaatttgccaggtgtggtggcgggcacctgtaatcccagatactcaggaggttgaggcaggagaatcgcttgaactggggaggtggaggttgcagtgagccgagatcacacccctgcactccagcctgggtgacagagcgagactctgtctcaaaaaaaaaaaaaaagaaagaacgaacgaacaataaagtttgtacaagggcagcaagtgaagacttttacccagaagtctgtaagaacagtaggggtgtcagatgccacgccatgccactgtctagggaccaaatgcaaattgttcaccttctcgcttggcgtgaggagcattgataggaatactggtttgcttgtttgtccttggaatatttatttgggttataactctcagcgagattccaactactggactttcaggcttagaatagtgcctcaccaggagtggtcactaacggatatgaagccaaccaaaagaaaccaccatcttggcacgcatctgtgtgttagtttcccttagtgccactacaaagtacaaacaactaggtggcttaaacaacagaaatgtactgtcttgaatttctggaggccagaagtccaaaatcaagatgttggcagggttggttccctctgatggccgtaagacaaaatctgttccatgcttctttgtcagcttctggtagcctcaggtgtgccttggtttgtagatggccaccttctcctggtgtctgtacgttcttccctgtgttcgtttgtcttggtccaaatttctcctttttataagggcagcagtcattttggattagggttcaatctagagacccaactcgattacctctgtgaagactctaactccatataatcttgaatcatcttggtgtggtagaaagaacatgggctttgcaattatacctgtgtttgaatcctggcttcaccacttactggtgagtggtgactgccttgagaaagtcatgtaatcactcaggacttgttttctcatccacataatggggatgtaatgttgctgtgaggattagagatactctagaacatgctgggtaagtggaggctgttactacctatgagctgagggcctttgcttttcaaggtgaacagtctatgaataaacacatctgtaagtgaatctaatgggaagattcttagatgacaaggatttcatctgtgaaccaggtcagctggcatctataccagagtccttccggcctacatgtggtcacttgtttggagccagctgtaattcacaggttacgtttttaggtgaagcctgtataaaaccattttacagcattccaacctggatatgacattcattgaccaatgttgtctaaggctgtcacactggggagaaaaggggtgcagccttctagatacgaagaccagcaatgccttctatacccgcatgtttataatctcaagattctgccccactccgatatcttctaggttgatttgaactgaagacaaggacacatatcttgagacattatcatattctgttcaggttacctggaagattaactatacaagtttcttccattaccaggaataaaaatttgagtcaaatttaatttagtattaaaggttgcaaatgctgatgtgctctgatagaagcgaaagcttggtgaatggggtgggatggggtgggggcaggaaggagacccacaagcagagaggaagaagttggttgtataggtggaagcttgagcttgggaggaaccaggtagggacctctcctctgaataaggggcgctctgggccacttcctctttcttcaaaacaattaagttgaccgtggaccttaatcacactagcagggcaattttgaaacaataatccgaaagaacttttgccagctacggcaacttttttatatcatggagatcagcctgaaagcaagctatttgcccgaccactttttgaccaatttattttcggtttagtcaggtttcttccaagtctgtgctaatctgaatggttaccttagtaattactttttgactaatttattttcggtttagtcggatttctttcaaagtctgtgctaatctgaatggttaccttagtatatcaatgtcctagtaactgtagcaaggacatttttgctggaaatcatttaaagcaggtgtatttgagtcatgtagcatagacagcggcatttactgcgagttttttacatctaatattgtttataagattttatctgttgtcacatttgtgaaatttatgaaaaaaattggttacgaacactatcacaaggtggcaaaatcaagcttagaaatcaattagtgactctgctgtaaaatagtatatatatacacacacactctttttaggtatacatttattaaatgccattagagttggtacaaaatacaatttttagctggtggctctctaccgattacaacgcagccagcacagcatacttgggttttcaagcctcgggagctcacccagcaatacatagctagggagaaggggtagggagaataaaaatcagcgaaagccaggatattaataaagagttttgatggttaaggacaagcaggcgaattaagactctggaaaccgagaaggtgtatagaaaagaaaaccagagagctggacgacaaggacacagtaacagcacaaggggattcatctaaagggcattccgatggagcaggcaggctgcgccccgaaaggtggggagaggttggaagcagatgggcaggcacaggcgagcgtgcactgcctgaaaaagttttcatgatggctccagcctaatttcccaacgctggtctcgggcgccacaaaacctgggcggcccgaccggagccaggtgccagcctcagggccgccgggcccggcgcagcgtccggaattcctgcgatgtctggggcgcggcggtggctcctccccgcccccaccacggcctccgccggcattttccggctaggaggcccgccagcccttcgaagaaccggctccacgcgcggacggtcgcggccgccgcgcttcccggggagagaggcgagcgcggcgcccggaccgcggtgagagccctccaggcccgggcgcgcggggtgggcttcccgggtccccgcccgaaggccgcggcgcccctcctcctccccctcccccgcccggggcagcccgcccctccccccggcgcgggcggggctgcgggcgccgacgcggaagcgcggggcgctagggctgcgggggcggcggcgcgggaggccgcgcgcgctccccgggccgcagtcggcgcgggcgcggggcggggcggggcggccgggaggcggcgggcgatcgcgcacaggcctggccgccgcctcgcccccccttccccagcccctaccctccctcggcctagccgtccccctcctctcccctcccccgggcgaatcacgcgccctcctctgacactcgtagcggacccgagctccgaatttatccttcacgtgacctgagggggttgggtggttggctggggacagagggggagacggaaaggagggaacggaatctgccgttacctgagcaacaggccccgcccgccggctcggggctggggggcgggaggaggacgtcagcacgtcagccggggttttgcgttttgattgacagttgctatagcgaccgggtcggtccgtcgccattttgttggttggtttttttttaaaccctttcgcttcccgcccgaataataataaaaagccccattggagtgaggcgggggtggcggcggcaaccgcggcgggggtatccggggagactgctgctgtcgctgctgctgatcgcggcccaggtcggcctcagagagcggacaccccgagcggggggtgcgggcgccgccgccgccgcttctgctgctgctgttcctgctgctgctgttggtgccgctgccgccgccggcgagcaggcgggaccggtgtgagtgcgagtgtgtgtgcgagggagcgtgtgcgagggcgattgtgcgcgcgagtgtgcgggtgtgtgcgagtgtctgtctgtctgtgcggggactcgggggcgggcggttcgggctctcctggcggaggagccgccgccgccgcccgggccccggcgcttctcgctgcgcaggttcggagcgcgcgccattttgtgagatttacaaaatcctcctcgggaagaagccgccggcagcagccgccgctcggcgcccggcctcgccgacgccgccctctgcgccgggccggccgtgcggccccgccgcctggaatcggggcccggggactgcggtatttgccggggagggggctgtcgcctccccggccccgggcgccgctggaaccgcgagccgaggagagactgagcaggctgcggcgcggccaggagccggagcgccgggggcggagagaggctgccggggcggcgctggctgcggaggccgcggcgggagcgcggcgcgggagcccgaggctgagactcaccggaggaagcggcgcgagcgccccgccatcgtcccggtgagtgtccggcccggccgcggccccgcccggcctggcgctcggctcccccggcggcccgcagccgggccggagccgaggccggccgggcggagggagggacctgccattttaggaggaggcgccgcgggcccagggccggccgccgggggagggagcctcaggccgggtcccggaggagcggcgggcgcgagcggagggaaagttgcggagggtgggagcgggggccgcggcctcccgggagccggggcctggggggccgtagacagcgccagaccttcactggccgcccgagcgaaggggtggaggttgtcttcctcctcctcctcctcctcttcctcctcatcctcttcccccagctcctccctcgtccctcctctcggtccccaccagtgtgggaaccgccggggtgattcgcaaggacaatgcacgggttaagaaaatggggccggctgccgggtgggcgaggacggcggggccgggccgggccgggcgccggcgaaggtcgggagccgctgcctcggcggccctgggggtccgcgctggagcgaggggcactcactggcctccgaagttgggcggggagcgcgagtgtccccggcggctcggggtggagggatgacctgcccggcagccgggggagttggtggctgaggagaggtgaattagaatagatacctgtgtatcgccacaaaacttcaccagtctatttataggcacaaacccactctcgcttcggagccaccaaagctgctgagtagctcagtacttggcgaaaggctcctccctaatctgaaatagttaaaaatggtaaaattagtgagtcagtgactctggttacttgcctgtgcctttcgcccaaccctaggtgacacgaatcccataatctgggcacagcgcaggaatgctagcaccatttggttcttgaattccgcccaaattgtcagaaaat

SEQ ID NO: 9246 - DNA, 6000 bp, Homo sapiens
tccttcacacctaattatgtttgctggattgggttatagttcttcagtgtgtggactcttgtcagttttatatccgtaggccgagcacaatgcctggaatacagagcatgcttaataatcagaggcttttcattgtatttcttatcaacaacactagtaactgaatataaatcacccttcctcgccagtcagtgcaccataccattagaattcttgctttttgatcagtggagataaaatgagtttcttttctccatgttaagtaatcaggttctgattttcccttttctttctctctaatagtgtttaatgctctaatgctttctaagcatgaggtattttcttgagctctgaagcccagtatcttcaaagcccccttcagggaaacctcagttccctgtcagtcaaggcctgtcactggctttgccttggccttctctgggagaatgtctgctccttaagttgatggcatacaagttgaggtggggaaaaattaaagtgtaggatttctgtaggcagctaatgttttattactggagtgcagtgatgcgatctcagctcactgcaacctctgcctcctgggttcaagcaattcccctgcctcagcctcctgagtagctgggactacaggcacacactaccacgcccagctaattttttgtattttagtagagatggggtttcaccatgttggccaggatagtctcgatctcctgactgcatgatctgcccgtctcagcctcccaaagtgctgggattacaggcgagagccatagcgcctggcctaaaatgtattatataagcatcatagtgaccacaaaacaaaaacctgcagcagatatacaaaatgtaaagagaaaggaatcaaagcataccattacaaaaatcatcacattagaaaggaagatagtaagggagtaacaaagcaacaaaggaactacaaaccgccagaaagcaattttttaaatggcagtagtaagtccttatcaataattaatgtaaatggattaaattctgcaatcaaaagatagaagtggctgaatggatattaaaaaaaaaaaatctaggtgctgcctgcaggagactcagctttaaggatacacataggctgaaagtaaaggcatgggaaaagatattccatgcaaatggttaccaaatagagagcaaaaaagatacttatatcagacaaaacagactttaagtcaaaaacttcataagagacaaagtcactatatcatgataaagagataaattcatcaagaggatataacaattataaatgtatatgcacccaacatcagagtacctaaatatatattaacggaactcaagagagaaatagcaatacagtaatagcagggtacttcagtaccccattttcaacaatgaatagatgatccagacagaagatgaataaggaaacagtgaacctgaataacattctagagcaaatggacctaacagacatacagaacactccttcccccagcagctgaatgcacatttaaatgtacacagaacattctctaggatagatcatatgttaggccacaaaacaagttttaacaaatttaagaagattaaaatcatatcaagtatcttttctgaccacaataacatgaactagaaatcagtaacaggaggaaaattggaaaattcacaaatatgcagaaattaaatacacacctgaacaaccagtggggtcaaagaagatatcaaaagggaaatcagaaaattccttaagacaaattaaaatggaaacaacataccaaaacgtatgggatgcagcaaaagcagtactagagggaagtttataaagaaaatgtggtgtatagctgtatctacacaatggaatactatttagccttaaaaaagaaggatttcctgtcatttgcaacaacatggatgaacccggagtacattacactaggtgaaataagccaggtacagaaaaacaaatataggccaggcatggtagctcacttctctaatcccagcactttgggaggctaaggcaggaagactgcttgaacctgggagttcaagaccagctttggcaacatatcaagaccctgtgtctacaaaatttaaaaaattagctgggcatggtggcatgggcctgtattctcagatactcaggaggctgagggggaggatcacttgggcctgggaaatcaaggctgcagtgagccttgaccattgcactcacgccactgccctccaacttgggcaacagaacaagaccctgtctcaaaacaaaccaacaaacaaacaaaaaagaaaaatatgcatgacctcacttatttttggaatctgaaaaacttgaactcagagaagcagagcatataataatggtggttaccaggggcagtaggtgggagaaatggggagtcgctggccaaagagtacaaagtttcacttaggaaagatgagtaagttctggagggctaatgtacagctctaatgtatagttagtaataatacattgtatacttgaaatttgcaagaagaatagatcttaaatattctcaccaccaaaaaaaaaaaaataatgtgaggtgattggatatactagcttgactgtggcaataattttacaatgtattcatatatcaaaacatcacatcctatactacaaattatgtaatttttatttgtcagttatacgtcagtacaactgggtgggggggagggggggtgggaagaagctgtctccatatgaggccgaggtgtcctatatatcctgagcttgtattatcgcctttcaagtgtaaaacctgtaggtgatgggatgcccgaaaggtttgaaaatcaggaatgacaagatcagattttgctttaggagggcaacttgaggcagcttaaagagtggattgcaggaggtagaacttggaagtgagaacgctgttgcacaagtgcagtgagagaggggtagcctcgagccgaaccaatggcaagggccagggctggggagaccattggagagaggggtgggagccacactgggctatcaccgggaatggagagctagaaaagagaggagaaagcactggcacagggggcctgcggagagaaagaaggtctgaagaaaacctggccaaaaggagaagactggagccctgggccatcccgcttgcggaatgaggggccggcgggcttcctggggctgaaccctgcgtggcaaagaagtgggcaggttttctttctgcctgcagaaggcttctcaaatgcctaacaaagtgatggatttcacgcagcccagctcagcaaagagagacacagacatcagagtgttctagaaacaaagcagggccccagggggaaactgcgaggcctagcagggcaggggagccaaacacagggaagaatgccttctccattctccagagggaagctcaacgtgcctggggaagggtgcgaggggcactggcctgttgggacatttacagccaggcctcgggttggttttatccttaaacattgttttatccgggggcaggctttttccccggaaaatttccgctctgcctcactttgctcttccccgaggagtgggctgggagccccctctgctctgaagccatcctgggggtccactgtgggtgttcggcagtagcttctaggggactggccaggcccctccctggggctgcctaaggagaagagttgtttctggggtgacgtgggagcctgtgtgccagggcactggcccgcaagggtaagaacccggcgggctcccgcagcctaacagggagctgcctctgtcacgtgcctgcgaggtgggacacaagttggcttacaagttggttcgacatagccaaatccgcgtgccgcatttccacgctatggagtgctagtcttcatgattgtgccccttgacatgacacaataggaatagaagccgggaggccaagcaaaggccctctttgggggtgggggcgcggcggcatgtgaccctcgccgcctgtggggaagacctgccttgaggacagagcgccaggggtgcagaggccgcctgggactgcccggaggccggtggggagcgcgccagcgaaagcccgtgcgccctcggagccggggaaggcgcgggccatgacccgggttcgcccgcaaaggccgggcagtgccgcaaggcgtgggggcgcccccgcccggtggccccggggctggtgcgaccctgggcacgccggggccggggccggagccgggggtcgcggcggccggggagggggaggagccgcgcggctccgccggcgccccgcgggccagggaaagtgaaagggcggcggggcctcccgcgcgccgctccaggaagtcgcgagcaggaagcgcccgcggcggccgggccgggctgggctgcggagcgcgggcctcggcggcgcaggtgaggcgcggggccggggccggaccgggaggcggggaccccccgcccccccgcccgcacctgcggggcagccggcgctcaggcgccgcagccgctcagcacctgcggcgccctcagggagccgggcgcggggccctgcgcactcggagctcggctcctctccttccttttcttttttttcggggggaggtgggggctggtttggatgttttccgagagccggggacggtctcaagctattttcgcggagggaagtctttgaaatacgacatctagaagagtggccctcggcgacaatgccgggcgttcccggaccggggcaacgctgggattccggggaagtggaggcagagggagcgggcacggggccggcagccgctccacggagtccccggcaggggcgagcttagctgtccagccgggtcccctgcccaccccggcccgggccgcggtgacagctgagggtccagagagccggcaggaggggaccctgcgcattgtctgccgcgatggggacgtgggcgtgcccgcggaattcacctcctccggggaccagccgcccagggaggagccggcacagaacgctggctcggagcgccggcaccctgggcctttgcgttgtttgtcggctgagcagctggttcccggagcccgtgggcctcctggccaatgcgagtgacagcgaccttctgggtttataataaagggcttgacgcgccggaaagtcccctcgccgctggccaccagccttccagcccttacggcccacgccgtaatcctggtgaccgagaaggtacgttcagtctaaggatttgcatttgaacgaaggatactggccaagccccttaccacccccactccccgctaacaccccagcccgcggccccaggtttgaatttccaaaggaggaattgctaaagcctgccctttccgggtctcccttagctctttgcctggaaggtgcctgcctgcctgcctgccggcccttgaacttaaatcgtctgaagttgtgtaagtggataaatattttagacttcccccgttgtttttttattaatcccctttgagagcaagcttgaaaacacctggccccagacctgtgattcaccaagtcattttggacctgcatttacacgttctgtttcatgcagcccacctgtgatgttctctttgttgggggttggaggcaggtaagggaggtggtgcaaatggaattcaggttccttgtacttcagccaaggggaaagagatagtgaccattttcattcatctttaatatggaaagcgcctttaaaagcaaaaagccatagaaagagcacactctggacaggaagttgtattctatctcgtaatttaaaaaaaagaaaagaaaaaatgcatgaaaacttttggaggagaattgcatttctcacccatctttgcctgtaaagtgagacccagttaaaaaaaaatgtcataaagtagattatttaaaatatctgtggggccgctttgattatgtgtaatgccacctcagccctaaaaagactgaggaaccttactcctgctattgctcacttcctatccccattatttgagtctctgcagattacttggaaccttctaggcagcgcaga

SEQ ID NO: 9247 - DNA, 6000 bp, Homo sapiens
gtctgcatctccatgcttggagtccgcggggggtctccagacaggatcctggttgtcacctgaagcttggagaagggacaggagtgcactgcaggcgggggtgtgaccacgtccgcacccctcccagagtgcgaggctgtgtctttttagtccatttcttcccccactgcatgctgggacactcatcatgtcttcagccctgtgtgtgtgtgtgtgagagattgtgagtgagtgtgtgtgtgtaagggtgtgtgtaaagcgtgaatgtgtcagtgtgagagtgtgtgtgtgcgtgtgagtgttgaatgtgtgtgtgagtgtgactcggctgagaggagacagcgcagctgggcaggtgatgcttggtgagtgtgatagtgtgatgtaatcagaaacatactttggtctctggccctggctctgggcacacagctcctacaacctttagtgctgagtgtctttttttttgctaatgaggtgactgtggctggggctccaggacagcctcctgggggactggttgccagggcaactgaccatgtaattagaggttgggactccacccgtggacctctggggaggggagggagcccgcagaggtggagtggatcaccagtggccggtgttctgctcgatcgtgcctgtgtaatgaagcctccacagactccctcaaggacagcgtttgggggcttgcaggctgctaagcacggggaggttcccggagggtggagccctggggagggtacagcagctccgagctccctgccccatacctcaccctgtgcatctcttcatctgtatcttttgtaacatcctttataaaaaccagtaaatgaggccaggcgcggtggctcacgcctgtaatcccagcactttgggaggctgaggcgggcagatcacgaggtcaggagatcaagaccacggtgaaaccccatatctactaaaaatacaaaaacttagccgggcgtggtggcgggcacctgtagttccagctactcagcaggctgaggcaggagaatggcgtgaaccctggaggcggagcttgcagtgagccgagatcgggccactgcattccagcctgggcaacagagcaagactctgcctcaaaaaaacaaaacaagacaaaacagtaaatgtgtctccctgagttctgtgagctgctctggcaaattaattgaacctgagggggagtcattggaaagccaccctgtagctggtcagtcagaagcactggacactcctgtgccctggacaccccaggcctcgccctgtgctcctctccgcccagctgtccatccggatccttcataacaccctttataataaaccagtagacggtgttcccagagttctgtgagccgtcctagcaaatgatcaaactcaaggagggcaccgtgggaaccccagcttagccgggtggtcaggagcacaggtcacaagctaggatcagcatcctgacccggtggtcaggagcacaggtcacaagtggggcagtctccagggcgagccctggcgccatgggattttctgatgccgaaatccccacccgttttggtgagcagagcattctgtgttgagtgttgaatgtggggacagaaggaaagaagagtttgtttcctgcgggtgagactctgggctgcaccaggtgatgagcagccctggagcgcttgttagttttgtggtgcctttgaagtcacttcgctgggtccgcaatcaaaagccggggttggtggtggttcttttgttaatcagtaattagctccacactgttgattctctgagctcttttttttttcccccagggataaagcgttaattacttttttaacacgatactaacctcctgacagcctcccaccccaagctgggtgtctggggacggcgggcctgtctcccccaccaaggtgtggggtgagtgtggagaggacatttcacagctccccgggggtcaccatcagtgtgagtgttgggacattcttttcctgatttctctgtctctcgatgccatttttgtgaaggtttagcaaatacttgatagattgttgtgagaatgtgggcttccttatttgggggagattttttataatggaaaaggtttccttttttggaagtcacctggggacggggatgagtcacccgggggccttggtgcatgtggaggcccaggcttgtgggggagtcgcacagagcacgtgtgtgatgcatttatcagggcctttctcagcctggggacgaggagtggatgtgacggaggaggctcctgttcttgtgggggtggcgaggcgaggatggtgaacacatcagcaaacaggaagcgtggggggaagcgtgcgtgcgaaggagtgcagcccccaggacgctgggccgagccaggcagggacctgcttcagtcctcgaaggaggctgctggcttgtgaccctccttaaccccaccctcaaggcaggcagcgagtggaggagagtctccctgggaccctccttaaccccaccctcaaggcaggcagcacgtggaggagagtgtccctgtgtccctggaagagaggcctgcatggcagggggcacagagactctgggcctgggtcccccccggcacagtctgtgacctgtgaccaaaggctgaagtctgggctggagctacctgctctgtgggaaacaacagtgtgctctgggcttccatggggtctcccagctcaggggctgtggctcaggagccatgtgccaggcagggcactccgtcagtgtagggtctcccagcacaggggctgtggctcaggagccacgtgccaggcaggtcactccgtcagcataggggctgccatgaggattggctgcattttttcgctgtgtgatgtgactggctgcccagtggtggtggcagagccagcctggggtctgggcatggggcgcctgtccccagcggggcgggctctggggtgcgagcgtctgttctgtgtcaggagtccctgtttctttctccccatgctcacacggggtttttagactttgtgaagggtgtgcttcccaaagaaaaccagctgcaggtgtctgtgctggcacaaggagaacaaacccagagagcactgggttctttcctagaggggatggaatccagccaggcgtgccatgaggctcgcagcctcggggacctgtgctcaccagcacaccaccagtgcccagggctccttgtgctgcaggaagggacactggcatgaagtagggggtggggggagtcgctgtctggggggcactccatgtacctccagattcatgcactcggggaccgggcaacgcctcgggaagcagcctgcgctgatgtcaggatctatagtttaatactcgttagtttgtcccctgtgaaaaggaaagaaagattttctccctactgcactctcatactcaacacagaacacttctgccgtgagatgcgtggatgtttccccacaagcagtgctccagggcacccacccaggcgccctccaattccattgagttctgacgcgtcagatcccccagggccagggcccagtcccacaagactgccccactgtcagatgccaatcccaggttgtgatccatgacccaactggctggaagctggggttcccatgatgccctcgagtttgaacatttgccaggacagctcacagaactcagggaaataccagctgtgtctgctggtttctggtagagggtgttacgaaggatccgatggacagccagggggaaaggggtacagagtgaggcctgggggatcctgggtaccagggcttctgtccctggggagctggggtgcacgggcctcccagcatgtgggtgagttcaccaccctgaagtccattgtacaagagttttgagggagcctggtctccagcccctgtccttcctggaggacggcagggggctggggagtgctgtcgagggccccgcaagtctcctgtcactcaggtgagattgaaaggcttgttaggagtaacagtagatgctcccatcctgtaggaaatgtaaggtgttttttttggttttttttgagacggagtctcgctctgttgcccaggctggagtgcagtggcgtgatctcagctcactgcaagctccacctcctgggttcacgccattctgtctcagcctcccgagtagctgggactacaggtgcccgccagcacgcctgcctaatttttttgtattttttttttttttttagcagagacggggtttcaccgtgttagccaggatgatctcaatctcctgacctcgtgacccgcccgcctcggcctcccaaagtgctgggattacaggcgtgagccatcgcgccgagccaggaaaatgtaaggttttaagaactttgtacaagaaccaaatagaacaaaagatgctcctgtcacccttcccactcaggaaattacaaggaatttatgagctttgtgtcaggaaccagggactaagaccaataaatacctgctgcttatcacacagctccccaggtccgctcccgtgaggagcaggctctgcctttgcaagcactttcacgaacagcagatccatcttcctcctgttagcaatcaggcggtcagggtggcggccacttccctgccatgccgcagagaccctgacctcctccgacatcatgctccggccccggcttctgtcctagctgtggctcgctggtctcgagatggctgccttgccccggctgtttcatctgcattccaggcaggaaggtcgagaagggcacgcctgggcttttcttttgaagactccccctgagccccaccctgccgcaaggggcttgggctgtcaccctgtgggctgagtccagggctgccgtgttggagaggcgtgtgggaatgtgcgttttgggatggcagcccgagcctcctacaacttggcagagttgtcaggatttcaagccccgtgtgtctttgaccttttacctgagctgtgtgagaagaggcattttcttgtttctttgcgagtccttcctcactgcacttcagccagggcgccgacacatggtcgttcgacttctggcttggcctcttttgtgagtgtggggcctggtcatatcctcttggtcagtgtctctgtgatgatgagaacgggaagacggccacggtgcccaccctggcaggactctctcccctcgctggcgctggctcagctgccgtgagcggccgtaggcactgtcccgggccctcctgtggttgctcccagccatgctgctggctgcttctgccgtcctggcttgcagagactctgggtcatgcggggaagagggcagagtcctcctccctgctcaggcaagagaggatccagcaagatttcttcctccccaccctcctgcccctcccagtctgggcagcagataaaagccagggccccacacttctgccacctcctgctgctcacacactccagccagggacctgcccccggggtccaacaaggtaaggacagcggggctgcccctgagcagaactctctttcttccctggctgactttgaggcacctgagtcattgtgggtagacaaaagggggagggagaacgggagcttggggtcctggtctcagaccccatgctgtctccaagtctgtgccctctgggctggactcttcctcagccccagccccagcgcctccagctccgctctgtcccctcagggggcattgaccccttgtagccccgtggcttgttgcccctgcaccccataaccctgtgttgacttgggcacctgtgacattcatgcatctggcctgcgcctgtctccagcgcccacattcccacacagagctctgtcaggacgtgccacagcaggactcccaagtccattccaccttctccgtcagggcaggccaatcctcgtctgctgcaaatgtcctgggagtaacaaacccagagctggcctctctggtgtggtggccgccggcgccatgtagctgcctgcccaggagaagcggcgaggcccacgtgtgaggccctgagagctggaaataggtactgg

SEQ ID NO: 9248 - DNA, 6000 bp, Homo sapiens
tcttcgggaaggggaatggctagtgtctgtcttctcagagcagctggactcagttctctgtgagaacagtacaaagacatagatattcctcggcttggagtctacacttggtattgtcgggtttttattttttatttacttattttttgttttttgagacagagtctagctctgttccccaggctggagcgcagtggtgcaatctcggctcactgcaacctccgcctcccgggttcaagcgattctcctgcttcagcctcccaagtagctgggattacaggtgcacgccaccacgcctggctaattttttgtatttttagtagagacggggttttaccatgttggccaggctggtctcggactcctgactcctgaggcccacctcagcctcccaaagcactgggattacaggcatgagccaccgtgcctggcctcgtcagggtttttaattataaatttaaattttatcgatttgagtacatgtgaagtggcatctcattttcattttaacttgcatttccctgatgtctaatgagcgctgagtgtcttttcctgacataactggtcctttctgtctttctcctgttgttctttccctgacttcttttggattagtcagatattttctattatttctcttttctttattggcttcttagccaaaccccttttgttcattttttccctagtgctttttctcctgggcacagactacgtatgcctcacatatcaaatttaatgtagggtcaatattgtatcacttcagtcttccctcttcatacataaccctttgcatcttgcacctcacacctggagttccacacttcacagtgtgaggagcttatcagtgggttacctctcaccatccatccttcacactgtccttaccttttacttctacacacactgtagaagtatcacaagctattgtttgttttaaacagtcagtggtctcttaaagaaattatgagaagggccgggtgcagtggcttatgcctgtaacccagcactttgggaggccaaggtgggcagatcacctaaggtcaggagttcaaggccagcctggggaagaccccctgccgtctctacaaaaaattaaaaaattagctggcatggtggtacgtgcctgtggtcccagctacttgggaggctgtagtgggaggatggcttgaagccagaagactgaggctacagtgagccgtgactgtgcccctgcacgccagcctgggcgacagagcaagaccctgtccccccaccaaaacattttttttctcttgatctatttcaccagtttgagtatgatatgcctgcatgtaattttctttgtatgtgttctcttcaggttttgctgaatttcttgatctgtaaatcagtatttttcaccacgtgtttggatttggagccatcattttgcaaaaatgtttccttcctagactcatactctccttctggagctccgatcacacatgcttttggccatttcatactgtcccataggtctctgaggttctctccacttttcttcaacttttttctcttcttcagattaaataatttctatccatctgccttcaagatcccaaactcctgttttctccaatctgttaatccaattcagtgaaattttcatttctgttattgtacttttcagttctagacttttcttttgattcttttagatactttgttattctgctgtgaatttctgattctttactcattaagacaatattttcatttaatcctttggacatattatttttatttattttgagatggagtcttgctctgtcacccaggctggagtgcagtggcactatcttggctcactgtaacctccacctcccggattcaagcgattctcctgcttcagctttccgagtagctggggctacaggcgtgcgccaccacacccagctaatttttgtgtttttagtagagatggggtttcaccatgttggccaggctgatctcaaactcctgggctcaagtgatctgcccacctcggcctcccaaatttctgggattacaggtgtgagccaccgtgcccagcctcctttggacatatgtagagctgctttagaatctttgtaaatacagaatctggttcattgtagggggattggtttctgttaactgctttttttttttcttaactatggcttacgttttcctctttctttgtatgtttagtgatttttgtttttttagtgtatattcaacactgataaataacaaatgagggagactcagggtgctcttccactgaaaaatcctgactttcgttctagtttgtagttccattactggacgtaccatgctgggctgtgtaggcttagctttaggctctgtttactgagcaatgtcccaggtgtctcccaggcccctcttacttggcaggacttaacctccaaactctgaccgtcttgtggatcgggtcagggttttgctttagacgttgttaaggcgggcctggagtagtccttattctaggggagggactggcaacctctggctcacaagccacatgtgttgatggcctgtttttgtacagcacttaaagccaggaatggcttttatatttttaaagagttgtttaaaaaaaaaaaaaaaacaagcaaaaatatgaaacaaaaactgcatgtggcccacacaacctaaaatacttatctgggccctttataggtcgtttgctgacccctgggaatgtgattctcaatctagtgtctcagctcaatgtcctcagtgttaatggcattaaaaaggtcttgactgggcacggtggctcgtactcgtcatcccagcactttgggaggattaggcaggaggactgcttgaggccaggagttcaagaccagcctgggcaacagagtgggaccctctctctacaaaaaaagaaaaaattagccgggcgtggtggcactcacctgtggtcccaactacttgggaggctgaggtgggaggatcacttgagcccagaagttctaggctgcactgagataacgatcaaaccactgcaccccagcctaggtgacagaacaagactgtctgaaaagaaaacaaaacggaaagtcctttcctgtagcactactggacctctagtctttgtgccatcctcaactctgtaacagccgcttcctggtaaacccatagagtcgtcccacacgtgtagtccagcctaggccaaggactttcagggaaccctacatcgacttcggctccccactcttgctaagcttcttcccctccagtgccctgccttgccggcctgctgctttagctgcccagaagtctggtctcttgcctctcacaccattacagtgcaccacactacactatgttcacacatttagcagctgtgttcacacccaaactatctcatatatacattttgttaaaaaaaacttcaggactctctaaacttatgatgccaagggtgaagttaagccctggagactgagtcagtagcaagtttgcaattctgcttcttcgattacagtttaatgctcttcctccttgttcttgagcacaagtgtcttcctcattgtggctgctctgtaaatcagggctccccgaccgccagggccacagacacataccggtcaggccacacagcaggaggtgagcttcaggccagggagcaaagcttcatctgtatttacagctgctccccatcgctggcattaccgcctgagctccgcctcctgtcaggtcagcagcagcgctggattctcctaggagggtgaaccctgttgtgaactgcacattggaggggtctaggttgcgtgctccttatgagaatctcatccctaatgatgtgtccctggcttccatcatccctagatgtgaccgtccagttgcaggaaaacaagctcagggctcccactgattccacattatgggaagttgtattttattacatattacaacataaaaataataaagtgcacaataaatgaaatgtgtttgaatcgtcctgaaaccaccccaactttgtctgtggaaaaactgcattctatgaaactggtccctggtgccaaaaaggttggggactgctgctgttaatgactaagaaagaccaggtctcccccttcccatttggtgatttttgttacagattagctgtctccattgtcctgtacctgacttagaccagacagcacagagaccccaggactgtttcatcttcagtgggtccccaaagaaaaagaccacctcgactaaacagactgttgtaactatgcattaggccttatacagaaaagacgctgaaattcggttaggcttcccgagacgctggctatagaaacgaccccaaatttctacgtttgagaacactgacttccattctttataatgtttcctgggcgcctcaagcttcgcatttgactaaactctagattctgacccttttgattatttttggttgacagtttttgtcattttatggctgggagtgatggctcacacctgtaatctcaacactttgggaggccaaggctggaggatcacttgagcccaggagtttgaaaccagcctggaaaacatagtgagatcccgacaaaagaaaagaaaagaaaaaaattagctgggcgtggtggctgcccccgtggtcccagttactggcggagggggtggggcggggggaaacaaggcgggaggatcgcttgagcctggaaggtggaggctgcagtgagccgtgtcccgccactgcactccagcctgagccaactgaggaagaccctgctccaaagaaaaaaagaaaaagaaacacccgcgccccgccccccccgtttacgtgcacaagaagcccatatgcagttaagtgtgaggtttattttgtggcattccgaaatgccgagggccaggtccccacaaaaacatttgcggcgtgagggaaacgggaagagcccagcggtaggcggaaggcacgcgccggggacactcagcggcgagggcctgcgggagcccccagcgcgataaggagcccggccggggagcagcggcccgccgcgggacgcccgagctgcggggaacgcgagggcagcgaggccggcgtctctggtccgggagcgtccaggctcgctcaccgcgcgcgaggcccgcctgccgagtcctggcctcagctccggcgcagggcccagcggggcgcccactgccgagggaggaagatggacgtgtcccgggagccccgctccgcctcccacttcccacctcccggtcccgcgcggccggcccgggcgcacttccgtcggaggcgaagcgcggcgaagacccgccccgtgaagcctcgcgcgccccggaaatggtcatgcggcggcgccgaggccggaagtggctgaggccggcagcagcgggcggcagctgcggcgcaaccggctccggagctgcctggcgcggccgggcgggcggcgccgctcaggctcgggctccggctgggcccggcgcggcctcggggctgcccatggggcgcggggggccgggccggtgacgccggacgcccatggacgcctctgaggagccgctgccgccggtgatctacaccatggagaacaagcccatcgtcacctgtgagtgcccggaggcggggagggcgcggcggtcgttgggcgggcccgggccctggcgttatgcacccggcgcccccagaccttcagcccccggcgcgctccgggctgggccgcttcctggaggtgtgaccagggctgcggctgaggcggggccctctgacttttcggggacgccctctgaccttcccgccgggcgacctctgacccctggggggcgccctcgggccggctgcagttggagccggtggaacccggcggactctgcccgggactgggcgcgcgccggcgtcgagggcgaggagcgggggctgccaccgccccgtcccgcccccgttgagccgcgcgcccgggacctgggggccccggcctcttccgccgggcggttttgcccgcgggcgccctttccccgactacggggaagtccttgggg

SEQ ID NO: 9249 - DNA, 6000 bp, Homo sapiens; identical to SEQ ID NO: 1007

SEQ ID NO: 9250 - DNA, 6000 bp, Homo sapiens
ttgtatatgattggttggcattatttcttttgtgatgtttagtagaggtcattgatgaaaccttcagaacctgcgacattttttgttagaaggttatttaattataatttatgttttttgatgaaaatatggttatccaaattttttttaagttagttttggtaagttgtatctttcaagaaacttttctttctcatctaaattgttgaatttgttggcgtaaacttatcaataatattttactataatttttttttaatatctagagaatctgtagtgatagtctctcttttattcctgatattggccatttgtactttctgttttttccgcaagtagtcttgcctcagggttgatcaagtttattaatctttgcagacaaccagcttttgactttgttgatttcttttttttttcttttctttttctattcttgatctagtttctattctgttttttgctcttcattatgtccatttacttgggttgaatttactccttttccagcttcttaaaggtggaaactagatcattaatttttaagcctctttgctactatagaatttaatggtataaatttccctccaagcactgctttagctgcattctgcagctttttatatgttttttttgttgttgttggtttttttttttttttttttttttaagacggagtctcgctctgttgccaggctggagtgcagtggtgtgatctcggctcactgcaacttccgcctcccagggtcaagcaactctcctgcctcaacctcccaagtagctgggactacaggcacccaccaccacacccagctaatttttgtatttttagtagagacggggtttcaccatatgaccaggatggtcttgatctcttaacctcgtgacccacctgccttgtcctcccaaagtgctggggttacaggcatgagccaccacacccggccactttttatatgttttaacagtcattctgaaatgtttctaacttgtgatttcttctttaacctgtcattagaattttgttacataatttcaaaatatttgaggattttctagatgtcttattgagttctagtttagtagcagtttggtcacagaacgtgattttagtcctttaaaatcgagacttgttttatggcctagcatctaatgtgtctttgtgaatgttttatgtgtgcttgataagaattgtattttgtgtttgtttggcgtagtggtctccagctatcaatgtagatcaaattgtttgatatttttcttcatatcttttatatctttgtgtgtatttgtgtatattctgtcagtaattgagagaagagtcttcattgataagtttggatttgtcttagactccctttgtaacattgctttatggtttttgaagctttgttaataggtatatgcatgtttgatattgttacgacttattgataaattgacccttttatcatcctgaaatgtccctctttgtctctagtcatgtttgtctttaagtctgctttgtccgatatcactatagtcttaccagtgttcttattcttgatattttcatggtgtgtgtgtgtagatatgaaagatatgaagaaaaatatgcaacatgtgtagacacacacacacacacttttacccttttactgtaaacctgtgcctacctttatatttaaagaattatttttgtgttgtgtgcaacatatgatcaagtcgtttttttaatctagtctgttagtggttaacccattattcagagttttgggtttaagacttgtcttatttgtgttctgtttgtctttcctgttctttgtttcctattccttctttcctgccttttgcggggaggtttgttgaatactttttggcattttattttatctcttgtactgatttttttacttattcctctatgtgtcatgtttagtgttccttttataatatgcacgtttaacattagtttaccttcaaataataatatattgcttgttaaacagtgtgataaccatgtgattctatctacctcttgtgcacttgttgtattacttttgcatgttataaacctcacaacacattgttggctgtttaaataaaaaatagatttaacacaaaaaagaaatttaaaaagacataaaataaggataatagatcttttatatttatccttatatttgctcttttctggtgttattcattcctttttgcaattcctagcttccatctggtattatttcttcagcctcaagaccttcctttaacttttattttgtaatgaataagctatcccgataaattctctcagcaggtgttgatctgaaaatacttgtttacctttattttttggaagatattttcagtgaatatagaattatagattaacttctttctttcagtgaaagaaaaagatgttacgatatagcttaaagatgtattgactttttttctggattacactgtttcggtagagaagtcagtggttattcttagcattgttcccctgcatataatattttccccctcttccctctggctgattttaatattttctctttgtttgatttccgcagtttgactatttacctaggtatgattttctttgtattttttctcctgggagttcactgagtttcttggatctgtgggttgatctctatcatcagtttttgaaaatcctcagatacagtcttgccaaatatttgttctgctttcgtctttcttctagttctccagtgatgtgtatgttacagtgctgaatattatcccagaggtctctgtctggtttattcattctgttttctgtttgtgtttttaatttggataatttctttttctgtcttcttgttcactgatttcttttttttccttgtgctgagtccagtctgttgttgaatccattaaatggattcatgtgatgttattgttatttttgagacaggttctcactctgtcacccaggctagagtgcaatggtgtgatcatggctgattacagccttgacttccttggctcaagcagttcttctacctcagcctcccaagaagctcggactacaggagtggtgcaaccaccatacccagctattaaaattttttgtaggaacggggtctggctatgttgccttggctggtcttgaactcctggactcaagcagtcttcccacctcaacctgggtgtagagacatgagcccagcctatattttttagttctagcatttctattttgttttaaatatagtttttctcttctgaaattctacatctattcatatgttgtccacttttgaactaaattgtttatcataatttatcagaagtaatttatcataattattttaaagttccagtctgctattttcaacatctgcaccatttatttatgtgtatcttctattgggtttttttctttcatgtgattgtggacgtcatttttaaaaaatgtttgtaatttttaaatgtgtgacaaattttctttgcttaagaacagttaaagatggaagtgagtcatattttccctcagaaagaggcctctcaactctgtcaggcccctcatgtggggctgagttgatctcttttgtagcttagctgactctgggctttgcttgtttgacttagattctactccccactgttttcatatgttttgagctgggatcaggacattcccttcagcagtgtttgtgtctttagaatcagggaaaatctagtggtctctatacattactgcccagtcagcagccccactcctaactctctgtgcctgggagatcgccttcctcctgctgtactgccccatccttctgtctgtccactcctggccgtcagaagttggttcagacttgggctggagtcttctcgctcatctgtggcttacttgcgccttctcccactgcaggtctcttccaggagaggcttttcattttgtagaattcaggagatttttgttccaactttggatcctcatacagctctctgatgggtctttaaaaggcagtgattttatgacttattagaggaggaacaatcatctcacacatttctgcattgtaacagaagtcaaagtctggtgatgctattcttaaattcaatatttatagagatcttgagggttatagtattatctgtcaaaaatgagttttcaggaaatctcaacacacgttagtttattattacatagattttctaaagggaagcatacataattttctctttttctaccatgagcaggtagggttaggccagtgcctttttatgtagaacatccttggtgtcattgccatagctttcttgggctgctgttgctgaaggaagtgtaacaggtgctgcgggtgcacagttaggtaggaaagaggctcccagccagggtgagcaggggcatgcatgttctctgtaaaagatgagagaaaatgcttttagccttgtggacctctgttgcatattttttgtttttggttgcttgtttttacaacctttgaaaacagaaaaaccatttgtagctggagctgtagaaaaccaggctctggatcaggccatagtttactgacccctgggctaaatgatctttatagccatttttggtctcagaattaatgttgaactgtaactaccatgcatttgggatagtaatgtgtgaaaaggcagaggatttaactatgaagtgtcctttttaataaaggcctcaacatatatatttaaacatatttgaaattcaattatgtgagtgtttacgtattccaccaaatttagagaaagcctttcatcttctctcttacaggagtacaaaccaccaggaacccgtaaacttcataacattcttggagtggaaacaggaggacctggtgggcgacgtgctggggagtcaggtcatacggtcgctgactacttgaagttcaaagacctcattttaaggatgcttgattatgaccccaaaactcgaattcaaccttattatgctctgcagcacagtttcttcaagaaaacagctgatgaaggtacaaatacaagtaatagtgtatctacaagccccgccatggagcagtctcagtcttcgggcaccacctccagtacatcgtcaagctcaggtctgtgctgctgcggttagattaggcttgggaatgttttgtgttttctttatgaagtgggattattttaaagtgttgattaaatttgttaatagagtggggagcagttactttacttaaatctgttctttgtagttagtagtaaattcatctcccccaaagctccaatatttagttacgcatgtaataaaatctgcttggcagttggaaatctgtttactaaccagcattttaaattacttcttaaatggaatttttgtccacattgcttgagttttcccctaccttaaccagacttcattgtattttagttaagtggtggacgagagagaacctggttttagtcagagaatatgaagactttgtgatatactttcaagttaatattagagattttgtatgtgtgtgtgtgagtactttcagttttaatggtatagcttcagagtataaatttgaacaaaatgaattttaaactcacagttgtattgttttgtgttgtgatatttcaggtggctcatcggggacaagcaacagtgggagagcccggtcggatccgacgcaccagcatcggcacagtggtgggcacttcacagctgccgtgcaggccatggactgcgagacacacagtccccaggtgagctcgcacgtggttcatttgcttgtgtcacctgccattctcaggtggagcagcactggatgccaggtgcctttagaatgaccgtatcatttaccctagaggttcatgacgttcctgtctaaggaaatgtaagtatttatcatagagaagcacattcttgcagttttcctcctccttgtctagaagtggctaacacttattgggggcataacagttgttgttttgaacagtttttttcctgtgtttatctcatttaccaaagcagcgttttgagcctcatgcttttttgattcccat

SEQ ID NO: 9251 - DNA, 6000 bp, Homo sapiens
aggccttgccctctgtacctctgaatctggctgttcatccatattctttataatatcctttacagtaaacatgagtaaagtgctttcctgagtcctatgagccgctatggcacattatcaaacctgagtagggtgttgtaggaacccccaatttgtagccgagtcaggtagaactgtgggtaccctccggatccacaacttgaggttgacatctgaagtggggcagtcttggaaactgagcccttaacctgtggggtctgtgctaactctgggtggtgtcagaatggagttgcatcattggaaactcagttggtgttcacagaagactggagaagtacatagcatggaaaatccatgcatttggtgtcagagaaacagttacccatttttaaccttcatattcaaaattccttaaatcccttatcctaaatatcttcgtgtgtgtgtgtgttgttcaaattgtatcaacatctacactaaaatcaaaagtgacaagaatgagattaggtgcataaggatttggaaagaattaaattaagccccaaattaaattgtttaaagttgatttaaaaagcagatggtgcttcttatagagcaagccttctgggatttatgaaacaaaacaaaacaatttctatctaacagggatggtattaaaaccctccatcttggtctcagaattggacagaatcatcactgacatctattaaaataagaaccacctactggttcttattttatctaggagcaaagcaagcaactatagctcgcactttgtaagaatatgtcctcctcactaagaagtgatgctgtcacaagtggtacatcacagtcctagccccagttactgagtgctcactatggatcaggcaaggttgcaggtgtctccctgtgtttatccattgaatcttcatgctacagatgagaaactgaggcaaggagatgtgaagtcacctatgcaagctcacacctattgtcaccagagtccaaggttagggtcacagatctttttggaaatctgaagaaaactagacaatttctttcttcctagggaaaaaacaaaaagcccagaacacagaattttatatacactttctgaagactcacaacacgctccctgccggtccccctgcccaggtttgggatatcactaatgtggtcacaccaggtgacaacggcacaaggggcggcagggaggttcttggaaataaaggaaaaagaatcctcctcaaacataacattggcctgtaaggacttatggcacaggtaggaaaagtcagtttaacaaggcaggaagactcccagacaggaagccctgatgtaaggaaacactcgatctgaagaaataacacatccgtcagatggcggggttggtcagaaatggaaaatgcaaagacaggttcaggaagatgaatgccgcagagcagctgaagccgtgggtccaccagctgcgaggcctgcgtccactcaggagcctcccttttgtctgctcccaggacatggacatgctggccacagggacagatttcccactacagattcattagtgagttaattaattacaaggctttcctatttctgcatcaacactgtgaatatagtaacacgatctgtgttcgttgaatgagtaactggagaactttaagctttctcatacatgtcagtattcacagacaagttcagtcataaagaaagaaaaacttctgtaacacgaaaatctgcttagtgataacattttaccttcatatctggatccatctggatatataaaagtgccttgaccgtgctttttatttctaacatattctccgatatatcgagcaccatttttaaatttgtagatcccctgaaacacattgattatatcattcatatcattgctgaatgtagcatttgctaacagagtattaaatagagaaaaccatccagtcaagtcaacggttctgacctggccatgtcttttaccgaattcgtagctcccttcgtaggtgtccccgttgggtagccgtgccctcccacgtccgtgcctttcgcctgcctcattccgacccccctcatattcctgggtaatgaaaattgacacaattacagctaccattcattaagcgctaaccaggtgctaagcattttgtaaatatcatacccttgagtcatcccactatgctaaacccccggcactatactcaattgtcccacctttcccaccttaaagttgaggtaggtaacaacgcctgggctagatgaggcactagaccaaggccacaccccagcacatgtccagggcggaagcctcgttccctccctccaacacagagcttgcaattcattgtgataatcctttaccctgtaagcaaggttaaccaatttgtgaaaaatgctagatactctaagctgtgttcttagtaggaacatgcttgaaatagtacatgcgggtagaacagttcaagtccacacaaatacctccccgtttgcttccttcagtaatccaggatttcaaaggcaaatgcccagagagaagcaactcttccctcaaatgatccctggggcggggtgtggcctgaagagacctttgccctgcaaggaatttccgatggaagggacaggttggagggcactgaggagtacacagggctcccttgctgattaagtttatcttatttttaagacccctagcaagagacttaaggttcgaacactcatgacccaatgctgcaataattatgtatctatctgtggtttgtttttgtttttgagacagggcctcactctgttgccaaggctagagtgcagtggcacaatctcagctcactgcaacctccgcctcccaggctccagtgatccttccacctcagactcctgagtagctgagactataggcatgcgccaccattcccagctaatttcaaaatttttttgtagagacaaggtctcactatattgccctggctggtctcaaagtcctggactcaagcgatccttggcctcccaaagtgctggaattacaggtatgagccaccatgcctgctcaattatgtgtctatcttaaaagtaaataaataaaaaatgtgatcaaagcttgcaattttcctatccttcagaaaataaatgttccttagcacctaatacatgggtatagagtgaatatagtaaataataaaatgctgaaagcatccagtaatgatttaacatgggtatctcataacatcacactgtatttcttaaatatacataataaaatttattaaaaattaaaattaagaaattgaattggatgtatatagacttattataacacaagtactgacacactacattgaggacttcagaaataaacgtctgtgcaattcttgcccttttctagcactgtttggaccactaattcctgcctagaatataaggtaaaaatctgcgacctcacagatttgtttcagggttagtttacatcaaaatgtacaaaagtcccctccttctatccaagaggcttcccaatacacccaacactgagccgctggggtggctgaataagacagaaatcctttaaaatgaccccaaatgtgatctgaacctaaaaattataggcactaaaaagttacaaatcagtggggccatttgaggagacaaactagaaatcttgctggtcaagtgttgcaggttgggttcacctagaaacagaccctgaacaagtgatttttttttttttttgagacagagtcgctctgttgcccaggctggagtgcagtggcgtgatctcggctcactgcaacctctgcctcccgggttcaagccattctcctgcctcagcctcccgagtagctgggattacaggtgcccgccaccatgcccggctaattttttgtattttagtagagacagggtttcaccgtgttgcccaggctggtctcaaactcctgagctcaggcaatctgcccacctcggcctcccaaagtgctgggattacaggtgtgagccaccgcgcctggcctgatttttttaagtgctctcctgggagaaagtagtaaagagggcagggaagtagacatgaaagggcaggcagctaaggaaggatgcctttgcaggtgaagtcccagacttggcctaatccaacagggactctgggggcatcaatcgcactgcagactttgtcctgcttcttgcactagctactggctgtctggccggatgtgaatttcaggcacttctggctctccatactgggcaggtagttccagcgcacagaggtgatagcttgagtagcaaatcaggcggaagctgggagatgagtgcccagagctagcaaaaaggtctgggcaggcactgacagcaccactgcagagtcgctagatttttcagttaattctgaaagtacctcaactctgtactgtgcatgcagaccatagtggctgaggttccctatctgtcagccatggagaggtcactctctggagtagggaggaactactctctgggtgatagaaatattcccacacagaacccagctcacaggctggatgtgccctctttctcctctctgctgcctaactcaggaaataactccaaagacctgggtcagttcagatggggactgaagaaagcacatgtgaggatacgcctataaggtaatatcttcaggaaccctctcctgagcccagggcctcctcagcatttcttggaggctgccaggaagcaactatcctccatgcatctaaatgccgggggagcaaatctcagctacagaaatgacttattcaagggcagtatggcagcgtgggatgatctgctcatccgagaaaactgcctcgatgggaattaacacagggaggaggaaacttccaaagccttccgctgggaaatctttgcctttaatgggaggcaggatgggggtgggggaagaacgaggcggcatgtggtaaccagacgtcacagcgtttcacttttcaccatcaacttccaggacgcacgcaggtgtgtctggcgtggccttcgtccctgccggggatcctggggagctgtggctcagacctctggtttctgcgcctcctcactctccaaacccaacctcgaggttcccccgccgctgcgcaccctgggaagccctttctcaccaggagctctcaccccaatatcattctctccctcctcctccaactcctccgagcccaggtccgacatggtctcgccccagcctggatcacagccgcagcgcctctagcaggtgggtagcaaccgcctccaccgccgcgtcccgcgtcgccatggagacgcggccggtcccgcctccctcccagcccggaagatggggagcggggacaggcgacgcggacgaagcgggaggagccactggcagcctttgcgtactgtcatagcaacgggaagggcacctcgaccaatcaccgcccgggaatacggaggggcggggcggaagggacgaggtggagccagtggcagcactctggtgccgtcatagcaacgaggggccgcttcggccaatcactgctcgggaagcgagggggcggggactgggcagggcctgagcgggttctgtgcctggctgcccaccggctctctgacctggacctcgccgtcgctggcccctgaaatccatcacttttgtcggctgttctgtgacgccacaacgaggagccacctgggtactgggccctcaagaggaaggacgcgggaaacgcgtccgggccaactctcgagagggtttcacccctgcccagtgcgggcactgcccgctcccttccgcccccaggcctcgcaggcccctccggggatgctgcccacccccacttacctttctaggctctgctgacccttcgggattcgcggctagctgtgatgtgtccgccaagatctcttctcttgtctgtaaacaacttcactctcaaggaggcagctctggcctctcagcaggtgcggcctacagtgatgtccgtccgggttttacatccttccccgacctcgacatgagtcccagccccctcgggcctctgactc

SEQ ID NO: 9252 - DNA, 6000 bp, Homo sapiens
agctgctcgtaattggcttatgccaagcctctcagcttcagcctgctgaccaggtggcaggggactggctgtgccacctcctcacccacagcgtttccaaggatgtgcatttctcctttgccctcaggtcttcagtaagttagctgtggaattcgaggcctcaagtggtggcctgcgccgtggcagcgtacccacaggtgccatttagtggcacttgcagtacgacctgggagcttccggaacctgtgggcttgtgaggtccctgttgatcctgtttgacctggagggccacagaggcggcttggtttttttgtggggacagagacgttgagcgtcacggtgggtgctaggcctgtaataggagcgattctgcattgatggcaccacgggtccagggaggcctcgccagctccctcccagagcaggaaggcgggctggccactcaccaggagcctgggagtctggcgtccttcacgaggcgctcctgaagcacctctgcctaccctgcattcgccacacgtgcccaggtacctggcgacggacagcagggagcccacaatgccagctcttcctggagacgcccgcccctgcggtggccactggtgttcagtatgtgactctctgagcgtggggttctagaccaggaaccctctgtgctcggtccacatgaaaagagcagcttctcgttcatcttcagagacctgttcttaatgggcagcaggggctccgaatgctgagaaaaccccacaggtggcagctgggtgcctggccctgcagccacgcctgcccgcggtcaccctagggtgcagcggtcaccctgggctgctgtggtcaggtggggtcttgtctttagcccccttcggtggctcacttggcgggaggagggtggcacggcggtgccattgcctcatctgggctcagggagacaaggcaggacctctgttctgtctcccgtcacctgtgttgtatacagagaaaaagccgtcctggcagccctcagagccccttgcctgttggggatggaggaagacaggcctcggagccttgttcatctggcatttccacagcagagggagggaggcccgctccccagggctgggtggccagggtgcatggtcatgctgggacatcattttctttttttcttttttttggtggggggcgggatggagtctcgctctgtcgctcaggctggagtgcagtggagtgatctcagctcactgcaagctccgtctcccaggttcacaccattctcctgcctcagcctcccgagtagctgggactacaggtgccggccaccacgcccggctaattttttgtatttttaatagagacggggtttcaccgtgttagccaggatgatctcgatctcctgacctcgtgatccacctgcctcggcctcccaaagtgctgggattacaggcgtgagccactgcgcccacccgggacatcattttctacttgtaaaccagaaacctccttcctccctcctgccgtcccataggattttatcgatcacctactgtataccaggcactggctaagccctgcacgcacagtggtgagcaggcagtcctcaccctcctggggctcgatttcccagaaccctcaagagaaagccagtcctcaggggtcagcaagttccacattcagcttcagctttcggccattcctgccgccaggccacgctgagagtctgccggggcacctcggttccctgcgcctggcctgccaggcctcagccgccacggcctgtgtcacggaggaagggggctgcagctgcacccccgggaggggaggttggagtcggggtggggcgggccgcgtgctgttggtgtagggtgggcgatggcagtagtggcagcttattaccacatcaggagaggccggagcgttttcagcaaggtcagaagcctgcgctgtgtttaaaatcagggcgagagggagacagggagggaacgttccgccgcctaaaccactttcccgccgcatctttcacctggagtggaggggcaagtgcctgggcccagtggtggcagcttcgggagggttccatgaggctgcctcgggaagcaagggtcccggcagagctgggtgttctcctgggccccctcaggacagcagcatccacttcaggcgccgcctctctaaggagccacacctccctctcgggccaagtatggaaacgagccacagcaccacgtgtgctagggccccagcatttcacccacgtggcagaatctgtgccccaaatgtcacagcccctccccacctcggaaatgcaggctgagtggaggccccggccctcgccactctggagcgatggctatttcaggctccaggaggccgctgagtggttcccgggctggccctgcattgcggctgggcaggggccacacgtccctcccccgtgggccctgggtgcctggaatctggagcagagagagagagggaaggtaacagcgtggcctgtacatccctgcctgcaggcgctggccttgctgtccctgggtgctgcctgtgtactccagggcactctctttcctggagaggaggccgcgggagtcatcgcggggcagatcctggaggccagcaaggccgcccctcctcctaagtggcactgattgacaggggagaaagacagaggcttgttccccagaaaagcacagaaaaccagccttgttcctcagacaggagatgcatgtgccgggaggcaggcagggggacggctgtgctcggcctctgtgcagtgggattattagggacaaattccagaacaaaacttgggtttcatctaagctttttggggatttggggaaagcagaagaaaagagggagcccaggaggaggtcaatacaccgtgccaggaaatgaggaaaagctcagatgtgcagtgtcagcgcttttccatgaatcacctcttacctctagaacagcaagtgcgggaggtgtccaggtgcgggggggccacgtgccctcaggggcttccctccccagcccgcctggagacatcatcactgactcagctccggcaggcaagggtccctcggggtctaccactgggattgacgccagcaagtcggaccctttctcagaagcccagagggagggcagagccgtagccacagtttggaggcatctgctgggctagtgcatgttttaacagcacctatgacaaggtgaggcagcatgggtggccctgcaggtggcggtttgcatatgtgcacatccagccagctccgttttccagtctggggactatggtgacaggaagtaaaaagcctgcgatttggcctacggggtcccagggtcatcccggggtcgcaccttggctaccaggcttgagggttctgtgtgcgatttcaggagagacacacagcccatcgcacacctgacagttgtcaccctaaagaaaattcggctgaactgtgcacattggggagcattttcattcacattacacatttcatttcacttcacgttttattggtttgagtaatggtttagaaactatcttttacttcaaaatgtttgtgcatctgagattttctgactttatatctggacagggcgccgtaatggtagacgatggccgaggttcagggaaccctgtttctgtggttcaggacaggtccagcctttctgagccctgtccccgcagagagccccctttccaggcacccgtgtcttgggtcgccgctggccctgtgaggtgacactctgcagctcttgcactgtccaggccaagggtggctgttctgaaacctactcggtttattccatcttgaatcaatgcattttttcaagtccgtgcctcagggtgcctgtagaatgacagatgtggcatttcaatcggtaaataatgagtacacctttaaggtccaggcactctttgtttagaacattgtggaatgcctacatcatctcatgcttgcacaggagcgtggctttgtcagaactcatccccaggcagccctgtgggcacctggtgggggctggacaggggtcacgaggagaagccagcaggagggtggtgggccctccaccttgtccccgcaggactcccctctctgcccagacacactcagcctccaccaggactcaggggttccagccaagctcctcttaccaacgatgccccgtgactgccccagggacgggagggctcaatgccattcccctgcaggccctgtctctccccagcttccagttggttgtcctgcagcctcaggtctctgatgggatgaagcaaagtcgagaacttacggtttgtctggctttattcttgtgagagtgggagtgacaagctctgtacatccccagcagaaaccagaattccacctcctacataactttgtaaattgcaaaatataatgaaaagtgcatgaggccaggcacagtggctcacgcctataatcccagcactttgggaagccgaggtgggtgggtcacctgaggtcaagagttcgagatcagcctggccaacatggcaaaatcccttctctactaaaaatacaaaaatcagccaggcgtggtagcccgcacctgtaatcccagctacttgggaggctgaggcaggagaatcacttgaatccaggaggcagagtttgcagtgagctgaggtcatgccactgcattccagcctaggggacaaaacaagactccttcttaaaaaaaaaaaaaaaagtgcatgagacattgatgaccagtttaatgaataagtatgcagcaaatatccatctgtttctatagagtaaaagtagttattataacgcgtagttcgttgtaagaaaattatgtctaggtcaacttagctgtgactgttttatgtgtgcatgcatgtatgtgtgtgtgtgtacatgggcgtgtgtgtgttttggagtgtggtccccacaaatctgccacccttggagaatgctcttctgccctggtgcatggctgtgccctagcatgggaagcgcctgctgtgtcctgcaggcccgcagacttgtcacaggtccattgtgcagtcatcaggccctgggagctttccacatccctccacctcccacccaacatcaccactctccggccagtgagaccatcacagcaccccagaggagacaaattctggagctcagagagctggggtaggtgacgggagggtggggggctggaggtccttggccagcagccttcccatcctgggccaccagcaccctcatcctcccctcgtcctgcccagctccacctcctccctgccctcttcctgccagggtttgcagtttacactggcagtgatgcagtggcagacacaacttggggaaataactctaggaccctggtctttagttccgattcccggtgagacagtacctggcggggagcttctcgccctcttcagaagtggcctgggggccctggggctactgatccagcccaaagctgcagtcaggagagcgtgcagccgtgtgggtctcataagagaggccgaccagggctgcccaagcggagcttctgtttggcctctacctgctggagtgacgcccccggcatctccagcgaggcctggaaacgtcgcagtctcctcttcactgagtccaaagtcacttccatctcgggcccgtccagtgtctgtcggggccttgattctgagatgagattgtttgctgaagtgctccatggactctttcaggagtgacgttgttctttcaggaactgtaaacggaggtggcatgtaaccagtgtggactaagaagccatgctgctgtttcttttcttttcttttttttttttttgagacagagtttcaaaaaaaactgcctcccgggttcaagtgattctcctgcctcagcctcctgagtggctgggattataggcgcctgccaccacacccggctaattttttgtatttttagtagagacggggtttcaccatgttggtgagaccatcaccatgatggtctcaagctcctgacctcaagtgatctgcccaccttggcctcccaaagtgctgggatt

SEQ ID NO: 9253 - DNA, 6000 bp, Homo sapiens; identical to SEQ ID NO: 1001

SEQ ID NO: 9254 - DNA, 6000 bp, Homo sapiens
cactaaagtggtctgttcttgctattttccctactttttttctcccctgctgagacggagtcttgctctgtcgcccaggctggggtggaatggaacaatctctgctcattgcaacttccgcctccctggttcaagcgagtctcctgcctcagcctcctgagtagctgggattacagacgcacatcaccatgctggctaatttttgtatttgtagtagagacggggttttgccacgttggccaggctggtcatgaactcccgacctcaggttatctggccatctcggcctcccaaagtgtggggattacaggcatgagccactgcacctggcctgttttccttactttaaaccagttttgacttgcccttctacctgaagtgaaatgtagacttattatcaaggcgtcggtgctttccaggatctggtccccaccgaggccattctttctcctcttcactcaccctagtcacactaattcatttttcactttgtgtaatatgccacattctctcttacttttcttacatttcctgtgctctcagcctggaacactcttttcctcctccttttgttttggtaactactatttatgcttcaggtcttaagtatcactactcccaggggctctctctaaatctttagaccatccgcctgtcttgtcttcttccctttctttcttccagatctattccataccgcaaacacatacaagagtagcataagacaccgcgttcttcccacctggatttcacagaggtcaagattttgcttcaaatccttttttgttacttaatttttgagtggttgatatagtcacatggttttaaaaataagtaaatataaaagggaattcagcgaaaggttttccttccttccatgccttctagcccctcaatttctaaaccagtgttattagtttattagttttttgtatactttttgagatattttatacatattcaagcaaatacaaatacatattcttcatccaccctttgtacacaaatagtaccataccaggcaaacgctttcagaacatcttggtttttctagtcttgacatatattttggagcactttctgtatatcagtaaatagagagctttttcattcttttatttatttgcacagtatcccgttgtttagatattccataagtcttttcaccattcccctattgtttgtttattcatttttaaatttatttttagagctagggtcttgctctttagcccaggctggagtgcactcgtgtcatcacagctcactgcagccttgagcacctgggctcaagtgatcctcccaccccagcctcctgagtaactaggcctatgattgtgtcccagcacaccctgcagtgaggtctcactatgtttctcaggctggtcttgaactcctgggctgaagtgatcctcccacctcagccttccaaactgctgggattaccgatgtgagccgtcttggccaccggtcccctatttattaatggacatttagttcatttccaaccttttttactatttacaaatggtagtttaataaataaccctgtacggtagtgtcccttcttatccacagttccagttattcagtcagtcacggtccaaaaatataaagtggaaaatttcagaagcaattcgtaagttttaaattctgttatgagtagcacgatgaaatctcatgctgtcccaccctgggcatgactcatcccttcgtctagcatgtccacacagtagataagttactttgctttgtagccatctagattatcagatcaaaaaacatagtatatagagggtttagtcctctgcagtttcaggcatccagtggggatcttggactgtatctcttgtggataaggaggcaccactgtacatgtctcattcacacatagacattttatctgtgatataaattcctgaaagcagaatgactgtttcaaagggtaatgtgatttataattttgataactattgccagattgccccccatgtgattttctaatccagtaacttgattaacttcatataaaaaccatatagtattttctgagaactcactgccagcttttctactgattgttttcagtagtatctcttaaaagtttggttctcagaccacctttgttgaataaacccttaacaatttgtgccagccactggatagagactgagccttttgccttcctagagcttacagtgacacaagtaaataaaatgaacatgaagaaaaatggcaagtagcattagctgttaaaaagaaaataaggataatttggtagagaaagactgtttgttggataggatgtattaattagaataggccaaactctgatataacagacccccaaaatatggtagcttaaagagtaccaagtttccttcatttttgtgcaacagtccagaataggtgttcaggttagtggctaggccgtcttccaggtcctgatctcctaccatcttgtggttccaccttgccctagggcctacttgtctactgtgtccagcaggcagaaggacttgggaggtattatcttgtgtgccaggctagcagtgacacaagctttcattcacattccattgacagcttagacatatggccatcagtaagtacaagggaggctgggaagtgttgtgtagccatgtgctcaggaacgagaagaatattgtgcacaaccagtagcttctgccacagttgttgaggcagcatcagccagagtggtcagggaaggctctggaactgaagcgatgaaaaagagacatccaagcaataagaaaatccaagaaataacatttctaggcagaagggagcagcgtgttactagtacactgaggcatttgagagattttgacccaggggaggaatggaaggcaggtcttctttgtttggaactcaggtagccagggataggatgggtggagaaagaggttagagaagtgggcattggccagatgatgcagatcgttgtatccatttgggtttattttgtttttctaagtgcagtgagaagtcattaaaggattttaaatagggaagtgattggatttgtgttaagaaaagattgttcctgctaccctttggagaagggcaaggatggaaacaaggagttcatttaaggggctgttgtgttagcgtaggcaagagatgatggggatgaagagaagaggccaaatttggaatctgtttcacaggtagactcataagttcttgctcatgggttggacagaggcattgttgagcagctaggtagatagtagtcctttattgaaagaagaaagatggagagaggaaggacatgagggaaaagtaaagacttccttttggacctgcccagaatactgtccagcccttttcaggaaatatttgctgacccctggcataaacagggctcccaaggaaggacagtggctagtgaaatagatgaacctatttaaggatataacttcctaaaaattgcagctttcatgatgaaattttttgcccttgaatgtatttgggattttgtgttataaaactgtcttaacacattaaaagtttcaaaaaccgtttccccctgattaatatgatgctagtttgttagtgtcatggcttttgatggaagattaaagcttggaaacagtcctctgaaaaatccttttaaaaatctgttctttcaggtgcgtcagcaatttcctgctcctcttggttggtcaggcactgaagctcctacacaggtcactgttgaaactcatcctgttcaagaaacaacctttcatgtagcccctcaacagaatgcattgcatcatcaccatggtaacagttcccatcaccatcaccaccaccaccaccatcaccaccaccatggacaacaagccttgggtaaccggaccaggccaagggtctacaattctccaacgaatagctcctctacccaagattctatggaggttggccacagtcaccactccatgacatccctgtcttcctcaacgacttcttcctcgacatcttcctcctctactggtaaccaaggcaatcaggcctaccagaatcgcccagtggctgctaataccttggactttggacagaatggagctatggacgttaatttgaccgtctactccaatccccgccaagagactggcatagctggacatccaacataccaattttctgctaatacaggtcctgcacattacatgactgaaggacatctgacaatgaggcaaggggctgatagagaagagtcccccatgacaggagtttgtgtgcaacagagtcctgtagctagctcgtgactacattgaaacttgagtttgtttcttgtgtgtttttatagaagtggtgttttttttccaaaaacaaagtgcaaagctgcttgaatcaggaggagattaacacactgaaccgctacaagagggcaaagctgattttttttttaacttgaaaagattgcaaagggacattgaagtgtttaaaagagccatgtccaaacccatcttcatggatagctcagaggtatcctctttttgctcccccattttaacttgccacatcccagtcacagtggggtttttttgtctttctattcagcaaaagttaatattcagatgttggtcttggtcatttgccaactaattttaaagtaaaaggcactgcacataatttgcataaagggccccatgagggtgttttttttttttctttttgtcccccccatccccctttttttttgttttgttctgttttgttttgggtgggagggtgggaaatttgggtttttaagtcctctaaacacacttgggcacggaaatgcagtactgtaaggaagagggacctccagcttccacaaacaccatcttcagctgtatgaaagggacggttgtggtgaagtttgtcaggcacagtaagcatgctgagtggcggggatcagaactctcctatctgaacctactgaggagcaaagcagcaattacatgggatcctgtggctctcccgttgcagaggccacaggaagataggatggaacgtgactggtctcctaaccaaggtgcactgagaagcaatcaacgggtcggtcgtggccagtcctggggaggtctgagtggtggtctttgggataacctttggccttatggatttggactcgaaattagaagagcctaccatttcagatgcaatcacttttggacatgcttttgcagacagtccttaatgctgaaaacacagagaatgggtaattcaagaggcctttcttttaaaatagacttttgtgacccactaattgtaaggtattgcaaggtcactttgcgtgtgtcataaagttgacttccttattggttgaaggtcacagaagtagtggtttgctttgatggaaatagctacagctgtgtcccttcctgctttttactttttcttttgctttttctcggcacgtggtatctccaccatttcttctgcacaaagatgtcttctgttcatcctgaacatttttaaaaaatgcagaattttatgtgactgcttttttgcctcacaattatgctgtgaattttacaaaaatttattttcttttttgataatttattgtaccaaagctgtttttatagcacatagatgtctgtaaccaataatgtagcagttctgcactttgacacaaggtgtaactagaccatttttaaatgtcagttgaaaattatggctgtactattgcttaaacaaaactggaactgttgttgaatccatagccaatacatttacagcaatctgtgtactgaacatagtagattgacatctaattcaagattacaacatctgttacattctaagtgtgttcaggcttctgaaggtaaagggacactggatccagaagctatggaaccagcagttgattcttgtattcctgattaacctacttgtaaacttgaaagcaagaccttgattgcaccaacaggtccagagtatgagtgcaagcaaagcagaactctcatgcgtgacctgagcagacaggctggtatttaacag

SEQ ID NO: 9255 - DNA, 6000 bp, Homo sapiens
gctctatcaggcatggtgatttcctgccagcctgtgcctttgacattcccaccagaggcagaaccttctgcaggtggccctggccaggctcctctctcctcccagctcctcattagcctcctttgccaggctaggaaaccgaggtatgcgaggttaaggaactttccttgggccgtgcagctgagagtgcgctttgcagggatttgcatccaggccgcgggactcacacaggccacacctgccacccccactgcctctggctcgtgggaggtgtgggatgtggcgggtggccggggcagtgctgggcaggcaggtgttggtattcacaacgttgctttcttgaccgattattttcctgggagacttcctcagtcaaagggttgatatgcttgcgagctctcgatgcacgctatcagattctccaaaaacgtacagccagcttcgcctgcacctgcagcttctgtgatttgtgctcttaattgacgtggcgctttttttaggttgagtcgtttttcattgccaacaatcttctcctgcattgaaataatagcttgtaaagaagcctcacgcttcctttttctctgttgactcttctaggacgcgctccaggagatatataatcagaagggcatgtttccaggggagcagtttaagcctgcccggaggccgtggaccctcctgaacttcctgtcctgggccaccattctcctgtctcccctcttcagttttgtcttgggcgtctttgccagcggatcacctctcctgatcctgactttcttggggtttgtgggagcaggtaatggacactgtcgctaacagctcacactctgacgggcctcacagtatcagccacagggtccgggacctggtgactcatcacagtggctgtgggaggcaggggcctggctgttatggaccctggagccaggatccccccacggcctgcgggcctcagagcctggattcttgcactgagctgagggtcgcctccccagagagccgaacggccgccacctggcgccatccccactgcagccccactggctggcgcccttgaggatgccgacgagagggtccccgagagggtccccagcccccctgtctgcttttgggctcttaggggtcaggctgggctggccattcgggaggtttaagcaggacatcatcattcagctcctccccattgacccccagtgacttccccactgtgtgcccaccccaggcacaatgccaggcccaccacgactcatcagctagcctggggccgaacagacacccagcctgtccctgtggtgagctccggcgcccacccacaccccgtaattgaggggtctctgtccgtggagacacagtccgtgtgcatcgccccgtgagccgactccccaggcccagcagctgggccagctcctcccctgctcctgccgcccctgccaggggccttggtgggaggggtcctgagaggcagtgactgccaccagcctctcccattggactacgagatgacttgaggccacccacagaggacaggatgtgacctgcttacatccgagggtcctgctcgtccacctctgtcacctgttgggtttgcaaggccgagctgttagaatgccccgaagcccttctgctcccaccagccaaagacccagaggggcaggcagggcaaggtccacgtgtccacctgcctcggacccagccggtcagaagacgtgcccctcacccctgcctgagcagaccacggtctgagagggctgtctccccgcgggccacacctactcactgacagcagaggccactgggtgcggggcagagggacagggtctggggcagaggaaggaagccccagtaacacgttttacagcaaaaaggcaaagtcatccgtctcacctcttctctctctctcctgtcttgaaagcttcctttggagttcgcagactgataggagtaactgagatagaaaaaggctccagctacggaaaccaagagtttaagaaaaaggaataattaatggctgtgactgaacacacgcggccctgacggtggtatccagttaactcaaaaccaacacacagagtgcaggaaaagacaattagaaactatttttcttattaactggtgactaatattaacaaaacttgagccaagagtaaagaattcagaaggcctgtcaggtgaagtcttcagcctcccacagcgcagggtcccagcatctccacgcgcgcccgtgggaggtgggtccggccggagaggcctcccgcggacgccgtctctccagaactccgcttccaagagggagcctttggctgctttctctccttaaacttagatcaaattttttggtttttaatcagttatcttgggaacttaacctggcccctcacctcttctgcaccccccgcccccgaaactgtctcgtaatgaatttctgctgtcctcctgggagtggacggccgggtcccgtcccccgggagcatcgctcggctcagcaccttggctcccagtgggggccccgtggagggcgcccgtagtgataagcacaccggcacgaacgtcaggtccattcctcgaagtcggagccctcactctgccctgtcctggggctggctgagggcgaacgccccacctcactttctagagccctgtctgtcctagctcctatctgaccttgtgtgtaaatacgtacatctgtttttaaagtggatgggcccctgagaactcagtgaaatgcagagttctccatgcacctaaagctcctttgtcgctctcatggctgtcagatcctggtccctccacactgggtgctggggagggaggaccctcggggctaccgcgcgcccccccatcccacagatcaggagccaaggagggagaacagggcagcctgtgggactctaggatgcttcagaagaagcgacggcaccgtcaaccctctgttttttaaaggtggttggagactgttaacactgagctcattgacttctagagattttatttttactggttgatctcttggtggttttcaacttcctgctggaaactagaggtggggcaccccccaccccccagcctcgcactgtgtccttggggaaggcccgcccccatcctggccggtgtcactgtggcccggccacccctgagcgcccagctccctacctcctggacgtctctgagagtccaggcagagcagagggcagcgctcggccggtcatgctggctcccttggccttgcagcgagcccctggcccacgccgagcgagggatgcttctccctacagcatgtccactcccccggcatggccaggtggggcccctggggcaatggcagtggtagaacgctcaacttggttgcggtaccatcagcccacctgcatttggctttcgacttgcttgttctaagtcacagcgccctcatctttttagcaaggtaaaaaaaccaaaatgggtgttatctctgatatcttgaaaccagcgttctgaatagaggtaggttgagttttctaggggaaaacaaatggagaaaagaggcatgaagaaaagtaaaccgagaacataattaggcatcgggcctaagtgtcctggggagattggaggggacggcagcgttctgcatgatggaggcgctgccgggccccgggtctgtgggggccgtgctctcagggcgtgtgcgggacgccacctgtgcacacctgctcagagcacggctcctcgcaggggtgaaggggcagaccaacgaaaccagatgagaccaacgacaccatgcgagacacgcttgcagacactgttgttttggaaatgtgcttccctccatctgaaatctcatccctccacccgcccactcgggcagctgtgccgtgggcagggcatgcgctcccctggctgagcaccccagagattctcctgcaccttcctcatgccgcacgctgctcatccgtctccatgtgtgtttagatccatgccattcactgactcactaacacctgcaaaatctttaaggaaaaaagctgaagggtacgaccatgcacatatgtgacctggaaaatgcaaatttagatcttttatgatttaattattattgtttcccatagaagttccctccctttgaaattaatatataatgtataaattctgcactgagccatggcggagctgggcagcccctaggttagagtggagacggaggcccaggcgcaggggtcacacctcatctggtttccttcccatctcacagcttagcttgtgcttctcaacaccaagtctttaagagcaataaaaactacaccatgaatgtttgaattttttttttttgggggggggagggtggattttgcttttcatccagaaggaaaaggggaggagagctcctttacattttttaaattaaattcataaatcccagaacagtcttttttttttctttttcctttacaccctacttctgagcttaattcagttgatgttatgtccaaattcaggctgagtgctcaggctgaagcaactctgtagcccacagtccgtgctggccactgtcggggtgaggcacattctaggcctggcatcgctgatgccctctgcacccagtccttgagccaggccgaggacaggaagggcattgctggcctgtagctcctgttacccacccagagccaggcgccacactggaggctcccaggcgggagggcccaggcccacccacgggcgtctggccggtcaagctcccagcctgggccgtggtctcctggggacgccgctggcctcccagcttaggcccaggtgccaggtgtcatggggtctcctgcccatcttcccaaggatgccattgctgtcttcatcgtcttcccccgtgtgagacactggttgtctggtactcggcgacagtgtaccagacgcgcaccctatgtgaggtgctttaaggtccctgtcctcaggaagcgcagtctggtggaagagatgagcgctgaacaaatcactaaataacacaaaacaacaatgtaagcagcactttcttgtgtaaaaaaaaaaaaaaagcacgtcctgtcgatgaattttgagtctctctgccttgcctgtcccgactccctttcgcgcaccgtggcatgagaatctttcctcacgctgttcgttgcggtattgctgagcattgatgttgatttgaaggaaaagccgtggttggacccagctgtgtgtttcactcacgtgcaattgagtagctgttgccaggctgtccatgcctgttgtgactaccggttggggtcagatttggggtgaagaatgagtaagtttctgcatgctttgtctctacctgagacacttctacaacaagccaagtataatctctccagccctgcagattttcacctgacttgttcagccccatgcgtagactcccgctgcaggcctctggcctgtggctcactgcatgcagcccctggcgtgcaatactagtgctccacggcgcgatgtgcttctagcccttgcactgcacctaggctcagggttcaaacggccagcccgaaaagcctgcctgccttctttctggaaacagcacgtccccggccgtgtgcctgcccctttctctactgagctagtccccaaaccaaaggcaagccccctcgggcctcgggggatggggccggccacacccctgactccgccctggctctgccccatacccctgccgtggggccgacctgggggatgcagacatccggctccgtattcctgcctatcggggccaggatgcaaaaacaatttttgcgtaaaagatgtcacactgatctgctggagtggggtggacacatgaattcagttttatcatgaacactcgccactggctgcttgttaattcagggataatggtggcattcttacaaactgctcgggaaatagaatgacgggaacacttttagggagcccaggaagttaccagggacattggtgtcgccggcccaggcaacagcagcgtacgcttttcaaagatcattgagttgtcttagaatttgaagc

SEQ ID NO: 9256 - DNA, 6000 bp, Homo sapiens; identical to SEQ ID NO: 1003

SEQ ID NO: 9257 - DNA, 6000 bp, Homo sapiens
cggtcgggtgctgtggctcatgcctgtaatcccagcactttgggaggccgaggtgggcagatcacctgaggtcaggagttcaagaccagcctgaccaacatgggtgaaaccccgtctctactaaaaatacaaaaaattagctgggcctggtggcgcatgcctgtaatcccagttactggggaggctgaggcaggagaatcgcttgaacccaggaggtgggggttgcaggagccaggatcgccccattgcactgcagcctgggcaacagagtgagactccaactcaaaaaaaaaaaaaaaaaagaaagaaaaaaaaagaaagaaaaaaaaaaagggaaatctccaggactgaaaagggaggtggggctgagactcggtcctgggcctgggagccagcagcaccatgcccacctggtgctttctgcctgccccatcccctgaagtctcgtgctgtgatgcctacatggaaacagaagataaagatttcccctcattcaaggcgggacgttagaaccaaaaaccccacatgatgctgggaccctctaagaattggaccctcaggaaggttaaactggaaaagaaaattacctcccagcacagagaaatggccttgaaacctgcctttctcctcttgggctcaagaaagtcttcctgggaattcataattacaggcctgtcctccaacaggcttgaagtttgaatttatacaaacaacatagttcaagaagcacacagccaaaatgtgtgtgccaggacactcggggacattccggaggcagggagctgggtgctcaggggtggccaggacacgatgacacctgcctttgcacggacacagtgtgtggctggcagggggcaccccaaccccagtttccagcaggaagctgagaaccatgaagagatcaaagagatcaactagaaaaaatatcttgaagccagtgagctcagtgataacagtctccaaccatctttaaaagagagcgggtcggccaggtgtggtggctcacatctgtaatcccagcactttgggaggccgaagtgggtggatcacgagatcaggagttcgagacaagcctggccaacatggtgaaaccctgtctccactaaaaatacaaaaattagcgcagtagtgggcacctgtaatcccagctactcaggaggctgaggcaggagaatcgcttaaacccgggagacagaggttgcagtgagccgagatcgtaccactgcactccagcctgggcgacagagtgagactccatctcaaaaaaaaaaaaaaaacaaaaaaaaacgagagagttgatggtgcccttcactacttcccaagcatcctagagtcccacgggctgccccgcccacgggcagtggctgcggagtgtctgctctatcaggcatggtgatttcctgccagcctgtgcctttgacattcccaccagaggcagaaccttctgcaggtggccctggccaggctcctctctcctcccagctcctcattagcctcctttgccaggctaggaaaccgaggtatgcgaggttaaggaactttccttgggccgtgcagctgagagtgcgctttgcagggatttgcatccaggccgcgggactcacacaggccacacctgccacccccactgcctctggctcgtgggaggtgtgggatgtggcgggtggccggggcagtgctgggcaggcaggtgttggtattcacaacgttgctttcttgaccgattattttcctgggagacttcctcagtcaaagggttgatatgcttgcgagctctcgatgcacgctatcagattctccaaaaacgtacagccagcttcgcctgcacctgcagcttctgtgatttgtgctcttaattgacgtggcgctttttttaggttgagtcgtttttcattgccaacaatcttctcctgcattgaaataatagcttgtaaagaagcctcacgcttcctttttctctgttgactcttctaggacgcgctccaggagatatataatcagaagggcatgtttccaggggagcagtttaagcctgcccggaggccgtggaccctcctgaacttcctgtcctgggccaccattctcctgtctcccctcttcagttttgtcttgggcgtctttgccagcggatcacctctcctgatcctgactttcttggggtttgtgggagcaggtaatggacactgtcgctaacagctcacactctgacgggcctcacagtatcagccacagggtccgggacctggtgactcatcacagtggctgtgggaggcaggggcctggctgttatggaccctggagccaggatccccccacggcctgcgggcctcagagcctggattcttgcactgagctgagggtcgcctccccagagagccgaacggccgccacctggcgccatccccactgcagccccactggctggcgcccttgaggatgccgacgagagggtccccgagagggtccccagcccccctgtctgcttttgggctcttaggggtcaggctgggctggccattcgggaggtttaagcaggacatcatcattcagctcctccccattgacccccagtgacttccccactgtgtgcccaccccaggcacaatgccaggcccaccacgactcatcagctagcctggggccgaacagacacccagcctgtccctgtggtgagctccggcgcccacccacaccccgtaattgaggggtctctgtccgtggagacacagtccgtgtgcatcgccccgtgagccgactccccaggcccagcagctgggccagctcctcccctgctcctgccgcccctgccaggggccttggtgggaggggtcctgagaggcagtgactgccaccagcctctcccattggactacgagatgacttgaggccacccacagaggacaggatgtgacctgcttacatccgagggtcctgctcgtccacctctgtcacctgttgggtttgcaaggccgagctgttagaatgccccgaagcccttctgctcccaccagccaaagacccagaggggcaggcagggcaaggtccacgtgtccacctgcctcggacccagccggtcagaagacgtgcccctcacccctgcctgagcagaccacggtctgagagggctgtctccccgcgggccacacctactcactgacagcagaggccactgggtgcggggcagagggacagggtctggggcagaggaaggaagccccagtaacacgttttacagcaaaaaggcaaagtcatccgtctcacctcttctctctctctcctgtcttgaaagcttcctttggagttcgcagactgataggagtaactgagatagaaaaaggctccagctacggaaaccaagagtttaagaaaaaggaataattaatggctgtgactgaacacacgcggccctgacggtggtatccagttaactcaaaaccaacacacagagtgcaggaaaagacaattagaaactatttttcttattaactggtgactaatattaacaaaacttgagccaagagtaaagaattcagaaggcctgtcaggtgaagtcttcagcctcccacagcgcagggtcccagcatctccacgcgcgcccgtgggaggtgggtccggccggagaggcctcccgcggacgccgtctctccagaactccgcttccaagagggagcctttggctgctttctctccttaaacttagatcaaattttttggtttttaatcagttatcttgggaacttaacctggcccctcacctcttctgcaccccccgcccccgaaactgtctcgtaatgaatttctgctgtcctcctgggagtggacggccgggtcccgtcccccgggagcatcgctcggctcagcaccttggctcccagtgggggccccgtggagggcgcccgtagtgataagcacaccggcacgaacgtcaggtccattcctcgaagtcggagccctcactctgccctgtcctggggctggctgagggcgaacgccccacctcactttctagagccctgtctgtcctagctcctatctgaccttgtgtgtaaatacgtacatctgtttttaaagtggatgggcccctgagaactcagtgaaatgcagagttctccatgcacctaaagctcctttgtcgctctcatggctgtcagatcctggtccctccacactgggtgctggggagggaggaccctcggggctaccgcgcgcccccccatcccacagatcaggagccaaggagggagaacagggcagcctgtgggactctaggatgcttcagaagaagcgacggcaccgtcaaccctctgttttttaaaggtggttggagactgttaacactgagctcattgacttctagagattttatttttactggttgatctcttggtggttttcaacttcctgctggaaactagaggtggggcaccccccaccccccagcctcgcactgtgtccttggggaaggcccgcccccatcctggccggtgtcactgtggcccggccacccctgagcgcccagctccctacctcctggacgtctctgagagtccaggcagagcagagggcagcgctcggccggtcatgctggctcccttggccttgcagcgagcccctggcccacgccgagcgagggatgcttctccctacagcatgtccactcccccggcatggccaggtggggcccctggggcaatggcagtggtagaacgctcaacttggttgcggtaccatcagcccacctgcatttggctttcgacttgcttgttctaagtcacagcgccctcatctttttagcaaggtaaaaaaaccaaaatgggtgttatctctgatatcttgaaaccagcgttctgaatagaggtaggttgagttttctaggggaaaacaaatggagaaaagaggcatgaagaaaagtaaaccgagaacataattaggcatcgggcctaagtgtcctggggagattggaggggacggcagcgttctgcatgatggaggcgctgccgggccccgggtctgtgggggccgtgctctcagggcgtgtgcgggacgccacctgtgcacacctgctcagagcacggctcctcgcaggggtgaaggggcagaccaacgaaaccagatgagaccaacgacaccatgcgagacacgcttgcagacactgttgttttggaaatgtgcttccctccatctgaaatctcatccctccacccgcccactcgggcagctgtgccgtgggcagggcatgcgctcccctggctgagcaccccagagattctcctgcaccttcctcatgccgcacgctgctcatccgtctccatgtgtgtttagatccatgccattcactgactcactaacacctgcaaaatctttaaggaaaaaagctgaagggtacgaccatgcacatatgtgacctggaaaatgcaaatttagatcttttatgatttaattattattgtttcccatagaagttccctccctttgaaattaatatataatgtataaattctgcactgagccatggcggagctgggcagcccctaggttagagtggagacggaggcccaggcgcaggggtcacacctcatctggtttccttcccatctcacagcttagcttgtgcttctcaacaccaagtctttaagagcaataaaaactacaccatgaatgtttgaattttttttttttgggggggggagggtggattttgcttttcatccagaaggaaaaggggaggagagctcctttacattttttaaattaaattcataaatcccagaacagtcttttttttttctttttcctttacaccctacttctgagcttaattcagttgatgttatgtccaaattcaggctgagtgctcaggctgaagcaactctgtagcccacagtccgtgctggccactgtcggggtgaggcacattctaggcctggcatcgctgatgccctctgcacccagtccttgagccaggccgaggacaggaagggcattgctggcctgtagctc

SEQ ID NO: 9258 - DNA, 6000 bp, Homo sapiens
gccgtgggctctcaggcaggaagtgagggctatgcaggaggtgccgaggccatctggctggcaggctgtcggaaggcacctggctacctctttttcttagcttgagctgtgtgacgtgccactctcaccattctgacccatagcaatggcagcttcccacggtttaccagagcatatgggaatgtttaaacaaaagtaaagagaatgttgagttctgtttacccgttaccaagctccaacagctccctacatggcccctcgtgtgtcctgcccacactgcgccaacaccagagcatgctgacgcgtatttcagcatgcatccctgaaagaaaaggtgtcctgcctccctgcgtatcaaacacatgtgtagctgtgtgtctgtccgtatgtgcctctgtgcgtatgtgtattatacatagagaaaccgatctgtacctgtcatgtggacagagactcagaggcttggtaacaacacccactgtggacaggtaaccgctcacaccgggcgtcgtggggacatgaacaggcgcatctctggagggtggtttggcagtggccgtcaacagtttaagtggttgcaattttcaactcagcaattccacagaataacatgcaacctacagagatgtgcaaaagtatgcaactggacaggtgttctcattttatcacaggtattctcattattgtattatttttatagtagcacaaaactagaagcaacccaagcacctgtcactggagactaattatgcggcacccatacagggaccctctgcggccatcatggagagccttcatcttgcccgtacagttttaagcgaaaaaggaagtatacaacaaagtccatagtatgctatgattcattttgtgtcttaagaaaggatgctgtgtgtgtggtgtgtacatgtgtggaaaaatcccagaaggggctgggcatggtggctcatgcctgtaatcccagcactttgagaggctgaggcaggtggatcacctgaggtcaggagttcaaggccagcctgagcaacatggtgaaaccctgtctctactaaaaatacaaaattagctgagcatggtggtacacacctgtaatcccagctactcgggaggctgaggcaggagaactgcttgaacctgggaggtggaggctgcagtgagctgagatcacaccactgcaccactccagcctgggcaacagagcaagactctgtctaaaaaaaaaaaaaaagaaaacaaaaatctcagaaggatgcccgagaaaactgcgtgatgctgatatccagggagtggggaaaggaggggattcttacgttttatttcacactctcatgctgtttccatgtttttgcatgagcgcatagacacttcgtctcatatgggaaacggtgagcgcatagacactttgtctcgtgggaaacggtaagcgcgtagacactttgtctcacgtgagaaatggtgaacccacatacactttgtctcatatgggaaacggtgagcgcatagacactttgtctcatgtgggaaagggtgagcacgtagacactttgtctcatatggaaaacagtgaacgcgtagacactttgtctcgtgggaaacggtgagcgcgtatacactttgtctcatatggaaaacagtgagcgcgtagacactttgtctcgtgggaaatggtgaacccacatacactttgtctcatatgggaaacggtgagcgcgtatacgctttgtctcatgtgggaaatggtgagcgcatagatactttgtctcatgtgggaaatggtgaacccacatacactttgtctcatatggaaaacggtgagcgcgtatacactttgtctcatgtaggaaatggtgagcgcatagacactttgtctcatatgggaaatggctggcctgtaaccttgtctgcacgatctccttccagttcaggagccggtagcactgctgaaaaggctgtttatgtcagctaacttttcatgcctgcgacaccccactgtctgcagagagactagtaacccagcccttagactagcttgtcttaaatgtgttatagcttcagttcctggtttgttttttctctttttttttttttttgagactgagtctcgctctgttgcccaggctggagtgcagtggtgcgatctcggctcactgcaagctctgcctcctgggttcacgccattctcctgcctcagcctcccgagtagctgggactacaggcacccgccaccactcctggctaattttttttgtatttttagtagagacggggtttcactgtgttagccaggatggttttgatctcctgacctcgtgatctgcccacctcggcctccgaaagtgctgggattacaggcgtgagccaccgcgcccggccagtttgtttccttttttaaatgaaaggctgctgcttttttctgtgggaagggagaattggaaatcctataatataaaatatacaaatgagttattcatgagtataactggataagatgaatacatacaaaaagggcaaatattaactgatgaaaactaaattacagactcctactttctagcagtattctgaagctaaaatactacaaaacagctaaatcctgcctgaaactggctttttaatgcatttctgggctcacagtaaggaaacaaaaacctctcagctccacccttccaccaaatccctttagcaaaaaccggggtgtgcagaaatggaatgtcagcactgcctttcaggagcctaacccttgggcagctgtagcagagggcgctgaagctaaaccaggactcttgagcgagggcgcgagacaagctagggttaacagtgacccttgggtttcagcagaggcaaacgaaagtacactctggagaaagtctcattcaggcctgaagaatcccacagattaaggaaaattaaatatgaattcataatcaagaatgacaacgtaaacagcagatgtggactgaagatgacccactgtgccccgacttgaaagagaaccaagtagaactgctctcagtgagaactgtagatattttaaagcaaaaacttacagacaggttttgtatcagattagatacagttaatgagaatgggtacagaaccaagtagaactgctctcagtgaaaactgtagatattttaaagcaaaaccgtatggatggattttgtatcagattagacacagttaatgagagaatgggtacaccagacatcaatgtgaagaaatcatccagtgacagtaaaggaggtgaaaaatgtgaaataggcgtgaaaagatgtaaggacagaatgagaaccttcataaaatagggctttggcccccatccccaaaggagagaacaggagaagcctcctgggaagagaggatgcctgaggacctcctgaactgatgaaggcacgatttttcagatacaggaagcacatgtagaccaagcagagcgaatgcacagaaatccacacctaggcaggccctggggcatcacagaccatcagagacaaggaggagccgggcgcggtggctcacgcctctaatcccagcattccaggaagctgaggcaggaggatcccctgaggtcaggagtttgagaccagcctggccaacatggtgaaaccccatctctactaaaaatataaaaattagctgggcctggtggcacatgtctaatcccagctactggggtggctgaggcaggggaatcatttgaacctggtcggtggaggttgcagtgagccgagactgcatcactgcactccagcctgggtgacagagtgagactctgtctcaaaaaaaaaaaaaaaaaaaaaaagataaggaagtcttcgaatccccggagaggaaagctggagaaccacgctggatggtcagcagtgaggccgacagcagatttcttacggcaggcagcagtggcgggagaaggtggaagatcctcaatgtgctggaaaatcaccaacctagcaccctgtgttgttcaagagtacaaataaaataaaaaggttttggtaaacaaaaaaatgagagcttttactgcccatagatcttcacttcaatattttttaaggatgtgtttcagtaagaacaaaaattataaaagtagggtataattttcaagaaagaatggtagccaaagaaattaggagatggatgaatctaaaccgtatgtaaaataaaaacagtgctcagccgggcgcagtgggtcacgcctgtaatcccagcactttgggaggccaaggtgggcggatcacctgaggtcaggagttcaagaccagcctggtcaacatggtgaaaccccatctctactaaaaatacaaaaattagcctggcatggtggtgggcacctgtgatcccagctcctcaggaggcagaggcaggagaatcgcttgaccctgggaggtggaggttgcagtgaggtgagactgcaccacgctcagctaattttttgttttgtatttttattagagatggggtttcaccatgttgcccagactggtctcaaactcctgacctcaggtgatccgcccacctcggcctcccaaagtgctgggattacaggcgggagcgcccagcccaggttcagattttaatggtaactttgttaagtatagggtaggaaaaaagagagatcaaacatagcttccaaagtattagaaaaagataaagaaaaaaaggtaaatctcttttgttaatgcaagaaagtagaaagaaaagcattaaaataagaaatattgaggtatacattaagatcaatataaaattcccagatacttgggatgaccacaaatacacaagaaaagcacttcagtaagaacagaaataatcggcctctccatctgctgggcttgcgtgggtatgtgaattccgtctgtgacttgttggatttgggatgttctccacttagatttatttccatgaatatgtttgtgggagcctttctgcagtcagaggtatgtggaagcctttgccagttcaggggcgcatggtgagagcagacctcacagtgggtttgtttatgtttgtttgtttttgagacagggtcttgctctgtcgcccaggctggagtgcagtggtgtgatcttggctcactgcaatctctgcctcctgggctcaagcagtcctcctacctcagcctccttgagtagctgagaccacaggtgtgcaccatcatgcccagctaatttttgtattttttgtagagacagggttttgccatgttgcccagactggtctccaactcctaggctcatgtgatcctcctgcctcagcctgctgggctgctgggattacaggctgagccaccgcaccagccacagtgttttctgatgaccctgaaccacggttttattttcaattcttcattcctgttctcattccttaatgctgggtgccttcttgctgcccattttgaactcactgccagtgtgtctctgctgtcatctgatgtgcagagctataggtgctgcggcgaagggtgcaggtttggagccgtttaaacaacctggcccagcctcctcactccctgctgaccttggtcaaggcttcagtctctaaacctcagctttctcatctgcagagcacagacaaaaccacctgcctttgagctgtcttataaagcctaaatcaatgcgcacagcaggtacacagcaatgcttgataaattgttactattattgggtgaattttaggttttttttgttgttgttgttgttttgagacagagtctctctgttgtcctggctggagcacagcagtgcgatcttggctcactgcaacctccatcttctgaggttcaagtgattctcgtgccccagcctcccaagtagctgggattacaggtgcctgccaccacatccagctaattttttttatttttaagtagagatgggcttttgccatgcttccccagctggtcttgaactcctggcctcaagtgatcctcctgtctcggcctcccaaagtgctgggattacaggcttgagccaccgcacccgtccagaattttagattttttta

SEQ ID NO: 9259 - DNA, 6000 bp, Homo sapiens
tgccatttcctagacaagctgcgtaagcaggatccaaaacgttttcaccatctataaaatgggggaataccaagcccatctacatctcgagtcatcctaaaactcaaaataaaaatgaaaccatatatgtgcaaccagttaacaaatcctaaaattgaaatgaccataaaccactattttggagatgtgcaagtggctggaaattattctagatatgaaagaaagtgtgtcttaatatgtttagaagattcagaattgtttaaaatgtcaaaaagttgggggcagggcaccaagcgcggcggctcacacctgtaatctcagcactttgagaggccgaggtgggtggatctggaagccaggagtttgagatcatccttgggtaaatacaaaataaacagagggtatttctctgctgctgtgcaaccttacagtttacttataattaattttttttccttttttctccttataattaattttccatgcagcttttcaattttctctcaccaagttgtgtcagttttggaaatctatttcaaaatttttctagatataaaaaaagatgcttagaagattcagaattgtttaaaatggcaaaaaaaaaaaaagtgggggttggtggtgccaagcaaggtggctcacacctataatcccagcactttgggaggccaaggcaggaggatcgcttgagctcaggagttcgagaccagcttgggcaacatggcaaaaacctgtgtctacaaaatacaaaattagctgggtgtggctgtgtgcacatgtagtcccagctactcaggaggctgaggtgggaggattgcttgagcctgggaggctgaggctgtactcagccatgactgtgccactgcactttagcctgggcaacagagtgaggccctatctcaaaaaataagcaaataaataaaataaaatggcaaaaaaaaaaacaaaaagcagaaaccatctgaattatattcagagtctagagtttcccaagtatagttgaccctagaactttttatttgtattacatctgttaacacccacacttcagaaaacacaggttttgcagtttaatttctcatagaatataaagtttataaaggtaggcactgtgtcttgtatcctgttgtagcctcagtgaatagaacagctggctacatgtaatagctgctcaataaattgtgttaaataatgtgttgaatacttttcattaggcttatttgaaaatagtctctgaaagtttgcagagtagagtgaaacaagggttttcatgtgctgctacggaaagtataaattggttaaaattttgaaaagcagcttggcctcatgcatcagaggctcttagagtactcatattctctcaccaagttgtgtaaattctggaaatctattcggaaattttcctaaatatgaaaaaaaaaaatgactgggcatggtggtgtgcacctgtagtcccaactacttgggaggctgaggtagaaggattgctttagtccaggagctctcagctgtagtgcaccatgccggtcaggtgtccacactaaattaagcatcaatatggtgacctcccaggagcaggggaccacaaggttgcctaaggagaggtgaaccagccaagtcagaaacagagtaggtccaaactaccatttttaggccgggcatggtagctcatgcctgtaatcccagcactttgggaggccaaggtgggcagatcacctgaggtcaggagttcaagaccagcctggccaatatggcgaaaccccatctctactaaaaatacaaaaactagctgggtgtggtggcatgcacctgtaatcccagctactctagaggctgagataggagaatagcttgaaaccaggaggcagaggttgcagtgagtcaagattgggccactgcactccagcctcaaagacagagcgagactccatcccaaaaaataaataaataaataaatataaaaataaaataaaactcccatgctgatcattagtgggaatcatgcctgtgaatagccactgtactccagggcaaaagagccaacaccatttcttttttttttaaaaaaaaaaaaagaaggctgggcacagtggctcatgcctgtaatctcagcactttgggaggccaaggcgggtggatcacctgaggtcaggagttcaagaccaacctggccaatatggtgaaaccctgtctctactaaaaatacaaaaaaattatctgggaatggtgtcacatgcttgtaatcccagctacttgggaggctgaggcaggagagtcgcttgaacaacaagagcgaaactccatctcaaaaaaaaaaaaaaagaaagaagagaaatatatgtctaaatatgcttagaagattcagtattgtttaaaatagcaaaaagaaaaaaggaaatcatctgaattatgttcaaaaatcatagaataattaagttgcagaatattcacttgatggactaccctgcagccattaaaatgatacttagaaacttttataatttggaaatatgcttatattataagcatgaatgcataactcatatgtaattttgcatccttttctttcttgcattaaagaaaatggcaaaataccaaactgtataaagattgttaatctgcatgtataataaaagcaaacaaaataaagagctaacataaccgggtgtggtggcgtgcacttgtagtcccagctacttgggaagctgaggtgggaagactgcttgagcccaggagttggagacaagtctgagcaacatagtgagaccctcatctctaaaataaaaaaaaatgttgtattagccaggcttggtagcatgtgtctgtaggcccagctactggggaggctaaggtggaaggattgcttgagcctaggaggtcaaggttgcagtgagtcgtgatcacacaactgcactccagcctggtgacagagcaaggcattgtctcaaaaaaaaaaaaaaaagactaaattaataagcaccactctctcaggcaattgttctaagcactttacatgtatacctttttgtttcttctaatgacctataggcagatactattataatacccattttatagataataaactgaagcacagagaagttatataattgggccaaggaactgattgggattcaggccagggtagttcaggccacagcctaaacaaatattgagaaacaagacaccaaaatatttacaacaattgcctccgagtggaagaaaagaggacaattactttctttatctttctctacgttttaaaaagtttttagggggttgggtgtggtggctcacacctctaagctttgggaggctgaggcaggcggatcgcttgaggtcaggagttcaagaccagcctggccaacatggcaaaaccccatctctactaaaaagagaaaaattagccgggtgtggttgtgtacacctgcagtcccagctactcgggaggctgaggcaggagaaccgcttgaactcaggaggcagaggttgtagtgagctgagatcacgccactgcactccagcctgggtgacaaagcgagactctgtctcaaaaaataaaaattgtaataatgagaaaactgctctctaaaagggcaaaatagtgaattaacgtgtttctataataaatctgagcagagaatttttcttttaagttgattacagaacccccactattacaaccaggaatactgacccttgctctgccagccagtctcttctctgacagaggagaaaattcgaccaagttctatttagagagaatgggttgaagataggttgtttttatggatgcagacaaactatatccaaggctagtacccagttctcagtttcaatatcaaatttgctcaaacccgggttctcctattttaggcctgatgctcagatagccactctgccctagccagaatcaagaatctaggtaccagaatcccatatgccctcacaaaccaacagctcagttctatactcaggtgagatgggggagaggggaggggaatggagggccacagggattctttgcttttgcttggccaaactttagtgagacttctgaaccttctcgtagtcctatctatgcacctccttgtaaagtccagttttagcaaaactgctaagtcagtttagccagaacccccaatcttcgacaaccgatcatctttgatatctgatcagggtcttcatccttcaccatcccccaggtgatgtctgatcaccctggcctgtcttctacaagattcctctaggtcattttagccagaatccctcttaccccagtttcctctaagtaattttctatccactgacccccgcactgctccttggccataaattcccatttgcccattctgctttcggagttgagcccaatctctctgcccactcccagaccctgttgcactggtcctatacccatcgctatggtcctgaataaagtcttccttatcatgctttaataagcatcactgaataattctttatttaacaatgggtagtcatggcccaggtaagagagacgtggtgtccgctcctggagctgcaaggctcctgggggctttttgttttgttttggttttgtctttgtatgcaacgtgagaaaaagccattgatgcaggctttagcatgctgggaaggaagtgtaaagaagccagtgacgctggtaataactgtgaaatggaacaaatgccaccatatttatctaaatgtaaattttaaaactggggacagcaaatccattctacagtgagcgccgcttggccagtaacaatgacttcattttcagatgcagtcgaagccctgtggctccaccccgagggtccagcccttaccactgctaagaactacaactcccagcccgagggaggtctctgcgcctgcggcctgacgccctacgcctacacttcccagagaacctagcggttacgccaacgcgcgcgtgcgcccttgcgcgtttctctcttcccactcgggtttgacctacagccgcccgggagaagatggctgccccagcagtgtccgggctctcccggcaggtgagagaaaggtggtcctgagagccagtgggaggatccctcctgggatgaccggtaccaaacctcgagcaccagggtgcgatgcttcggctggggaagtctggcagtcttcaaggttatgggacctggcgagtgggagcgactcaggacgacccagcgtttgtcccccgggatgcctacggggcagtaggcgcggggctgcgcgtgccgtaaccttggcgtcttccgagcacagcccctggaagctgctagcctgaggggcgcaggagagggggtctgcccttcgctgaattccggggaaggggcatggactagcccccaaatcagcttcctttgccattgtggtaaaacctgtcagagatcacttactagtaatgctaaggaatatttgtaaaacacatttcacagttttataaataaaatgaggccgaaaagtttaaatgagtctttggctgctcagtcagtaagtggtagaattgagatttgaacccacggaatcacccagaagatcgagtttgaaaaaatgttatgctgtttgtgctgcatctcaccatggtgctttacatatcatgaccccttcctggcatcttaggtaattttttcataagcattaaaaagtcttaatcctcacaagcagttttgataaaacacgttccatagctggagtatttgaaggtgacctgtgatctgtgacctgtgcgcttgcaggtgatttttaaactgtgtattccagctctgtcttttgatgggcaggatagtgtctctcagaactaaggcttcttgtcagatcaaactctgcggcagtactcaaaaaattcatctttattttcagatagcatttgcattccgaggagggtacgtctgttgcaaatgatctgctcaagggtctgttaatagaaacgccaaaattttggttaaatatttttgaaacatgcactccttggaagttagtgtttttctgtct

SEQ ID NO: 9260 - DNA, 6000 bp, Homo sapiens
aggattaaataagaatatgagaaatgtgtgaagtgcctaatacaaagttaattggtaaatgttctatatttttcatatactcttgggcttgaaaacagattaattctaagctttctaatattattctgtcataattgcatagtttagtgggcctatcagcatgtataagcaaatgttaatcagagccagccaaggttgtgtcttttggataccaggaaagagttaccgtggctcttagagaggaattgatatggagtttagtaaaaaaataaattttagtttgctatccaaaatatatgttttgtaaatagagctaagatttgactggaaatttgagaaaggttggacaattagttatgtatataagaaactgtgctgaacctgccaaattctttgaagtgggtcacaatgattgaacagagaaggtgcaagtatgatatacaggaatatcacatgacaagatttagtgggtaggtggttattgccatttggtctgttttgctatttataaccagtcttaggagttttctttaaaactcatgaagaaatgagagtctacactagcacacaataataatatagatcggttgaaagtaaaaggaggaaaaatggtatgttatgtaaacattaataaaagagggcaggagtgttatctcaataccagctaaaattaatttcagagcaaagacaattgggagagacagagaagggcatcacgtaagacaaaaagagtcagttcacaaaaaagatctggcaatcttaaatgtacgtgcaaccaataacagagctacaaaatatgtgaagcaaaatctgatagaactgcaagaataaatagacaaatcaacaatcgtaattggagacttcaacaagcatctttcaataattggtagaaaaactagatctaaatactgtcaatgttatatatataaaaaaaaaactcaacaacaccatcaagcaacaggatcttactggcatttataaagtgctccaccactggctgggtgcggtgggtgtaatcccagcattttgggaggccaaggcgagtggatcacctgaggtcaggagttgacgagcctggccaacatggcaaaaccccatctctactaaaaatactagaattaaggctgggcccggtggctcacgcctgtgatcccagcattttgggaggccgaggcgggcagatcacctgaggtcaggagtttgagaccagcctcaatatggagaaactccatctctactaaaaatacaaaattagcccagcatggtggtgcatgcctgtaatcccagctactcgggaggctgaggcaggagaatcacttgaacctgggaggtggaggctgtggtgagctgagattgcaccattgcactccagtctgggcaacaagagtgaaactccgtcacaaaaaaaaaaaaaaaaaaaaaaaaaaactagaattggccgggcgtggtggtgcatgactgtaatcccagctactcgggaggttgaggcaggagtatcgcttgaacccgggaggcaaaggttgcagtaagccgagattgcgccattgcactccaacctggacaaaagggtgagactctgcctcaaaaaaaaaaaaaaagaagaaaaaaacgggctccaccccctagcagcagaatacagcagaacatttaggtacccacagaacataaaccaaaatggactgtatcctggattttaacaaacattaagaattttttaaaaactgaaatcctgtagaatgtatcctccagccaaaatggcatcaaattaaaaataaaaaagtaaaataacagcagaatcttaaatacttgaaaaataaacagcatacttttttagttcttttttttacatttttatttattttaacttctggggtagatgtgaaggatgtgcaggttttttacataggtaaatttgtgccatggtggttttccctacctatcaacccatcacctcggtttaagcccagcatgcattagagatttttcccgatgctctcctctccctcccccatccacaggccccagtgtgtgttgcttacttccctgtgtccatgtgttctcattgttcagctcctacttataagtgagaacgttagaagtttggctttctgtttctgcattagtttcctgaggataatggcttcctgttccatccatgtccctgcaatggacatgatctccttcatttttatggctgcatagtattccatgttgtatgggtactacattttcttcatccagtgtattaccgatgggcatttaggttgattccatgtctttgctattgtgaatagtgctaaacagcaagcacacttctaaggagaacgtctcaagggaaacaattaaatatattaaactgaataaaaataaaaatacaacatatcaaacttgatttaacacagttgacatcagtgctgagaggaaaatgtatttcactaaatgtatataatagaaaagtagaaatctctcaaataaaaattcaagctatcacatcaagaaagtagaaaatagtagcaaaataaaatcaaaacaaatataagaaagaatataatagggataagagcagaaataaatgaaacagccaaaagaaaacaacaaagaaaagcaaagaaataaagctggttctttgaaaatatctataaaattgacaaaccttaactaataatgataaagaaaaaagggatgtcataaattaccaatttcatgaatgaaatgggctatccttacagaccttgaagacatgaaaatgataaaggaatgtcatgaacaactccactcacatacatttgacaacttggggaaaatgggccaatttcatgaaaagcagaaaccaccacaaaactcacccaatctaaaataggtaatttaatagccctaaaatgtaaggacatttaatttctaattttaaagactcctgaaggagaaatctccaggacaaaatggttttactaaagaattttatgtactgcttaaagaattgacaccaatacacacaatcttttctgaaaatagagaatctttcccaattcattttatgaagctaacattactctgatatcaaaatagtacaaaaaagtaaactatagcctggtaattctcttgaacatggatacaccagttcttaacaacattagcagtagcactcagcgatgtacacaaagaattacacatcatgtcccagtgacgtttactccagtgactgcacacctagacattcatcccactgaaataaaaactttttttttgcacttgtaattggcttcccctctgcttttgttggcaagagcaggtcggtgtcccaggcttagaatccatttttctctctttctctccatctgtctctctgtctccgtctctgtctttgtctctccctctctctctctttttttgacagagccttgctttgtcgcccaggttgcagtgatgcgatctcggctcactgcaagctccgcctcccgggttcacgccattctcctgcctcccgagtagctgggactacaggcgcccaccaccatgcccgctagtattttgtatttttagtagagatgaggtttcaccgtgttagccaggatggtctttatctcctgaccttatgatccgcccgcctcagcctcccaaagtgctgggattacaggcgtgagccacagtgcccggccagaatgcatttttcctcccacaccaaagcacctgcagtatgggtgaagcagcctggagcctggctgcataagcctgcacagcaggagggtcccagcaggagggtcgaggtgccactgcctgggtccagctcacaggctaccagggaggctccgatctggctccctggtgctggcagtgtactgttcccaggatctgcatgtgggggtgccttcctgcatctccccatcagtggtaggtgctcctcccagccgcctctttcaggcctggagacagcggcctgcacctcaaccctactgcatgccagtgaagcgaagcaccccgggccagaagccccacagctgttggccctggtttggacaccaggcagggggcaccacagcaggagctagcagcccagccccgattctgtggccccgagtgccccgttgctgatggccctgtgttctgggcacggaccaaggaggagcaggtgtggaaggcgcctcacgcaggccctgggctccgtgggcgtcttgtgctcggagattttgaggccatttgcatccagcttcgccaaccagagctctaagctgcagcggcggccacccgcaacagcaccaccactagtgtcttgggggctttcttcagaggaggctgtcagcatcctcgagttccaggcgctctagccccagtcctgcttcaagaggctttttcccaccacaggcttctcctcagtggccagaaagctgggtcaactcccatgaactttgccagtaacgcaaggctgtcactgacatttgtggcgccaagacttgcgcacgcggattgcacacatcggccacttcctgcaccacgtgcaatgacgcgcgcacgcctcacgcgcacgccgcataacgtctgaggcgcgcacgcctcacgcgcgccccgcacgcgcgcccgcctcacgcgcgccccgcacgcacatgacggcttggcttacctgtaatgggtgcgcttcgctttgcgttcctcgcttggccttgcgttcctagcttggcttggcgttagtcgctttgcctggtgtttcttgcttggattggcgttttctccctcgcattcctttgctgggcctgaatttttctctgctgggtttggcattcccttgactgggctgggtgtttccttcggagggggggcttggcctttcctggggtgggcctggggtccccctggtgggcgtgggctttccccgggtgggtgtgggttttccctgggtggggtgggctgggctcccttgctggggttggcaagttttggctgggattgacctttctcttcaaacagattggaaacccaaggtttcctgctagttggtgaaactggttggtagacgcgatctgttcgctactaccggcctcccctggctgttaaaagcagatggtggctgaggtttgttcaatgcccactgcctctactgtgaagaagccatttgatctcaggagcaagatgggcaagtggtgccaccaccgcttcccctgctgcagggggagcggcaagagcaacatgggcacttctggagaccacgacgactcctttatgaagatgctcaggagcaagatgggcaagtgttgccgccactgcttcccctgctgcagggggagcggcacgagcaacgtgggcacttctggagaccatgaaaactcctttatgaagatgctcaggagcaagatgggcaagtggtgctgtcactgcttcccctgctgcagggggagcggcaagagcaacgtgggcgcttggggagactacgaccacagcgccttcatggagccgaggtaccacatccgtcgagaagatctggacaagctccacagagctgcctggtggggtaaagtccccagaaaggatctcatcgtcatgctcagggacactgacatgaacaagagggacaaggaaaagaggtaaccgggcctgggatgggaggaggcaggacatggggggatgatggggacataccctcctggcgcagggagggaggagccaggctttctcttcctccgcaggccccacaccaccctgggtgtggaaacctcagagaggtcagggcccaggtccctttataaacagcgacacaaaaagttttagctgatttccaatccaattacaatttcccttatagaacactaatagactgttttaaagtgatttaactcgcaaaattaagtcgatgcagcagattatttttaatgtacacattttaaaacaatgttctgtacactatagaaaggtgtatattgagaactaagtcccataatatatcaacttctgggctaaatatctttcaaataaaatccaatatggattttatatcgatgtacccctatgtaa

SEQ ID NO: 9261 - DNA, 6000 bp, Homo sapiens
gacttcatagcgaccttcacacgtctatttatttggtatttcctttgtgttcctttatatgaactgactgagcccttgctaataattaaaagaatttgctaaagtattcttttggcaaagtcagtagataagaatttctgtaagtggctcatgcctgtaatcccagcactttgggaggccgaggcgggtggatcacgaggtcaggagatcgagaccatcctggctaacacggtgaaaccctgtctctactaaaaatacaaaaaattagccgggcgtggtggagggcacctgtagtcccagctactcgggaggctgaggcaggagaatggcatgaacccaggagacggagcttgcagtgagccgagatagcaccactgccgtctggcctgggcaaaagagtgagactccgtctcaaaaaaaaaaaaaagaatttctgtgaatagtgtgtcttgtgacattagcttgcccaccaaagtataaaactaactgagaaaagtattttccaaaactagttcaggttggtgcatatgtatttgaaggcacgtgtgtattcactcattcaggaaatatttatggagctctactatgtgcctggtctatcctaggcaatgacaagcaaaaacccctgctttcacagaatcaccatcctagtggggtgaggtagggcagacagataacaactagaatatattatgtgtcagatgaagataactgctatgggggaaaataaggcagagaaggatgccagagagtaggggttgtgttttaaaatggaatgcttggggcgggcatggtggctcatgcctgtaatccaagtactttgggaggccaaagcaggcggatcacgaggtcaagagatcgagtccatcctggccaacatggtgaaaccccatcactactaaaaaaaatacaaaaattagctggatgtggtgccatgcgcctgtagtcccagatactcgggaggctgaggcaggaggatcacttgaacctgggagctggaggcttcagtgagccgagatcacaccactgcactctagccattttataaaagtaaaatggagtgcttggggaaaataattaatcagagactgcagcaaggtaagggagtaagccatgagaatatagggggcatcccaggcagaggcccagcaagttctagggacggcaagcaggctggtgttttaggggctgcagaagtctagtaagccagaaagagactgggattgcctgattttataggaccttatacttcatgcataaagacttgactttttcttactgtgagacagaaaacctttgaaagattttgagcataaaagtggcatggtctgattcatgatttccaaagaggatcagctggctgtggagtggagagcagactgtcgaaggccaggaactagttaggaggtggtggcaataatctaggtgacaggaggtgatggtgacttggactggtacagtggtaatggagatagagagaagaggttggattttacgtgtgtgagtgtgtgtgtgtgtgtgtgtgtgtttgtgtactttctagtgatggcatctcactatgctgcttccaagctggtctagaactcctgggcgcaagtgattctcctgcttcagcctcccgagtagctgggactacaggtgcaccaccatgcctggctttgggtatatatttttaaaaagtgaagccagttggatttactggcaggttggatgtagggtttggaagaaaagagctaaggttttcagtttgggcatgtctgtgcacacgttggcatatgtgtctacataaagcttaatgttatccaaaattatctcatttctttttttacttattttatttttattttttttttgctttataccatttgaagagggaccttcccagtcttgtttattgctgtatatccagtgtctggaacaatctgtctctttctctttctctcttaaaagaaagtatttagctatcggtaatgtggttacagaaaaattgtaaggagctgttattttctgtcttctgcattttcagcattgagcctgcatttatttaaaaacaaactttatttaatttcagaagattgaacaaatttgcaaaattatataatagaaaattttaaaatgcttattatcattaagtgaaaaattctacattctgcagacagaatgttattttgagagccaatgttaatgtgagtaaatgaccccaaaccctataaaagaataaatccaaaccctataagatcaaatagccttgtgtgatccacaggatcagtttccaggacagaatagactttattagcattgtttttctgcaaggacattattcaggccagttctcagccactcagccaacagctttgtttccgactgtgccaagtctgcaaacagtagctgatcatctttagctcaattcaaaaggaggtttttctagatattccaaccacacccccccccaatagccagcacatttctatcaagtttgattgagttagagtttatgaaatatttcctgaatgactgaatacacacgtgccttcaaatacatatgcaccaacctgaactagttttggaaaatactttcctcagttagttttatactttggggggtaagctaatgtcacaagacactctattgacagaaattcttatctactgactttgctaaaagaatttgctaaatattattactcgcatgagtgtctttaatttggttctttgtaaacattgagcattgaagacggtttgttattaaggacaaagttatgtatctaactaatctcacatttttctaagcagcgcaaataaacccagagcccttcaatggttcacaggtccacaatccttttatacacattctgaaatcctaaaaggctctgaatactgaaagctgttttgggaactcatctagaatcagaaccagaaaggcttgaactcagctggaggtgaacctaaactgggggtggggggcctgaagcttgtatgattttaccatatctcaccaaatgtgatgcctgtcttactgcagaaatattaatgtgtttgatcacaaagtgatgttctgtgttatgtaatatacagtaaaatcactcaatcatctttctaacaattctgttttctgaaacacatccgggctcatgggatttgcataaagcactgtaaacctgtactgtgtttgctgttccgggctgaacgtgctggcttcatctttctttacaagataagggtgatggctgctaccttgccccggtgaatgcagcaggattccttttctaggtgcctagagcttttacggctcacgtgcatctctggctcacctgtgtgagtgtcatgctttgactagatgccactttgtggtgatgaagcttctggcctgtacctacccagacagagcacagccttggagaaaggtagcatgaagctgagtgtctctgggctcctgtcctgtcatccatcagtgatgagcaatgggaagtagaaggagacacattatgttcatggccaaaggtgtgaccccaagccacatcaaaggcacacccagctctttcaacgaaaacaaccttctgtgggcatgaggggctcatgtatcttaggccaatatcaaagccatataaagcctgatgaatcaagtcagtcttgagctgggatccccgttccaccacatttacatagtgccaccttgggtaacccagtttcttggtaacccactagaagtagcctggcttataataaacttacgacatacttttcaccataataacttcctttttaaagtaggtattgggtctgtgatcctgggagaaccctaacccagggaattccatagctcccctctttcacatcttggattttcttttctccacctccagattcccaagctcttaacttggaggcagaagcactggtggtgagtttagaaatctaggagaatcagcaagatacacagactcttacagtcttaagagacccgggagatgaaggtgtaacctttttccagcgcagggctcccacgatcctccagacaggcccggagaagcggaccctcatggacaacagcgcccatctctggtcagagaaactcgactggctccttgtgcgtctatatgaggggcctctggaacctctccgggggccctgcagacatgggaaggcggccagcgtagcctccccagcttcttctctcagggatttacacccttgctcttggacatcaggcacaatgtggacatcttcagttgggtaccgggggagcttgatgcttcactcctggggtaaggtggggattaggtgtttgggtgtcggggtgtgtgtttggagggggtgatttaagtgactctggaacttgaagccattctagagaacaacacccaagcggccaggagaaccagaatcttttcatcaacatccacaagggtcacgagaaaggctgtcattggccaagctcctaggctacccaaacaaaggagggaggaggggaagacaaaccccgcccaagccccaggggatggagttggcaccaaggacttctggtcaaccccaggacagcggacagcgggccgggcacttccaaaggcgcaggagcgaagcagccctctccagccgtgcactgcacctccgcggcccgcgggcgagattggggtcccggtgggaagcagacgcgcaatcggggagaagctccagcagtggaggaagagtccagggagtttcagctgggcagaaggggcgcagaggcttggggccaagcggagtttgccctgcgggtcctgcgcaaggccccagtgccccggctaaacctttgccgcaggatcccggagccggcgtccttcaaggagcacagagggccccgtagcacgccccttgcccagcgccaccgacccttaagcagcgtcaaggaaggagtcccgatcaaggacagggatctgcggccatggccgaggccgcggagccggagggggttgccccgggtccccaggggccgccggaggtccccgcgcctctggctgagagacccggagagccaggagccgcgggcggggaggcagaagggccggaggggagcgagggcgcagaggaggcgccgaggggcgccgccgctgtgaaggaggcaggaggcggcgggccagacaggggcccggaggccgaggcgcggggcacgaggggggcgcacggcgagactgaggccgaggagggagccccggagggtgccgaggtgccccaaggaggggaggagacaagcggcgcgcagcaggtggagggggcgagcccgggacgcggcgcgcagggcgagccccgcggggaggctcagagggagcccgaggactctgcggcccccgagaggcaggaggaggcggagcagaggcctgaggtcccggaaggtagcgcgtccggggaggcgggggacagcgtagacgcggagggcccgctgggggacaacatagaagcggagggcccggcgggcgacagcgtagaggcggagggccgggtgggggacagcgtagacgcggaaggtccggcgggggacagcgtagacgcggagggcccgctgggggacaacatacaagccgagggcccggcgggggacagcgtagacgcggagggccgggtgggggacagcgtagacgcggaaggtccggcgggggacagcgtagacgcggagggccgggtgggggacagcgtagaggcgggggacccggcgggggacggcgtagaagcgggggtcccggcgggggacagcgtagaagccgaaggcccggcgggggacagcatggacgccgagggtccggcaggaagggcgcgccgggtctcgggtgagccgcagcaatcgggggacggcagcctctcgccccaggccgaggcaattgaggtcgcagccggggagagtgcggggcgcagccccggtgagctcgcctgggacgcagcggaggaggcggaggtcccgggggtaaaggggtccgaagaagcggcccccggggacgcaagggcagacgctggcgaggacagggtagg

SEQ ID NO: 9262 - DNA, 6000 bp, Homo sapiens
aattacttggattgtggatattagaatagagtttgtctaaagcctggaagtcagtcgagacatggagaaaaagggaggcaattaccttaagacactgaatattagcagggttttggcactaagagggaaggatgatacaaggatacgcactgtcctctggatgatgcaggagacacagataaacatgaaaaactaggtaacccaaattccagaatgctttaaatctgtatattcctgcattttttatggaaaaatgtcatttctgtggggtcactcaagtggaaatgttagcattggatgatagtatctgaccagtatcctggatcagaggcaggattctggccaggagcctgggaggaggtgctaggagcgtaattgaaaagcatagagaggtgtgttaactgaaggtgctcaactggaaactgctgttcgtttgttggaactctggagcaacatgctggaagctgcacttggtcactgaattcagacactgtgatacaacaaaatgagaagaacgttgtttcccatgatggttgtgctcctgttttattgtccactctgtctcccagactctttggggccgctctggcagcaccagaggcctcacagaatctgctgggttccctggactctgtaagaggcagggcccctccaagggagcggtgcggaggcctctgtggtcagagcacagttgtgaggtctgcactctagaaatagcactgctagaaaaccagacgactcctctcttaaatatattaaagtatgcagtctaatgaaggtttggctgtttagtgttttataatctttcttgaaaagcaaaaacaaatttaagaaagttcgtacagtatttttaaatttttttgaggaacatcattctatataaaatcctggtgcagtgcacagtgtattctgaaaggcagtcagaaaattgtttgattataatctttttttcatatgttcttcggcagtgctaatttaattcataaaatatttaattcataagaaagtgtttgtatggccgggcacagtggctcatgcctgtaatcgcagcactttgggaggccgaggtgggtggatcactcgaggtcaggagtttaagaccagcctggtcaacatggcgaaaccccgtttctactaaaaatacaaaaattagcgggacatggtggtgcagctattcgggaggctgaggcaggataatcgcttgaacccgggatgtggaggttgtgtgagccaagattgcgccactgcactccagcctgagcgacggagcaagacgttgtctccaaaaaagaaagaaagaaagtgtgtgcatggcacatccttcatttgtgctctaaaaaatttaagaaattattttttgatgctttcagcaaatcctgaaggaacccaaagtggctgcttctgttttgaatccctatgtgaagcgttccattaaagtgaaaagcctaaatgacatcacagcaaaagagaggttctctcccctcactaccaatctgatcagtgagtattagaactttttcatttgaggtgtcttgaaactatgactggaaatgtggtccatggactgtgggcggcatcagcatcacctgggagcctgttggcagtgaagaatctcaggcctcacagcaacctgctgaatcagagtctgtatcttaaccagctccctaagtgaatcgtttgcacattgaagtgtgaggagcatcgtctaaaggatactaggacctaagcatgtctaattgtatagtcagtagtttcaactgtggaggcggccagtgtgatacctaccaagaaaatggttcgtggcctgtggctataccttgatccttggatacatttgcattcttgggtacatttggactgcttttctctttttgagacagagtcttactctgtcactcaggctggagtgcagtggcacgatctcagctcactgcagcctcaacctcccagactcaggtgatcctcccacctcagcctccctagtagctgggaatacaggtgcatgccaccacacccagctaattttttgtattttttgtagagatggggtttctccatgttgcccagcctggtcttgaactcctgggctcaagccatctgcctgctttggcttcccaaagtgttggggttacaggcatgagccaccatgcagcctggattgcttttcagatcctcatagccagctcaaaataaaagttgcagagaaagtgtgttcatgatatcatctttgaatttgtagccaaacatacaatctgtaacataaatatgaaaatcagattgcaagctgagaaccccccatacctactaatttaaatccttgtcagtgcagtctatttaaaaaaaaaaaaattggatatgcgttttaaataacaagttgtatcttctccattctttttttttttttttttttttgagcctgggtgtccctttctgtcacccaagctggagtgcagtggcacagtctcagctcactgcaacctctgcctcctgggcttaagtgatccttctgcctcagcctcctgagtagctggaactgcgcgcatgcgccactaatttttgagtgcccagctaattttttagttttttttttgtgaggcagggtttcaccatgttacccagggtttcacccatgttactcctggacgcaagctgtctgcccatctcggccatccaaagtgctgggattacaggcatgagccactgcacttggcctccattcacattgttaaagaacattgaatatactgtgattttaagagacaagatcttgctctgtcgcccaggctggggtgcagtaggacagtcatagcacactgcagccttaaactcctaggctcaagcaatcttcctgcctcagcctcctgagtagctgggactatagacatgcaccaccaagccctaacgtttttttgtagagatgggatctcactattttggctggtcttgaactcatggccccaagcaatctttgcacctcagcctccagtagttgggattataggcatgcgcccctgtatatggtgttttaaggccacaaatctaagtttgttttttgggttgagtatacaacttcatgaataacttgttcaggtgagtttcttgttactgagacaccttcactctggcagatttgcttgctgaaaatggtcgattaagcaatacccaaggagtcgtttctgccttttctaccatgatgagtgtccatcgcggagaggtaccttgcacagtgacctctgcatctgtaagtaacgggttgttgctgctgtgtttgccttgatattacatgtgtcaccttttgcaggaagaaaagggaaaaacagggtaaaatcaagaaattgggaaaggtaacttgtcacctgggatgtttgtttcatttttatatcagcttctgtgaccctttgctttggaaaagccagcgtgtatcttattagtgcttctgtaaccagtgattattcataaggcctgggttaaatgtaaagtacatcaaaatgtgttggaaaagagtggtttagactctattatatgtttgaattattttatgaataccacttgaagtagtttcctgaaactagaattctagagtttatttttttgagacagagtctcactttgtcacccaggctagagtgcagtgacacagtcacacctctgtagcctcaacctcctgggctcaggtgatcctcctgcctcagcttcctgagtagctgggattacagtgcacccccaccacacccggctaatttttgtgtgttttttatagtgatggaggttttactgtgttctccaggcttgtctcgaacttctgggctcaagtgacccacctgccttggcctcctaaagtgctgggaataaaggtgtaagctaccacacctggcctgaaactagagttactaacctttcatctttggtggtggtgagtgggaaggagtagagccgttgggcctttgtatctttttgacttgatagtgggctataattggctaccgtttattgaaccctactatatgctgggtgctttattatgttattcagtatcaaaagattcatgtgagatagaagtataattaacctcattttacagatgaggaaaccgaatgcagggagatgaagtcgcttgcccaaagtcatacgaggtgggactagaatttgaacacaggcctcaaggcctcttagaagtccattttccttagactacactacattgcctccctagaattaattttgttgttgtcttcaatatgtattttcttccctatgtaactcagtcaaatgtagtgtagcttaccctacaggaaaacaggggagtgtggtagattgacttggaattcgtagcacctgacctcatctagattaatagatgtagcatttaaaggacagtctaaccttctagttagcacagattcaaggagaggcatcctagcacatcatacttacttgcacgtttgtagttcagtagttggtgcccccaaaacatgtgcctggctgcaaatcattacagctcagacataggcagggagccctctgtggctgcatcagttatccctaacagtgtggcacagattagacattcacctgccccacggtcacccatcatgaagcactggtgcaggccattcttcagtgaacacaaggacatgattttcttttttttttttttttttttcttttttgagactgagtctcactctgtcacccaggctggagtgcagtggcacgatcttagctcactgcaacttccgcctcccaggttcaagcaattctcctgcctcagcctcccaagtagctggactacagcacctgccaccacacccggctaatttagtgtatttttagtagagatggagtttcaccatgttggccaggctggtctcgaactcctgacttcagccaatccacccaccttggcctcccaatgtgctgggaccacaggtgtgagccaccgtgcacagccacaaggccatgattttcttttaaaggatgcttgtttttgcaaaagattttagaaccaactgttactaatgcttttgatgttgatactgttgggtgcgtgagtctgtactgtttgaaaaacgttatgtcttgatgagtgactaagagcacaggctttagaaatacacagactggtttcaaatattggggctggtcctcacctgctgatgtggccttaggtgagtttcttacccaccctgagcctccgttccctcatatgtaaaatgggcataatgaccggtggcctttcagggttgcccacatgaagggagatagtaggcatgaaatgtgcctggcatagacaggtacctggcagttggtacatgtctcagtggagggtatgtatatttcagaattctgtaaccttttagtctcagtaaatcatgttttgaacacgaatagattctggccaccaccagcaccccccacccccaaaaaaaggatattgttatatctttacaaagacataaatttttctgccaaatttttttaggctcttagaggaggggccagggaggtaggatttatgacaagttaaaaaaaggcctttttagcagggtgtggtggctcacacttgtaaccccagcattttgggagactgcagcgggtggatcactcaaggccaggagttcgagaccagtctgaccagcatggtgaaaccccgtctctactaaaaatacaaaaattagccgggtgtgatggcatgcgcctgtaattccagctacttgggaagctgaggcaggagaatcacttgaacctgggaggcggaggctacagtaagccgagatctcgccactctactccagcctgggtgacagagcgagactcggtctcaaaaaaaaggcctttggtttaacagccttcttcattttcaccattagaacacttaacactataacataactaaccaggagtaagagttggggccgagaggagagtgcagtctggacatttgaggtgcttgctctaaagtaggttatggagctgagctgacttcaggaaaagccaact

SEQ ID NO: 9263 - DNA, 6000 bp, Homo sapiens
tgaaaggatttgagtgcatatagagttcatatctgtaatacagcaatcaggttttataaggaaatggtttaaatccaatagactttattcttttgagattttttgacaagctcttttttcctgtatcaaattattaaatatattttctatatttaaatataaatggtttagggactgaataacttagttacataaagtactttatggtcatctccaaagcctttctttgactgccttagctacttatcatataatttgaaattctcaagtgacagtgcacctcaatttttatgtatgtatgtatgtatgtatgtatgtatgtatgtatgtatgtatctatctgtctatctgtctatctatctatctatctgcctatcttagggtctcactatgtcatccaggttggcgtgcagtggcacaatcatgggtcactgcagccttgcactcctgagctcaggcaattctcctgtcctcagcctctgatgtagctggagaccacaggcacacaaccaccatgcctagctaattttttggctttttgcaaagacagggtctcactttgttgcccaggctggcctagaactcctgtgctcaagcgatcctcctgcctcagcctcccaaagtgctgggattacaagcatgagccagccactgcgctcagccctcttcttactattattattattattgttatggttgtagaagtaacctgaaatagagatacatttaaatatctgagtgagtgatttcagcaaaggagagagaccctgtgttactattttaggagtgctcttgattgtgtgaacccgttgaatacaccacttactaaccgagcccggccattttgctcagattattcagagctctcaggcccattcagaatgaaattcaaaatctttaccatggccagaaagatccgtgcaatcaagatgcaccatccccatcctaatttccgggcttgtcgccacgccagccacaatgccatgctggcctccttgctgttctttgagacactgggtgcactttgcttcaaggacttcgcttgcctgtccctgaacctggaatgctcttcccctagaactccttgtggctgccactgtcacccccttcagatctttatttagatgtgtctatgatgaagcctttcagggccgatctatttaacatttccctcaccacccctccactctgtagcccctttgccccttgtatttttctccatagtacttattataatatctaacacactataatatcaaatgttaactccatgaggataggcattttgatctatttggttccctgcggcatctccagcacctagaacaatgcctggtgtacatagtgggtgcttattaggtacatgtcacatgaaagaggaaaaaaacgagtgtattaaagaatccaggagccgggcgaggtgtgtcatgccagtaatcctagcactttgggaggctgaggtgggtgcatcgcctgagttcgagcccagcctggccaacatagtgaaaccccgtctctactaaaaatacaaaaattcagctgggtgtggtggcaggtgcctgtaatcctagctactagggaggctgaggcaggagaatcgcttgaactggggaggcagacgtcgcagtgagccaagattgcgccattgcactccagcctgggcaacaagagtgaaacactgtctcaaaaaaaaaaaaaaaaaaaaaagaatccagggaggccaggagcagtggctcacacctgtaatcaatctcagcactttgggaggcgggcagatcacttgaggtcaggagttggagaccaaaatggtgaaaccctgtctctactaaaaattcaaaaatcagccaggtgtggtggtgcacgcctgtaatcccagctactcaggaggctcaggcaggagaatcacttgaaccccagaggttgcagtgagctgagatcacgccactgcactccagcctgggcgacagagtgagacattgtctcaaacaaacaaacaaacaaacaaacaaaaacccaaggagcacagaacagctacatattggaacagctaaatattggagtacctactgtgtgttgaccattccacagcatggaggaaactggtcttcccttggaagagcctccccactattcaggtggtaagagaaataacatacccagggctaggcataatgcagacagtgttataaaggaggcattgaacaaaggagagagtaactgaaggaggtggcattttgagtgaccttggggccgattagggtggttacaggttgatgtttatatatatggcatatatgttgggggattgggtggcggggaggggtgcaggcagtcagaatagagcaaagagaggagtaagtatagaatggtgtatcaaatgtttatccaaaagcaggatatggaactagtaaacattttattcacagtgtgtattttttttgagagggagtctcgctctgttgcccagtggcatgatctcggctcactgcaacctctgcctgctgggttcaagtgattctcctgcctcagcctcccaagtagctgggattacaggcgcacgccactacgcctggctaatttttgtatttttagtagagacggggttttgccatgttggccaggctggtctcgaacgcctgacctcaggtgatcagcccacctctgcctcccaaagtgctgggattacaggcatgagccactgcacccggcctgttgtctatattctattttttttttttctgagatggagtcttgctctgtcacccaggctagagtgcagtggcgcgatcttggctcactgcaacctctgcctccagggttcaagcgattctcctgcctcagtctcctcagtagctgggattacaggctcctgccacagtgcccagctgatttttttgtttttttagaggagacggggtttcaccatgttggccaggctggtcttgaactcctgaccttgtgatccacccgcctcggcttcccaaagtgctgggattacaggtgtgagccaccgcgcccaacctgttgtctatattctaaaatttggataatttggatatggtatagtttatgtggccattttcttttggtgaacatgtaggttgtttctagcttttcgctattggaaacagtgctgcatccttgtgtatgctttctgcatgagtgatatttctctaggatacatactgtaattatatgcttgtctatttttttgtgttttaatttatttaatgtctgtgcttcctgtgaaaatacaagctccatgaggggaggaatccaatttgttttgtgccgcactctttaattattatctagccaagtgcttgggagaaaggagaggtcaataaatatatactgagtgaatcaggctgaaagattggctgggaccatggtgtggttttgtatcctaagagagggagcctgacttattttggaaaagtaaaattttttttggagaatttcacacaaagcagtagcaggatggttattggtggaatttaggaaaacgtattctggactagaaagaaggcaggtacaggaggtgcgattatgagattattacacaggctagaaggaaacaaagaaacatgggtggtgagaatagaagggaaagggtacatacatttcagagagatcagaaggataggatttgtgagatttactaagtagctataaggggtgaagtaaagaaagcatagaaggaaagttgatttctagcgtagaacattttaattttacaaacatttattccctctcccagctccatggaaaaagtactcactaattgctgttggtatattaatttgtattacattttcttccccactttctcttttttttttgagacagggtctgtggcccaggctggagtgcggtgatgccatcttggctcactgcagccttgacctccccgggatcaagagatccttccacctcagcctcctgagtagctgggaccatgtgtgccagccaccatgcccagctaattattatttttttttttgagacggagtctcactctgtcccccaggctggagtgcagtggcgcaatctcagctcactgcagcctccgctccctgattcatgccattctcctgcctcaacctcccaagtagctaggactacaggcacctgccaccacgcccggctaattttttttgtatttttagtagagagaaggtttcactgtgttagccaggatggtctggaactcctgacctcgtgatccgcccgcctcggcctccaaaatgctgggattacaggcgtgagccaccgtgcccagccctatgcccagctaatttttatatttttcgtagagacagggtttcgctgtattgcccaggctggtcttgaactctcgggtttaggtgagcgccttggcccccgaaagtgctgggattataggcatgagccactgtgcctggtttccctttcaaaagagattttgggtgtttcgtgtcactgtatccacgccgcgtgcggtctcttgtgcgtggcttcttttcctgagcacgcacagctgccttctaacccgcgagcaatggcgttaaggtttttgtttgtaattcgggggtgacccaggggttcgggccgcgggcccctcccctcgcccaggcacaccttgcagaggagggggcggcggggacaggacccgggtctgtgcctgcgcacaccctcgcgggccaaccccctccccccccgccccgccgggtacctgtcacggctactgccgcggcgcgcgcccgccacgttaagccggatggcgggaggaggggtgcggggagggtggcacggcgcgcgcgtgcgcgggagtcgccgagcaagaactggtagtgcgcgcgctcgccgctcgctcgcgtcccggaggcggagtctgcggcggcgggcggaacgggggcgcgcctatgctagtcacgtgggcgctggggcggggccgggcggccgttcaaggcagggggcggggcgtctccgagcggcggggccaagggagggcacaacagctgctacctgaacagtttctgacccaacagttacccagcgccggactcgctgcgccccggcggctctagggacccccggcgcctacacttagctccgcgcccgaggtgagcccaggccctaagtcctccgggcgggggtaggggtgggggacgctcctttttgttgggggggggtcttggaggcgcgaaggcactaggcgcctcggcggatggctgaacccctcgcccgcggctccccgtgtcttttggggggccgggtgcgggcgcggaatccgggaggtgtccgcacaaaaggccgagaaaaactccgcgacgcctccctccctccctccgccctccccgtcccctcctctccgcgcccgctcctcctcattcaaacccggccggcctgagtggtgttagctcagtcccggccgccgccgcgtgaggaaatggcctaggagccggagccgcaggtaaagggggcgcgccccccgcccgcgccagccggggcgcccgcccggtcctgcggaggctcccgcgccgcccccgaggcgcccggctctcgttgtcttgtccccccccaggatgacctgagttccccgtgtctgctttctagccgctcctctagggcgccccctccccagctggctcctgcgcttccgcccacgggaaggtgcgggcgatcccgggctgcatccgctcttggccgtcacactcacgctgcacgatttagaagggcttggggtgcggggttccctgagtctccgccgggagcgggggtccgggggtctgcgggggtgggcggtggggtgctgttccgaaaagttgggtcgccccgcggggcgggtctcccaatttgcccagtcggcccttggggcgcgggcggaggggggacgtcggcgtagggtccccagcgatgccccgggaagggctgggacaagttggaaacggtcaaaacaatgcgtctggacgggcagcattgtttcttattgtagttttaatctgcatttctctaata

SEQ ID NO: 9264 - DNA, 6000 bp, Homo sapiens
tactctggttttcctagacatgaactcaggataacactaaacattaagctgatcaatgtaggtgctttgaatgaaattaaaagagaaattagtctccttattcaactcaatcttacaaatctgctgctataatttataggttgtacatcttatgagagagcatcactcattcatttattcattcagtgagtagtaatcaagctccctctaagcaccaggcacagtgttacacactaaggtttcaagcaaacagaacagacaaagagtccactctcagagaatttgtaataaaataaataaaacaagtagagagttaataatgaccaggagggatctaagaagggccttgtgaagaaagccagtgggaggagctaatttagatcaaacagacagaatggatagaaagaggcaaatgagagaagagagacaattaagagtttattgtaatagaccagatggaagatggaagatcatggtgatttaggctagtgccgtggctctcaatcaggggtaattttgtacatcggagggcatttatttgacaatgtctgcagacatttttgttgtcccaccttgggaggaggatactgctgacatctagtggagagagccctgggaagtggctaaaagtcctacaaagaaccggacaactgccttcataaaaaataattttctaaccgaaaatatcaatagttttgaggttgagaaaccccaggctagtatgatatcagtggagtatagagaagctgactaaagacatactctggaggtaaagccattataaaaataaactgatacgggagtaggtgaagaagtaaggaaaaaaatgaagggtgacctcctgattttccagttttaatggctgggtggaaggtggtgttcatattgaaataagaaaatttgggagaggattcagtgcgggacaatgacatgggacagaatcaaggatttgagatgttggctcacttagaaatggtcactaaaattggctgcatgaatcgggaggtttgagcaaaagacaacatttgggaatctttggctaaaaggtagtatttaacatcatagaaatatatgatatgacctagcgaaaaaagcataaagaagtagtcaagaactcaagatttagaccctacatcagctacacagtcccagcaggctctaaaagccacttgatcttttgtttttggtgccatgagtaacattttaagtttcctcaactatgctcacaacattttgaaaagactgtataacattcgcattccccaggttactctaagctatttttctttgtatctgttatctcctaaaaattaagtaatttaaaatggattagtatctaagtaatgccaccagctctcataggaagcacaatgctgcatgtcattgtactgttttattgttaaccacggtgtatcaatttaagcttaagatttggggaatgggaaaaagacggcatgcattcaattagacatgtttattcttaagagggcactatgagaaaatgtgaatcaagagtgattaccagagtcatttcgggcaaaaaataactggatgaatatatgtacaaaatacagtccttctaaaaagcacaaaacaaattaacagcagctgctgatcactcatgagtaactcaacaccatgagcctgtgtacatgagcagtggagagaagcattttaacaaggaaataaatttcagttttaagctttacagaattttacagatgatacagaaacataactgcagtgtgccatttagttttcgagaaacttcctttaggaaatctctctaatatctctaattatcaaaatgaactgtttcctcataaaccagagacaatacaggtaaaaagtagcaaaactcctgaaatagtatcagaacaattatgattaccatataattaattggaccagtgttgttgacttcttgcccaaaaaacaaaatatttcagtctctgcaatctggggcagattattactagaaatatatgcatggattcctttaaccagaaaagtaatgaccacaaataaactaaaatatgctgagtaacaaggaccttgggaaattcttcacatgcagtagctcatataatcctccaatggccctgtagtgttattattatcctcattttacagatgaagatatcaagtcatagaaagtttattagttagtatagagaagcttatgctgcagtaacaaatatctcaaaattgtagtggattaaaacataatgttgagctgggactgatttgttagcagtgtgttgctgttctagaaacattcagagcaactcccttacaaaaaattactcagggattgaggctgctttcatcttaacctctagaacttgtggctttcagagttactctggcagggaaagagagtcctggaagtcatgcaggatcttttttcactgtcttccttttctcctggcagcagtgcacttccactcatattttattggccaaaaatggtcacatgattccaactaattgaaaaggtagattccaactaattgaaaaggtacaggctttcatgagccagagaaagggaaaactagatatacgtaagcaccagcaatggactacaggcagacataaaaatttaaccaaagctaaaaacatagacttggtaaaaccagaatttaaacccagtttgttcaaaagctgacttaattctagaccttgggtcttcaaactttagccactcactatctgctatgtattggtctttgatgtacccagagaaaatagatgactaaaaatgcttaccacagacctttaggtttaaaaataaaccctctaacagatttacattcattctcactttaagaaatacttactaatcccttttaaaccactgattctttgagttttgaagcatcacttcctgaagaacccctttccaaactcttaaatgggattacactactttttttctttacttccataacaccattttgtaaagctcatcatactttaatgccaatgagttccagagtggcagcaatcatatccctctgtgtctccagagattggcacaatacctcacacaacgtgggctctcaaaaaatatgcataaataaatgaatagtttgactttgcctcttttctgaagcaggtcatgctactgtttttcttaatttttatttgcacaggaagggtctcgctatgtttccaaggctggcctcgaactcctggttttaggtcatcttccctcctcaacatcaccaaagtgctccaatgtaagccagcacacccagccttgccgctgtttgatattctctggtcttaaaaatgctccccgaatgagacaaaatttactcttctacaatttccctctgacaatcttatttttcttagctcttctcacatatctaacactgaataaggctactttcttttaacacaagaattcttcaaatgtctgaagataaccagcatgtgctcctaattcctcttggtttcctcaatctttccacgcaaaaatgcattcctaaatccctatcagtccctcttcttatctgcagacatgttctgctttgttaactctcatcccaaagtgtccagaaccaagcctactacttgagatatgaactgactagctttccacagtggagttctaacctcccttggagaatgaacatgcattttccccaccatagggtttttagtgaaaagtatagtgtctgacaccacaaacaaaatactcagtaggtatttgttgaataatgaatgaattaattaattaatacacgaatggactttaagatatattagattccttttgcaattgtttcccactctaggctcatataacaactgtggacatacttttcatatggatttggtcagttcttcaaaatctatttaccagttaaaaaaaagagatgttaatatagacctagcaaacatatatatagaacattccccacaaaactcgaaggaaattaatccaacataatcaaatgctgatttccctagggaagtgtccttgtccttctacagagaaacagtctccaaacctacattgctaaaatagcctatctttcagtattcagacctgacagttaaaagaaatgaagaaaagtagcggcgctggaggctgcttctatctcagtggcatgtgtaaatggaagcaatttgcaagagattatcttgggtccaaataggaatgaagccactataatcttggagtactgaagctttctcattcctctcccccttcccctgttcatcatcctcgtcagagtcaaaacaggagccccggtattttccaaaatattggaggtgattttccattaaatgatgggacgagtcatagctggctgtctataagaccccctaacaggtgcacacggacattaccaagaaggcttccttgccactcacagcggacagcagaggctttctctgctcggaccaatagtttagatttgatctgtcttgagaatgcaacactcgatcgacttcccagcagcagagcgcaaagttgagggagagaaaaaagagcgtgtgtgtgtgtgtgtgtgtctgtgtgtgtgtctgtgtgtctgtgtgtgtgtgtgcgcgcgcgcgcgcgagtatcttgatcagtggggttggggcgggcagtaaataaagggtggggccagcgaggggaggaggaaagcaaagattcagagaagccggaacgtggctccgctcccagttaacctgctggagctcatcaggcttgctcagagcccctgcaccaactcaccctgtaccctctctccttcttcgttagtcttctttcccccttttccctcctctgtctgtgcctatcccccgacttttgcatctgaccaaaggacgaatgagggagacgttcctgcagatcggggcagcaactttcctcagctggtctctgggctccgggagccagagagcgctgatcctccgcggtctgcggcccatggaagaggaggaggaggagccgtgatgggctagcgacagcactgaggagccccgagagagctcagccttgccagccagctccgcggtcccacgcgggttccctcgagctcgctccgtggggagcgcgcagcgtgcttggaaccggagcatccagagaggatgaggcggggacccggcccaagttgggtgcatctctcgggcgtccggcagcggctgtatctcggcatgaattaagaagctaggaagatggagcacggcacactcctcgcccagcccgggctctggaccagggacaccagctgggcactcctctatttcctctgctatatcctccctcagaccgccccgcaagtactcaggatcggtgagtgagccccaggctgcctgctcgggagacgtggtcggtcgccgcaccaacgcgggtgtagcgggtcccgggcgaggcagcgcgcggcggcgcaggagccggagctggggaaggtggaggtcagtgctcatgggaggctacacaaaaaagggggagccgcgtcactgcttccctcctggagggtgccggccttccccgggaggtacagttggcgggtttttcaatctgggctccaggaacgcgggctagagtgcggggatccaggttcgcagggaccggcacccctactctgggcaagggatcgcgagccgctgcagccacttgagttgggcgcagaaatgagctctcccagcctcctgggtgggcgtctggcagtccagatccgcagtcccggtgcctggcaacctgggctctgggcactggcaagtatgcacgaatctcaagaatacaatacagggaccactagggatgtgggaatatcctagagcctgttaccccagagcctccaagtttttatgcctaagttggattcttccacatggagtctgccaactctgacgggttccactagattggggcagagttcagatctgacttcgagctgaagattcgaagagtgagaaggacggtcagttagcaacatcagcagacacttaagtttcccacttgctccctaatttgcccgcttgcctgccact

SEQ ID NO: 9265 - DNA, 6000 bp, Homo sapiens
ctatgattaaaaaggatatacctgctaaacaatgaactaataaaacatcatataagaaagaatctatcaaatagtcttctgactgcacttatttatcaagccatgaaattaaaataaaaatatatgatttcaggacattcataagtatttatgacttaagattagtagaaatggtgaacgtcattttaaagtgttagtatcggcaagtctgtgtggtctgcaggatcctcaattcttgccttctcagaagaaagaattcgactgaggggcataaggcagagtgagaaaccgaggcaagttttagagcaggagtgaaagtgtattaaaaagttttagagcaggaacaaaaggaagtaaagtacacttggaagagggccaagtgggcgacttgcgagatcaagtgcactgtttgacctttgacttcgggttttatgcgttggcatacttcccgggtgttgtgtgccttctaccctgattcttctcttggggtgggctgtttgcatgtgccatggtctgccagcacttgagaggggccacatgtgcagtgtttactggagttgtatgcatgctcacttgaggcgttcttcccttaccagccaagtgttcctagaagaaggttagatgacagttaaactgtgccattttgccttagtccacatgcttgagcccactcacctaagtcctgagatgtcatcaggaagctgctgatcaccagcttcggtgtttctgtctattgggagaccactttttctggtgccagctgtgaccaattattattgtagacggacagtttaacaactgcctgaccatcacctgacggtctcctggcatgcctggtggggaaggccctcttctgccctgctcatgtctgactagctacctactgtaacaaaaataaggaaaacacgtaggagataaaagtgtatcaagggaaaagggcataactcaataattgttctaaattatcctaaagttctaaagaccagccccaaaatgcctcagagctaaaacccctctgaaaccccctccttagcaaaaattcttaactttttacacctagaaatatttcttaagaattaagatgtatttcttaatacatctccaaatttataatcaatcaaagaaataccaaccgctgtttacagatattccctaaataagagacatgaatgaaatccatctgaagtggctactgctgtctgtggtatataccctggggttcattgtcatgcactgagaaagaattcggcacacagacacaggtgagtgggttaaggagcagaaagtgtaatagaagaaaggagagaggaggggagagcagctcctcacgagcaagagacacgtggaaaagggagaaggtagaggaccgcagcagattttatacgcaggctggagaaggcggtgtctgatttacagagggctcacaggttggttcactcaggtatgatgtctacatagtgtgctgggaaggctagttgccccaccctaatcttcttatgcaaatggactttccagttgattggcaccatcttgtctgctcgtttacagtacacgtggctaacagagacgggaagatgggaccgccatatttaacatctttagtccttagttcctgcccgcattcacctgtgcaagctcccagcttgcaggctgcttgctctcttagaaaattatttggggctgattttcattaaaaagaaaagccttacctaggactcccatacccttactatctgcctaagtaattgcttcttaactcctatatcacattcagtacactggaagtacaaatgtaaaatagaataattttaacacttatctcttgatactctttaagatgtccttttatagacaaaataaattttttaaaatttatgttcccatctctgcattttaaatatattgtttatctgtggtagggtttttgtggagaaagcaggcaggggagtgaaactgaaaaagaactaggtctcttaatagttagacccacaacagctaaggtcttaaatctaaaacaagtactggcccaagggtggagaccaaaaactcccaaccatcttagttctggtgtcagcctgtctaaggcaaggccagatctacacatgggccaagaagatagaatggtttataaattgccgcaatcaatgacagagaaaaacaagattacccaaaacaaatgacagcccgtcaagataattcagtttgttaattttactagctaataagtctccattacagctttatatgtgggagacaaaccagtctcatctgtatgacataatcaatcaattataaaagtcactgtgagatttggagcactgatttaccctgaaagatcttctcccccaggccttgccttcacctgaaatcataaaatagatatataagtgagatttcagacaagctaaacacaatgtagtttgagagaccaggctctcaggagctcagaggagccacaatttgcagctctgaagcacagctcgcctgattttcagatgtggctgcagtctcttagttacacccatgcagatcactttatcagaactctacggaataaatgaatgaattcagttaagccaattgctcttgtctctggtgtttatcaaatcccaggctgtgttaatgggatccatctcattcaacacgtgctcttatgccattcacaaagtgctattgcccacatcaccccggcagctgtttcaagtaggggagttttcaaagtatttgaaggagacaaataggttacttccaactcttgactttcttatttagtctaatatcttgtaagaaagatactttgtgaaatcattctactggtaaaagtatatatcatcaaaattagcaggcatacccatagcagcttcacagattaaacagaatgccctttacacaactatagtcaacatgggttgttcttttaatgttctaaggctgtgtccaccgaaatcctgcatcttgcatttgtattcctggtctctcagggattatttggttcagttgttctttgtttatttgtaacactatcactagatccagcaggcattgtggagcacgtattacacatactacagatattacacatactcatatcttctgtatatgggatatatgactcagaagtaatagcaagtcagattacaacctcttagggaaaatcaacagcaaatacaagctcacaggccgtgtgtacggttgacttttacatgactttggatgcaaattgacacaaacacctctccatattacagtcatttttagagggcagacagcattcttgaggggacctgaattgctaggtaattaaaatgtatgtatgtagaataaaataatcttggaaataagaggtttccgtaagccttctctctaaaataaggtcaccttctttgaggtagagattctgtgccttgtggaaggaaagccacttcataaagcagcacaagaatagccagttattgaaagggccattataaaattactagccaatggtattcgctactcttacaatttgtcaatccattcatccctaggaaaaagacagcataaaagagagttctgttcataggtagaagcaatttatgggaagactttggaaatgtagaaccattgtttttgatgaccataagaaaaagagggggtgcaagaggggagcactatgaggggcccctggaataacagcacaaagcaagttagattcaaagagtggagtagacctttgtctaaggggcttatcctgacaaattcaactttgaaggcagcctgggtcattcttggaaaaggccattctttgtctccagtgaccccagagacatcatataaggatggggtgatgatgcagcagccgggaccaggtcccagttgcagtggacaggacagaagggactgaatggggcagcaggctggggcgccaccaggtgcaagcaaagctcagggatagggcccctcccctccgtcccggccgctcgctgcgccccctctgggcggtgcaggctccggctcccgcgccggggctgcctctcacggatttcagcccggtgggaggcagtgcccagagcctctttttccttatctcacaaaaccctaaaagccgaacccctacaaccagcagacaaaactgctccccgagcttcggctctttcctgctttccaggcgtttctccgggaataacttacttagtggcactgggagaaaggttgggactggggggtcggggaccgaaacccaaaagattcccccagcatggagcacccacgtttccagtggcgggggatgcacgttggtttgtgcccagcccgcccccaccaagcccggtcctcgacgcgctgacacgctagctggcatgggcggcggggtgggcgtctctgggtctgtggctctgtcctgctcgcccccgccccttcctcccggaccgcgccggcgctgtgcggctttttccccagcacgcggcgctgcactcgcttttatctcggagccgcgtcgcttcgtgcgctgccagcggggctcagccagtcggctggaattgagtagcattcattgaatctgcggatttcatgacgtctctctgcgtggtccaccacttttctcctaaccggggattttttttttcttctgccactcttatctttccccacttcattccacccagtctccctcccccgtccctgcccaaacgcgcgcccctccgcccctcccttggccccagcgcccagccctgctctccgcgctcggccagagggagccagtccggagacggccgcacctggctggagaggctgggcgggcggaggggtggagacccgcggacgccgggaagccggacctggagccggagcagccgcgagcagaatggagtctcctaacagcctctcggtgctgatgtgaaatttgaccatctgattccagtttttttcttttccttttcttttttgcatttccttccctcgccatccgtcgtgtagtgaattgttcagtcttgctccgtttcaagagaggagatcatgattgagtgaagccaccccgtccgcagccaggtaagcggtgcgctgagctgctcgcaggcgaggagctggcgtccacctgggcgaggcgttccgtgctctcgggtccccgcgtccccttccccagctccgccgtcgccgcaggcatctccactctcatgagaaacattgtgcccaagtcagccgaaaggcgagggagaagccggttacataacagaaggggaatctgtttcatacggttttcattagcgactgaaactcgcacggggggcgggggaaggaggggtctgcatccctgggctcgcagaaacccagtcagttattgcagacatcatttcaacatccgctggcaaagacttaaatgcactgattaactgacaggtgcggcttgtgatgtagtcatttacagttgggaaaagcctattgtctttgtggaaggcagtcttcttgttctgctttgcatggagaggagaggagacaacacgaaagggaggaaaagtgagggttggggagaaacatgcggagaatgggaaacagaatactgtaactcctaactgttctctatccttaaaaccgaagatgtgctagcatgactaaaaacagtgaataggaagatcttcctaggagtaaactgaattattttgtaattggaagggaagaaaaaacactttagataaaatgagatgtgtgtggcatttagaggactgggtggctgtggatatttgcttccctgtggatatattttcattttcatcaaaacattaagcttggattagtttttaagtgaaataacatcagtattcccaaaacccaataaaagcccagtggatccacaggtacatctgttgtactaggtgcaatatggagagattgtcagggggaaaatatatcttaatagaaacagccacagagggtgaggttagtggagaaacaaaataccagaattttccaaagaattccgcctccaacccccaaaaaaaggaagagaaaaaaaaaaaaacccca

SEQ ID NO: 9266 - DNA, 6000 bp, Homo sapiens
agacaggcgattctataaccaaagccatttttcttgtgatttcttgctgtctaaactccatgaggctaaggctagagttacattgctaaactgtcccagagatcagatcacttggctcttttaatctttacttaaataatctttaattatttgctcttcatttttcctggaatgtcaacaaccctactttgtctccacctatggaaatcttgtgggctgcactcaattgttcccacctctggaaggctaccttcaaactcccaggtagagtaaattccccttcctgtgggcttctagaatattatggtcctataacacttatcacacaatatcatggttagctatttgtccatctttctgctgaactataatttactccagtttaggaactggagggtctttggaactcagcaaaaagaagacatctgatttagttactaatcaaactaaattgacatgataccaataacaaaggtttctattagtaacaagaaagccctgctaggattctcctggcattttgaggaaaagactatatgcataataaaatctcgtgcatcttaaatggaattccacattttagtgctgaaattcacgattttattttaattgggaaactgacaaagtggaggaggatgggaatattgagggattgaggagcaatgattaggggtagtaatagcacctgcaccatggattgcaaagcattctatcactcacaggattaaccatcatagccagtgctgctgggagtcttccccaagccctgtgaatgttctgcactgcttctgagagcccattcctgtgcttctctgtgtgtattaattttaacagcctgctgcccctaccaccatcttcataagattgcccttgggctatgggagccacttccatttccattgcagatgcaggaagccagagcccttgggaaattgcatgctcccatcaccctttctactctcagtcaaagactgatgggcagcatcatgaaagcccagctctcttacctaggatgctattttcactccagaactccctccccaggattaggcagggactgggtcttgtccttgtcctaaaattgtaccctggcttcttcccttcctgacttgctttccccacaccactttgggttcctcctgggagtactactttaataaattgcctgcgcatttttgtctcaacgtctatttccatataatctacctccagacaagattttaattttgtggcttcccaggacaagcttcttgctagaaagacccaaaggcaagtaggtcctcacctctggcctgtgaggtctggaaatgggtacacattatgctccaagactcacctatattccaaggaatcattttcaatgcctctaggataaggatggtgagaacaaactggagacagctggccatatcatgatgcacctgtggagggctctttaagctgctagattcatggaagattctgaggaagttttaagaactgttgtaagcttccataaatagctccatatctaacccaacttaaatagaatttattccaaggtaaaaatattttttccctctcatcacactttaaggttttttatgtcttgattcaagccaagatgaggattggaaacattatagcatttttttttcttttttggaaattattcttgggaaacagttctcttgaaaaatttggttcttgtgaactcttctgcccagtattcagatgtcatttcagatcttcatagaaaaatccagacttctatgtattttctatgcaaatttgacacaactaagagtctttccgttaactgtggaggtgggggttggggagcagaaagaagtaaacacaacttactgaatagtcatttatatttgtttttatcttcggctaaaaggtcagtaaaattaaccatgttcaattatgaaatgattagctatgttatttcatgtaatcttatacactagatttcccactttactccttagaaccagaattgtgaaacaaattttactcattggatgagagagagattgcatggcagaaaatattattttgtcaggattaacagtttgtcctatttcccttagttagtttcagaaatttccagaaatacttagatcattcagttgttaaagcatgcttaacaaagcctggcctctatgacagaagtcacatagacgcgcattttagaatttccccactcacctctcaaccctgcagtcatacatttataatgtctcatctcctttggtaaactgtcagatctgcagcctcaaaatctaattgttgacatatcaccaaatgaaaagtaacaaaaacaggtaaacatcaccaaaatgaagaacattgtcttagcatttaaactttaaaatgtatttctactactctggactcattttttccttccatcatctttaaaattgttataaatgagtatctgctccactgtgtatggtcctgcaagaactaaaacttcccagagtattaaactgtggttaaaattcatgcagtatgtaactcgatgctgagaagaagctacatatgcatatgtatgctcaaaatataagaatttaagaaaaatgtacgataatgaaaaatgcatggattgaaagtgaaaagagctgttttgagcttcaattcatcgctctgtagctgtgtgactttgcacaaatcacttatcttctttggcttccatctccttgcccttaaaatacaactaatcatgcctacattttgatctgagcatggacttaacaacatttctggcagtgttttacaaattgaaaaaaaggtgttcaaatgttagtttattaagtaaagcttaggctggaaatacagattaaatataaggagataattaaagttccacggtaacaaatcatgtcttccatatgtaatcttttgtcaacccacttgacaaatatgcatattttttgagggactatgatgtgccagatattgctggaaagatgtttggtgaataagacaggtaccattgagctctagactggaacacagatggtaaatggaaaagcttgagggcaacttcagacagtgataagtgagatacacaacaaaaggagtcttggggcacggacttggatcaggaccagatcagataaggacctcccagaggaggtgccattcaggctaggacctgaacaatgagtcagctcagtgaatgaaggccagaggggaccattccaggccgaggaaacagcccctgcaaatcatcccacctgagcagctggtatatactcagatcctttaattctcagttttccctctttcatcgttctgcacctctgtgcttacctgttttctatgggacttttagcatatcctcgcgggaggtctatctgattctagactccgggagtaccagctctaagaagtccaaatctcgtgtagcttcttcatcctcctgccctgaacccctgggagcccagtgtcttctttccagggccaccatttatactcccaggctgaaaaggagtcccttgcttccagggaaagaaagagcaaaagagaaggagactgaggcataccatctccactgggaaaacagaaatggaatgatttatgccctgagctttgagtcagcagggagaggggggagaaaataaggaagtctcagcccttccttcctaaagacagaatgacaccccatcccttccagctcccacttagttcaagcacccagaacagcagcagctgcacttggggtgaattgcagagcccagtactctggggagaggaagtatcattcatttccaacagaagcaaagtgttcctcaccctgtctgctctatgtcaaaccagatgccgtggtctggccccaccgacatgcctgggcaggggacgtgtgggtatatcatcgtctcccatgggaaacagaccgtttgcgtctcttggcattgcctttggaccagtgtagagggctctctctaggggaagtgcttttgaaaaacccattccatctcttaggattgaccacgatccccatgcagtctggccgtgagaaggccaggagagcacatgagccttggacgggcctcccttgatgtggtggctgcaagagtcactttgcataggatggacatataaccccattcccgaaagaagcttactgcctctgcttccagagatcttccattagaagccttcttcaaggatggaattctgaccatttctcataaagatgccagactatgcaagaatgctggaactcagattccaacatgtatcccgaagcccaatttccatgatccagaagaaccaaattttgcccatgtctattcagcttatatatatatatatatataatatttatcagggaaagcagggcaatagaaaaaaatcagctcaataaaggggttgagctaaaaacatgagttttcctctgtggcattttgcttaggtatgtttgacataggtatagtctgtatggattcattctgattccaccaggaggcaagagattttgttaatattcatttggggaggagagaggaaagagaaaaagaaaacatgggataaaggagagattgttagaaaaggtaatctggttatttatttatagtttacttagccaaagggaccttaaaatgctttgataagaatggccaaagtttcttcaaagattaactggcattctttaaaaaggcatcagttttcttttgcacaggtgtttggagagcccggactggatgcccactagaatcctgtgctggtttgtagatttccttaagaccttaagacatgctgacatcatggtctcctttctcagattccttctctctttttctctttctcccccactctctctctctgtctctcactttctctcctttcctccctccctccctccctccctccttccctatccctccctcctctgcccaatgtctcccaatctctttcctttctctcttcagttcctccaggtaattcttactcaaacttgtaccaacttgtttttgactgacagtgaacagtgagagagttttcttcattttgaggaaccctaaacacctatctttcccaaggcaacctgtctggactgagcatttctctgacttgacataacttcccatccagccaggagtctgcactcttcagtctttgcaggtaagaggtacacggcgcttatgttaactctggggcatgtggcacgctggaggtatttttgaaaaactttacttctaaaggtaatgaaagcgttgtgattcttttaaagcttatttaaatcatttaagacgcccgtgcttatctgggggaatttacaagtgctgtttgcatgtggaaaacgggattttacttaatgatgggacaaaaaaaagtgttttattcttgctcgtgaaacaatatccagatgtcgtcttgtttgcggtgggtgtacgggggtctagcttgcgggacaagaattactccgacttctctttgcaagggtctgtcagagcaagtttgttgattttcagcgattacatagttctttggctaattctgaagcagttactttcctttgtcaatggggaaatcagtttagattgccgtaaggcgaaacctcgccggaatattttaaaatctgttacctatccttttgagaaaagttatgtaagttttctgtggtaggtgtaaggaatgtaaacgatcctgagtttggaaatattatgaactttgttcatgacccatgattaatatgttttttaatctgtgtataatttcatgagagtttagactatcctcagctaataaatgttatactgggtgaaatttccacattgctcctgtaacgccaacgtttgtctcctctgtacttccgcatttagtcacttgaaggaaataagaatttattgttcaatagacatttcttgacctcataatttcttttaacccacaggttagaaaacttacaacgaatgtagtatttgactgtggaaaactaaagaccaaaaatgtgtaccattaattcaaatgtttagatttatctttttcccctttacctgt

SEQ ID NO: 9267 - DNA, 6000 bp, Homo sapiens
agatggctctgcagttacgactgtcttataaaatattaactgccttgcggtatgtttttagttaacgagatggctctctagccagaaagcacccagggcaggggcactggatggggctctgctgacatggagcgggtgaaagggagggcgtcttcacctcctttgtctgttaagggggctctaagacacctctctgggggtgttgctgattgtgataggacccaactcctgcagtgggtgctcgtcgagcacatctagttgcagggtggaccgggcgaggactgtaccgtccagcagggcgcagctgcgggtgtgtggggacactgtgtctagttgcagggtggaccgggcggaggactgtaccgtccagcagggcgcggctgcgggtgtgtggggacaccgtgctggccactctggagggcagcttccggccatgcttgtgcagagcacagtgtcctgaagaggtgacagtgtcctgagtgctgtcctacaccaggggctatgaccgccttcccaccactttgcaggcaccaggatggtgggttagtgagatggtggacatccttgggcgcgccagcaccgctggctggctcatctgcggagggccttccagaggcgtgtgctctgggcagtagtctgggcagcaggcctgcacacccagggaggaaatgagggtggcgggtcaggcagtagtctgggggcaccctccctcctcccagatcagaggccacaggacctcttcacttccctggacatggaggccagcagggcccaggaatggcagccgggtatcgcccgctggtggcaaggaaggggcggacagtgtggctttgtggggtgaaagggcgtctgggtcacttgggaaaggcacattcgccttctcaggcatcagagggcagtccccgtccctccccaagccagagagtgggcagcacacagggtggagttagacatccatggggccccgtggccagcacctgccgcgatggggactgctgggcttgatctttctggctgttcctgtcccctccactgtgacacatccagggagcaggccctgagcctgccccagccttggggtcctgcctctctcactgggaatggtccctggcttggggccacatctggggtgctgggggagggggctgcagaggtcttcgagaagggggtcctgggtctcgttgtggggggggtctcactcaggcccaggtccccctgcgactcctgccctgcctttcccgctcccgttggccattcagggcttaaagataatcgcggcactcgccggtttaaaaggagacacgtgcccccaaccctccgaaggcacacatccgcgcgagggtccggttccaggtctctgggggagggcgggctcgcaggcggggtgtctgggcccagccttccctggcgtgtccttggctctagctgcgggcgcgggacgcggcgcgggagacgctctccgggctgagtgacgcagagcgctgcgggcggctccactgcaccgggcacgcggcgcacgctcgggcgagatgtggatggccccgcggggccagggcggcggtgctgcgcggggacgcgggtgacgccggggcgcgggcggctccgagcaggtaggtgcccgccggggccggggcgagggcgcgagcccgggtgcggggactgaggcggccgtcccgggagcttgtgaaggttgaggcggggtgcaagggcgcggatcggggtgccgagtgcgtgcaggggtgcggggtgcggggaccgaggcggccggccccggtgctgctgcagggcgcggcggaatgcaggggcgcggtggggtgcaggggcgcaggcggggttcggggcgctggtgcagggcgcggtggggtgcaagggcgcaggcggggttcggggcgctggtgcagggcacggcggggtgcaggggcgcgggtggggctcgaggcgctggtgcagggcgcggtggggtgcaggggcgcgaaggggctccgggcactggtgcagggtgcggtggggtgcaggggcgggcggggttcggggcgctggtgcaggggcaccggtggggttcggggcgcggactggagcacccagtgtgcgcagaggcgcggggcgctgactgggagccgggtgcggtctgtctgcgggacgccttgccgctggagcgaccctgtccggctggcgcgaggggacccggggatgagggactcagccgtcctcgtgcccctgcccgtccgccgggacagcaggccccgcttctggggcgcttacttcctccgtccccgcacccgcctctgcctgcccagtctccgaagcgctggctttcacgcggggatttcagaagatgcccgagcaacctccagagagggcagggaggccacacggtgtaccgagggagtgcagggcgcgcctgtcccagtcctgctggtgccagaggcccgccctgcccagacagaaccttccatttccccggggaatctgctgggctgggctgggctggctgggggcgggtgggcacaccaggatcctctcgagtcgcctggtcctgggctcgcgtgccaacgagtcttcttgaattcggcctaggtgatggtggtagtggtcttcccgctgccacccctgccatgcgggacccccggggctgagggaggggctgctcagtggctaaccctgaagggtagggaatgctgccccaacccacactccctggggctccactgccccctttctccgggaatagctctgtgcagggcttgggtttggaaatccacccacatggggccttgccttgctcaggcctgcttcatgcatctgtcttctggaagctcatttcctgagtgctctcaacactcacacctgtgccagttgcttgtggagaattttagctgtgaaccagggtggcccaagctgttctcaggtgacttgtgagaaagggattgagcctgtaattttgggtagaagaaccccagaaagggctggatgggcccttggaaggtcgttgccaggcctgggttttcagggttctgcacccctgggctgaggctgaggcacccgtcctgttgggcactgggtcgagccattggcccccccacagcgggcatcagatgctcacaggggctcctggctgcctcctgcaaagtcgggtggtgctggagcaggtctgacctgcttcccagggcctgcttgcctctgggattagaggaacctgcacaagaccccaggggctgtgctgaggtggacagctgcctgaaagatgagcgtgtgaacagaacatgctggtcttaaggcagagagtcccacaccgtggaccctcccgtctgatgctggggtcttcgtttccagcgtggagccatcctcatcccgtgcagggtggaccgcctgcctggggagccacctgcagtctgggtccccttgcggtgccactgcgatctctctagagcctcctcttcctcctgccactggggacatctctgcccctctgcttccctcggaagctggttgtgaagccgggccagtggctgcggggacagctcatggccctggaaagaccccactggcatgcggcacaacatctgctctgagaactgcaggaaaaggccgggcagggcacccctgccatcctgccagtgaagtttacgggtctcggaatgagtgtggccaaggggcaaaggggaggagggagagggggaggtggggttgcctgagagtgcccgccccaggacagcagcccgtagctcagccccaagagcccggcaccgagcttcgagctgcgtggccccgaagaggggctcagtcacctaatgtgatgaggggacggcagagcaaaggcttgtctgacagtgaccgtcgtgtgtagtggagaggacgtggccagagatctggtttcagggcagggatgaggggggattccagtcagatcttttgcatcccagcaaccctccccttgacacctttggggcagtggcaggggatgaccatggatgacctcatgagaacactgtgggtgtcagggactcagggaggccccgcagggcttgaacatgcttatgtttctcatttgtaaagggagggcagtcatccggtggcttcttgtggcctcggtgatgaaggccacatcagagccagggggaaaggatatgagagaaaaagattcatttgaattattgtctttttcctggagtggagagatgtggtactccccaaaacttcctttctaggctgggcacagtggctcacgcctgtaaaaccagcactttgggaagcggaggctggtggatcgcctgaggtcaggagtttgagaccaacctgaccaacatggtgaaaccctgttgctactacatacaaaaaaaattagcagggtgtggtgattggcgcccataatcccagctactggggaggctaaggcaggagaatcacttgaaccagggagaccgaggttgcagtgagccgagactgcgtcactgaactccagcctgagcgacaaagtgggactccgtctcaaaaaacaagaagaaaaagaaacttcctttgtggacagtgagggctatttaaaaaaattttggaatatgaaagtagtcactggtgtctggaagcaggagctgtgcagaattgtacagttgcgaaaccatgtcgctggcagctggtgctggcggtggagacttccctgtgcggtgctcagtgcagctgcacccgtgggggagggagctctttctctggccctgcagtcacctgaggttgttaccattatgaacggccgctgggacccccgcatgtgcatgtactcccccagagtgtccgggggccccagccaagggacacagctcaggcagctgggaacatgtgcaggctgatgaagagaaccggatgagggcttcacatgaggaagcatgtggccaggtcctctcagaacatcagcctcatcttcctgtctctgatctatttcagcaaccaccccatgtgtctctagaaccccagtgtagcgagctggagagaggactgtcctgagggcagcaggcctggttgcagctggcgtgggggtctcagaatggagccctcagccctgaggaaagctggctcggagcaggaggagggctttgaggggctgcccagaagggtcactgacctggggatggtctccaatctccggcgcagcaacagcagcctcttcaagagctggaggctacagtgccccttcggcaacaatgacaaggtaggctttctgctggtcagcctgcagttggcacgtggccacggaggtcaccgttgggcaggtcatagcttgaggctgtgacgacgggggtgggaaagggtctgctgaccttgggggctcctgcccaaccatacctttgggagaacagaactggggagggtgatgcgtgtctcgtcttctgtgggttgcatgaccatttcccatggttggtctgattgggaaatcaccgggttaactcaaaaatgttgcgctagagtcctggaaatctgttacccgtgcttaccttgttgcataatgatttcacatcctttatccgattgggagggcctgggcctgggctagctttccccaaagccctggatacaaagacacaagtatgttgaaagcacatggcatcttgcagtccccttgccaggcaggcaggagggtggctgccctttttccgatggtgcaagatccaggtccccagatccccagcctccacgttttccaccacaccatgttgttcccaaggaaggtggtggtgctgtagaaactgtaaagtgcgcgcacattcaaaatggtcccaagaggaaatgatttcttagattcattcctccctcctgaatccccaccggagagtcttggcaaggtgcttctaatctttggctcagggtcgcgcaggcttccttccttcaagcaaatagtgtgaaagctcctcaaggagctcagatgtgtctccagggggctgggtgtgctctttcgaatgttggaagatctcagtgtgctgtctttaccttcagcaagaaagcctcagttcg

SEQ ID NO: 9268 - DNA, 6000 bp, Homo sapiens
tgaactctcagagaggcagatagatgagcaatgagtctgctgacccactggtaaccaacagtaggaactttctgaggaagacacagttaatggcgccacccttgactcatatatcagagaagaggagatggagggagttgaagggaagaaacagtggaataggaaggcttggtagcaccttgccaactcagttcagatgaaaagcctgagagaaactgagagattatcatttggctggcagagcagagttctcagggtcctggaagctggctgtcttcaagcctattaatggttaatgtttctcatgctcttttttgctaaatttgacaaacctattccccttcctcctcaaagtcaactgagttattcactcagttaaatctatcatgacttaaaaagtatatgcttagcttggagagggggttacatctgttcttgtagtcacataattactggagacatgaaggaagattccagcaactcaggcgccttctgaacaggttgaatacctggtttttatgagcaacccgcttcagttttctgagaagctctgagtaactacaactaaacaagtctattcttgaatatgtttataataaaaaaggaaagataatgcagttatttgctaattgctgcaatgattaaagcaagatgtttcaagtttatcctttcataagaccagcagccttttgaacacaaacaggatctgacaaagatagtaataatgaaagcgggagaacaaggaaacaatgccagttttcttcagaacaatcggttgccactgacttctaacctacctacagtttcaagtttctttggctgggactatattctggtttttcagtgctgtactgtgattaagccaaacttcagcaaaaaaggaagtgctgcattgtagcagtattgaaagttatgtaggtggattttttaaaaaaaatattacagcctaaattttcttagcaaaagtcaaatgagtaacaacacacagtttggaaacatttggagaggagaaaacaaatatctgacaagagtacttaaaatctgaaaaaaaaaaaaaaaaaaaaaaaaaaagaaagtgggaggagagtgagaaaaagcccctgacaggtaatggtggaaacctgacaaatggaaggtcattctaatgagagaggcggcctggtctcatggaaagagactttggcctttggaatctgaccttcctggatgtgaattccaggtgtgcagactcctggcagcaatactcttgggaaaggtgcactaatgttctgagcttcaatttcttagtacattatggggcatatgggaaagagacagaggtgggctacttctctctccactccaggatgccaccctcccactgttccccaccttccttcttccccaggaccaggctgagctcaaggcttgtccctaaggcagctggtgaaggaaaggttcgacttggtggtagaagccctggactggagtccccacctatgggctgagggatcctccacaagtgattcaacttcttagtttctcacctacaaaaggcagggaaattcctgccacaggacaacaaggaagttaaatgacatgattttttgtgaaagtgttgtggaaagcacttctgtcttctatcttatgaatcagtagggaatgagcattctcaaaatgaccagaatgattcctaatttcctttctaaggacctgattcccttttcatacgttctttttgttctaaaaacaaaacaaaacaaaacttactttgtaaagaaagcctgaattccagagccagagtctgtccgttaaaaactttcaagctttttttttaaacttataaaaggcgttataccctatagccactcaaacttgtataaacaagagttgcaatgtgaaaaaactcacttgctgggtttgcctctatgaacaactattgttgtcaatgcaaattgaatccgaaattacccttgtcattgtttttttctggggttgcttctttcatttctgttaaaaatacacagaaacattaaaaaagtaactatctcctctgttttataaggagaagaagggataaagaaaaagaaaatcaacttggcatgcaagtgagccttgctctggaatttgggtgggtctaggaaaaagcaccgacctcagtggaaaacatatatgggtgtgtgggaaatccctgtaaactataaattgactacacagtgcttaagctggtgtggagagaaaccacaatactctctgaaaccagagaggaggggacagagagcaagttttgcacgaggagagcacaaagtgtccctgggagacagagctgctggtaattcttagcaggcttaactggatctattgaaagtgaccactgtaaaacaccactgttgcaccctggggttctctgtgggatgcccctacttgtatcatgcaggaaccctatggcctgactctgcttcacccacacttcttcccaccgctccccagcaaggccccccgccctgttcaattgctcctgtatgcttccccacttcactgccattgcctttgcagctccaattcctggaaagcattctttcccttttctattagaatctcattatgtagcttcgaagcccttcaaggcctgtcaagactcagctttcccttcccgatggggccttacctcttctacactttctaaatgttatcttctccaggctgaacaaaacctagtgtgtctctttgctactaaggactaatcagatgctgtgtcctgattcattcggtgttggtgtatcccatatctccaatcagattacgagcccctggagggctgacagcacgttggacttggctgagctagaatcagctcccttttgcaccctgagctgagtgcatgcagctcagcatttgtaatcctagcctaatgcaatgtgaaatttattatctctctttttacaaatgaggaaactgaagatcagggagacagtgtgacttgtccaaagtcactagcccagttgcctttcagaaggcatctcactccatcttcaggatgaccccaggggctaggctttcacactttaactcctcctagaaggtcataacctgaagatctgagatttgaacccaagtctgtctggctcctaccctgtacctttcccactatagcatattgcctccctatcaccaaaatgcccaacacgaagttgaacatggcataatatcaaatgaacttgtgatcatcccgttttgtcaaaactaagagaacataaaaaaaaatcagcaaatttgaccagagcagtgtatttatggcaagaccaaggcaaaacttgattctgcattctttgcattatagtaacagactgaaaaggttcataagtgtattcatatttaagggagtgtgtaactgttctacctgggtcaatgtagaattccctatacgttgcatgcatcatcaggaatttcatatgcagcagataggcatacagcctggtttctccaacagccaaaggcatttctgagtggcaacaacactgatctggtgaagctgagtccatctggacattggggagccccaggccagcagggtttctgctaagtggacctttccaaatcctctcagggacaaaacctggttgggcatcttcaagaaaagatgctcttgtaaagttggtgtagctgcttaaataagccccgaatagagtctagtccgtctctctgtgcttttctttaaatttcccttcatagaaagctaaaacttaaagaggtttcagagaagctagtctgaccccatctcccagtatcattgagaaaactgaagctcggaggggctgggtcatttgccggaggttttgcaggacacagaagagcttgttctcctaatgtggcctagaactcttcaccaggcctcctcctatcccaggtggaaactaaagaggaaaagatgaagccaaactcaggcggaagcaacataattaaactggtttatcgtttggcaacagagatcagaggagtgagtggaaagtgaaaatcagtgaaacacttgcagtttaaaagaggcatgcgattcctgcttttcctaagcagttgaaatgtgtttatatgtctttcctggagctctctcattgctaatgtggtcctataaggggaagtcctggagactgagctgggtgtatttgagtattcttctcaatggaaggcaatgagcttgtgtgctacactgcttaggccacacgatcccccaagcctgggctgccagacgtcgccatcattgttccatgcagatcatgcccatcctgtgcagaaggtcactataggaacacatggcacagggaagaaaacgcccatagaaattcacatggtgcttgtctaaaccgaaggcaggtgagatccacccactgtcatgggaagctgctagcatgctcccatttgtttataataatttctccaccgttagaggctgctttaaaaagaaacggccaaaacctgcgatccggtgccacaattgagacagaaagcatgggaccatgacagttttaagaattactaaagtatgaggcttgaccagatcatttttccaaggatccagagccctttagagagaattcaagagggagaatttctggtgacttctaccacctctgaagaattaaaaaacttacttgtgctgctttccaggcctctgtggtagttaattctgcttggcagtttttgttgtcaaatagcttttaagaaatctggagctatctcagatataaataccttaatgatgccagaggactgtctttcacccataaaaactgaagccatgtgccagaagccctcgtggctcaagggctctgtccttggacacggatgagggcagctgggcggtgggaccgaggctctgcctgaatgctcagcttctgcaagctggggtggagagtgtgttcctgcctaccggctcagccagcacaggagcacgtagcctgcaggtgtgggttgtacacaggcttccccctgctgagtcagttccccagatctcttcatcacttccccagatctctgggatcttcagctgagattgggccccagcacctggactcaaggtaaggccccttaggatgcttgtagctgatcaatcagggtagtgcaaaggaagaggggaaaaagccacccagaccttaaaggagatttctggaagatccaatcaaagtgattcaccttaacctcaggcatgacttttccccattatctgctgtttttaatttcaagtagtataaatcttactgatctgaagaagacttctgcttctgaaactaccagcgcttaacaatgattgagccctactctatgagattgcaaataaaaatatattaaccttggcaggaaatcaactgattaatacttataccctacactctaaagactggaacctcaatttatctgcataaacagaggctttgggtataaaagtaaaatgtagttggttatgccaaagactgctttcaatagtaatgcaccaaacatgcttttgaaaatagcaataaactattcatttaggttagatatacaaataagtaactttcagagttagcactaagttttaagcctcaaagactttgatttcagtgacaagatgtgtaaatgcagcggttagaaaaagtacacatactgaggtttctttcaagattatatatagtattattcaaaagtcttattgtatatgaaaagtgacaagatttttgcaatatgaaacaacagtagctagctaatactctagttacctttacagattgtctagttggtcacattataccttaatttttcaggatccaaccaaggcctggttaactcttactggcaatgtttgaaagggatgaaagaggtcctatgcatattactctaaattaatcttagtgcaggaagacaagtcatatttgaataactttattttgtatccctagctactgtcatcctagtatttgaaaagctccttttctcccaatgttcagaaagtcattttccaaacttgcaaatattaaaacctattcatgt

SEQ ID NO: 9269 - DNA, 6000 bp, Homo sapiens
ctagctgccccacaagctgtcggtgggaggcttcgctccctgcaacatggcctctcacaacatggcctcccaaggagtgagggatgaggggggcagggagagggggagaggaggagagggagacaaatggagagtcagcaaacatgttccggagctgaagttttcatgatctcggagtgaccacctctcccctgcccatgttgctggcctcgccacccacctggtacgactcaggggcagaacctggtccaccctggaggctctgggctccacaccacatccctgaggcaaactttggaactcctcgggtggcaggtgcagcacacccctcccagatgcccttgggaactcgaatcttctcccttggtctcaggagccagtgcggtgggtagcctgcctgaccccctgctgaccgaggacctccccaccggctggtgctgcagatggttcagattcctgtggcaggtcagagccaggcctgggagaagggacaggcagcacgtgttgatttacattttttcagtgtcctgagaggtcttcaggcctcgtggtcatttccagctccgttctcgtaattgccattctgggagccattggcgcaagggcacctggcacagagagtttacagtggccacgctggctgcagtctttaccctggcgtggcatccatcgctgtcctttcacattttaagaacagttctgctgtatatttccagaatgcagatgactctgtggactccagagatgaaaagaaacatgtctgttccctcagcctgaagccctgctctagaccaggtgtcggcaaactgcagcccactggctagattgggcccgccatctgtttgcaaataaaggtttttctttctttctttctttctttttgagatggagtctcactctgtcacccaggctggagtgcaagggcctgatcttgggtcactgcaacctccccatcctgggtttaagtgattctcctgcctcaggctcctgagtaggtgggactataggtgtcaggcctctgagcccaagctaaaccatcatatcccctgtgacctgcacgtatacatccagatggtcggaagtaactgaagaatcacaaaagaagtgaaaatggccttaactgatgacattaccttgattcctgccttaactgatgacattaccttgtgaaattccttctcctggctcagaagctcccccactgagcatcttgtgacccccacccctgcccgcaagagaacaaccccctttgactgtaattttccacaacctacccaaatcctataaaacagccccacccctatctccctttgctgactctcttttcggactcagcccacctgcacccaggtgaaataaacagccctgttgctcactcaaagcctgtttgatggtctcttcacacggacacacgtgacaataggcatgcaccaccatgttcggctaattttttgtattttattagagacagggtttcaccattttggccaggctgatttcaaactcctggcctcaactaatctgcccgcctcagcctcccaaagtgctgggattacagacgtgagccaccgtgcccagtccgcaaagtttaattaatattagtgcccagctatactgtatttgttcattcttgcattgctattaaaaaacccctcagattgggtaatttataaggaaagaggcctaactggcttacggtcctgcaggctgtacaggaggcatggtggcttctgcttctggggaggcttcagaagcttccgatcatgatagaaggcaaagcgggcaggtgtctcacatggcaggagtaagagagagagacaggggcaggtgccacacacttaaacgaccagatcttgcaagaacttactcactattacgggaacagcaccaagaggatggtgttcaatcattcatgagaaatgcctccttgatccaataaccttccacactgtggattacaatttttttgagacagagtctcgctctgttgcccaggctggagttcagtggcacgatctcggttcacagcaacctctgtctcctgggttcaagtgattctcctacctcagcctccgagtagctgggattacaggcgcacaccaccacgcctggctaatttttgtatttttagtagagatggggtttcaccattggacaaggctggtcttgaactcctgacctcaagtgatctgcctgcctcggcctcccaaagtgctgggattacaggtgtgagccactgtgcctggcctggggattacaatttgacatgacatttgggtggggcacagagccaatccacgtaacatactgattcatttatgtagttgatcctcgaaccactcaagagttgggggcttcaacaccccttaaagttgaaaatctgtgcataacttttgactcctccaaaacttaactatgagtagctcactattgaccagaaggaaggcttactgatagcatcaacacatattttgtatgttgtattataaactgtattcctacaataaagggaactagagagaagaaaatgttattaagaaaatcataacgaagataaaatatatttacattaagtagaagcaggtcatcataaaggccttgccgtcttcctgtgagtaggagaagggggaggaggagggggtggtctagcatctcaggggtggcagaggcggaagaaaatctgcatagaagtggatccccgcagctgaaacccgtgtcgttcagggtcagccgaatggcccacggctgccttcccactgcaagggcagaggcgaggagctgggacagagaccacgtggccggcaaagcctgccacagcgaccatgcggccctgtgcagagagtttgctgctcctgctctagctgggacctccctccttcctggagtgtcctctgaggagcccgccgcctgtcacctgctcccgcgcctcactcaggaccagagtgtgccagtgcctgcggccctgtcactgcctttttctccagttgtggtttcctcctgctgccagagcagggccctttttacctgggcctcgtgcccacaccgtgagaaacactttgtgccaagtgctttctcctctgaactcgagaggactctccatggagattggtacctgccaatcgggttttatggtcgcgtgtcctctcttttatgggaagaatatcgtgtaattgctactgcagcagcgtccgggcagacagacgtgcagtgtgcggttcttctctagaaaggcaggagccgctcccagggcgatgtgggcccggctgtttcatcagagatggtcagcttggtacctacttcaccttaaatgatgttcccacagaggccccgggatacttggaaacaagcgcccagcccctctcgcagatggctctgcagttacgactgtcttataaaatattaactgccttgcggtatgtttttagttaacgagatggctctctagccagaaagcacccagggcaggggcactggatggggctctgctgacatggagcgggtgaaagggagggcgtcttcacctcctttgtctgttaagggggctctaagacacctctctgggggtgttgctgattgtgataggacccaactcctgcagtgggtgctcgtcgagcacatctagttgcagggtggaccgggcgaggactgtaccgtccagcagggcgcagctgcgggtgtgtggggacactgtgtctagttgcagggtggaccgggcggaggactgtaccgtccagcagggcgcggctgcgggtgtgtggggacaccgtgctggccactctggagggcagcttccggccatgcttgtgcagagcacagtgtcctgaagaggtgacagtgtcctgagtgctgtcctacaccaggggctatgaccgccttcccaccactttgcaggcaccaggatggtgggttagtgagatggtggacatccttgggcgcgccagcaccgctggctggctcatctgcggagggccttccagaggcgtgtgctctgggcagtagtctgggcagcaggcctgcacacccagggaggaaatgagggtggcgggtcaggcagtagtctgggggcaccctccctcctcccagatcagaggccacaggacctcttcacttccctggacatggaggccagcagggcccaggaatggcagccgggtatcgcccgctggtggcaaggaaggggcggacagtgtggctttgtggggtgaaagggcgtctgggtcacttgggaaaggcacattcgccttctcaggcatcagagggcagtccccgtccctccccaagccagagagtgggcagcacacagggtggagttagacatccatggggccccgtggccagcacctgccgcgatggggactgctgggcttgatctttctggctgttcctgtcccctccactgtgacacatccagggagcaggccctgagcctgccccagccttggggtcctgcctctctcactgggaatggtccctggcttggggccacatctggggtgctgggggagggggctgcagaggtcttcgagaagggggtcctgggtctcgttgtggggggggtctcactcaggcccaggtccccctgcgactcctgccctgcctttcccgctcccgttggccattcagggcttaaagataatcgcggcactcgccggtttaaaaggagacacgtgcccccaaccctccgaaggcacacatccgcgcgagggtccggttccaggtctctgggggagggcgggctcgcaggcggggtgtctgggcccagccttccctggcgtgtccttggctctagctgcgggcgcgggacgcggcgcgggagacgctctccgggctgagtgacgcagagcgctgcgggcggctccactgcaccgggcacgcggcgcacgctcgggcgagatgtggatggccccgcggggccagggcggcggtgctgcgcggggacgcgggtgacgccggggcgcgggcggctccgagcaggtaggtgcccgccggggccggggcgagggcgcgagcccgggtgcggggactgaggcggccgtcccgggagcttgtgaaggttgaggcggggtgcaagggcgcggatcggggtgccgagtgcgtgcaggggtgcggggtgcggggaccgaggcggccggccccggtgctgctgcagggcgcggcggaatgcaggggcgcggtggggtgcaggggcgcaggcggggttcggggcgctggtgcagggcgcggtggggtgcaagggcgcaggcggggttcggggcgctggtgcagggcacggcggggtgcaggggcgcgggtggggctcgaggcgctggtgcagggcgcggtggggtgcaggggcgcgaaggggctccgggcactggtgcagggtgcggtggggtgcaggggcgggcggggttcggggcgctggtgcaggggcaccggtggggttcggggcgcggactggagcacccagtgtgcgcagaggcgcggggcgctgactgggagccgggtgcggtctgtctgcgggacgccttgccgctggagcgaccctgtccggctggcgcgaggggacccggggatgagggactcagccgtcctcgtgcccctgcccgtccgccgggacagcaggccccgcttctggggcgcttacttcctccgtccccgcacccgcctctgcctgcccagtctccgaagcgctggctttcacgcggggatttcagaagatgcccgagcaacctccagagagggcagggaggccacacggtgtaccgagggagtgcagggcgcgcctgtcccagtcctgctggtgccagaggcccgccctgcccagacagaaccttccatttccccggggaatctgctgggctgggctgggctggctgggggcgggtgggcacaccaggatcctctcgagtcgcctggtcctgggctcgcgtgccaacgagtcttcttgaattcggcctaggtgatggtggtagtggtcttcccgctgccacccctgccatgcgggacccccggggctga

SEQ ID NO: 9270 - DNA, 6000 bp, Homo sapiens
gttagttaaactgaactttccacatacccctccttcctcagctagaaggtagtttagggctaatctattttaataaatagcattccttatttttgtggcttgctgggctagcagatttaaggcctttactgtatcatttgtcataattttaagtactgcttgtaaccttatgatgtggttgagcatgtaaagagttgtgtggtattccctacattccaccttctgcccaggtggctgggccataatattggattattctttcagggggccattaatcgtccttgcatttccctatggttatgccccttttatttctccttttagtttcatcatagacagggtaccctaaggcttctccttgttttaaagggattagaaagaaagacggtctaattgttcctagtacacaggcccttggccatttaactggcagttgccgatatgcccacagtccacaaattcaatagaggccggagggtgcctgtcaggcatttggagcttcaagttggtaccgagagtagcatatttatacccagcaagggcaaaagaggtctttaccctggggaggtggctgagcaaagtggcaaaacagcagtaaaacactaatattataaggaaagctactggacttaagatttctaaccatattgacttccctgatgatgactcgagcttcggccatgtgtaaactagtcagcttccagggtgactagagcagggctgttgcctcctcaagcttcggccgtgcgttgactggtcagcttctggagtgaccagagcagggctgtcattgtcttcaatggcaatttggtcccgtcgtaggattggccagcacagatggtctggatcctgttggctggtccattcatctcaggccgctggcttcagctgactgtggtggatccatggtacaattactgcaactgtaacggcagagtgagtgggcaagattacagtatggggcctatcccatatgggtctcaaagtggttggattccattttttgacccaaatagcatccccgggtttgaaggggtgtgccaggtctgtcaggcttatgggcattctttcccatacccagccatagacacactgcatggctatccctaaagcctgcatttgccttcttaaagttagttcccctagttcatggagatcacccttaacttgacctataattggggttgccggccgaacaagatttcatagggtgaatacctggtttgtttggtgggggtgcaccttactcagaggaggaccatgggcaagacctgatcccatcttagatgggtctcttgacaatattttttttagtagcgtttgagtgtccagttcatgcactctatgttttttgagctctgcagctggtaggctgtgtgtaatttccattttatttttaatagccataccagttcttgaactatttcagctacaagtgctggtccattgtctgacccaagagttggggcagtccaaatcttgggataatgtctcttaacattactttggttacctcccgtgctttttctgtttgggtggggaaagctttgactcatcctgacaaggtgcagaagagtactagcatgtactaatagccccctgctcagggcagctttgtgaagtccataagcaggttttcacagggtgtggctccaatttcctaaattcccaggggccgagtaggttattatgggtcattctgagcacatgttagacattgcctgcacacagcttgggtgagggcattgagccgtggcacatagaggtggcatcccagtagcgtttgtagtgccgttttccccatgtgagtctcttggtggaattgttttacaaacttaggggccaccatttcagggatggctagtctcccatcagagaatttccaccatcctccttcagtgcattttccagtttcttgggcaaaccaggccttctcatttggagagtaacttgggatctcggggagggaaggttctgggaggagaagcatagctaaggattccttttcaaagtgtggagtaatcattgctgtccgttttgcctccctgtctgcctttctgtttcctttggcctctagtgttcttgctttttggtgccctctgcagtgcataacagctaccttctttggggcctatacagtacctaagagctgtaaaatctcctctttgtattttatttctttttttcccagcagttaagagtcctctctccttgtatatagcttcatgaacatgcaatgtggcaaagacacacttttgtctttgtgatttggaatcagtgtaaatattgacctttttgtctctcatcagcaaaagagcccttgttagggccattagctctgccttctgggctgatgctccggtgggcagaggctgagcctctatcactgagtccaacgttaccaccgcataacctgcccaacggaccccttccagtatgaaactgctcccatctgtgaactacttaacaactgggtccctgaggggttggtctgtaaggtctcccctactcaagaatacttcatctaccattttcacacagtcatggagtggggttcccagttcaatcaggagcaaggtggctgggttaagggtgtttactgtttctaaagctatgtggggatttttgcataggagtccctggtactgagtcattcctggatttgataaccagtgatgccctctctggttcattagagttataactgaatgtggtaactggatggtcagctgctgccctagagtcagtttgttagcttcttgtgccagtagggcagtgacagctagtgtcttaaagcaaggaggctaccttagtgccactgagtctagttgcttggataagtatgccaccaggcgatgccacaatcctatgaattgagtcaggactcctacagccattcctttttgttcatggacatatagaaagaaaggctcagttatgtcaggcagtcctaagactggggcctgtgttaaggcttctttgatttttttaaatgctttctcctggtcagcctcccagaggaggggttccttttctctccccttgaatctggccatgttcagtataatagaggggtccctgagtttcccggggaggcatctgcaaagcccaggcatggccagactggaggcagcaggcttgatcatcctgactttcctccttgacctggggcagtggttttgatttttctttttgaggcaaggcccagggttcgttaccatttgaatttgactcctcgggggctggccttagtaaaggcgggtagattggactgtagggaggattcctatctcctctggtgattcctgcagaactggtttttcctgtggctttccctttgtttctgtagctgacagcgaagctgatttttctttcactttaagcttggcttgagccacgagtgttttgccataagctgtcaggcagagctgcaaccacgcaggtcagttttggactatatgtagccatgagtcaatataaggaaattggtctggatgccctggctgtcctcccaacccagtcaccaccttaaatacatggccaattgtttccctatctatagttccttcgaccagccatctcacaccaaaagaggtccattctatttcacagagagttctcaacctctggggggtcaacttgatcccacaacactctgcataacttttcttgaagttctttaacatacattgtaatggggtgggttttgacagcttccttcccatttcctcccagttatgacacaacttattcactcttttactttctcttcagactgattagaccatctccctcatgggaactttcagatgctgcttagctttaatggagggttcatatgagtcccaaacctggaccaccacaatcactgaattgtggggtgcctccctaagccatatgtggtagccccggaggacgtttgccactagtcctggttggtcccacactttgctaggggcgtatggtctatgctaagagacctgtggccccacacacttcactccccacattgactccttttagaactgcctctttcacatgcattcacacacttccctgctccccattccttttctctgggtggggtgtaggtttcatccgactttgtgagccactcccacatcctgggtcagactactcagtgcacccctaggagttgatcaggctccccttctgtccttatgggatgggtcctgtcttgggccccaaaccttaccacagtcctgtggcgcactatccctgaaatcatcctgtaatcccttggattctgttgcgctgtcagggaggggtactggatcacggaagaaccaatcccttctctgggtttaagttccccgatggcatgcctgaggtcacaggtctcccccagctcagggccccagacccacaggcaaaggagacagcaaacctgtcatctccactcctggctggttcaccaaaatattgcaggaatgaggagactggagagactactgggtggaacaggaggattttattgagtgtgctcaggcccagcagattaacaaccaaaggctgagtcctgaacaaaggcagggcttgatttttatacacacttctgaaagggggttggctagtttgaaacaagcttacagtggtgcaaaacgcagtggcgtgaaagcaggtaacaaaggcagtttatcaaacagtggcaggcctgtaactcaggcttgtttaagcatgtcatgtgactcctgctatgcggcccaggtggctgtaatctaggcttgctcaagcttatcttgtgtccttcactgtgtcacccggatggaaagcaggaacttacagaaaccagccacagaaaacaggaatttgcaaacttacaaaacttcccaggatacaatagcacacggggttgggtggggggtcggggtctcgagttgcctaaaggagaaaaatttgtttttcctctttttaacttttgcttcaataccacattttgtttatacattcagcagctgatgggcatttgggttgcatccactttttggctgttctgaagagtgttactgtgaacattcatgcacaaatttttatgtggaggtatgtttttatttctcttgggtatataactaagaatagaatgattggatcatataataactctgtatttaatattttgagaaattgccaaaatttttcttttttttaatgttaccacccataacgtttgaacattccaatttctttgcatccttgccaacacatgttattatctgtctttttcattataactatccttgtggttttgaagtagtatctcattgtggttttgatttgcatttccctagtggctaaagatgttgaacatcttttcatgtttttattgacaagttgtttctcttctttgggtaaatgtctatttagatccattattgttttttaaactcagctatttatatttttattgttaagttgttaaaaattcttcatgcagtctggatatgagcccattatcagatatatgatttgcaaatattttctccccttctgtggattgtcttcttttcactttcctgattgtattatttgcagcacaaaaatgtttaattatactattgtccaaattatctatttttctctcttgtcagtttttttttgtttgtttttattgtcatctctaacagcagttcacaaagtttgctttcatgtttcctctcaagaatttcatagatttagctcttctatttaggtttatgacctacctcaagttaatataatgtccttagtgaattatcttggcactacttattgaaattaagtagtttacttttgggctttcaattttattctattgatctatatgtttatccttatgtcaataccatactgttttgtttattgtagctttgaaataagttttgaaatcagtgtgagatcttcaatttagttctttttcaagattcttttggctactctagttcctttgaattcccatatacattctagaatcaccatgtcagtttctacaaaatagccatt

SEQ ID NO: 9271 - DNA, 6000 bp, Homo sapiens
gtgattagttcatgaagactttgcctcatgaatagggtggagctctcataagacaggttgaagggcccatctcttcctcttccatcatgtgaggacacagaggcgccatctatgaggaacaggccctcacctgacaccagagatgctggagtttgaccttggacttcccagcttccagtgctatgaacaatacctttctgtagtttacagatttcccagtctacgatatttgttacagcagccagaatagactaagacacacgtacactccctcccttggtcagagaagccaacagggccggggccaggctgaccagaagggagatctccaggcccagcccaaggcaagctcgccacagggatgcgtctcgagcatgagcacctgctgtgttgtcccggcctgggatgacgagggcacggtgttcatccctgtctctccctccctcacatcactcaccactgtcagacaggagagccacaagccctctttcctacttacacttggggcagcatcttctgttcttaactggctgggaacttttatcttcagagtcagagatctgggttgtgaaaagcaggcaagcagacaaacatctctctgcagccttctccccattctcctacccagtttccagaatttgggggaaaaaaatcccataagctgtcatacttcatattgccatcaggcagcagtgggaatggtgcagagaggagctgggcaaaggggcagagggacagctttctttgtttttttgttttcctccatgaaatggggaggtgtcaagtgagcgagatgtccccggccacacagtgaagcacaaggcagccgaagacacagcaggcaggtcaggtctgtgtgcacattggcaggctgcatgcagaccagcctcggcccaggtggagaagcagagggatctgcaggggaaccagggattcagagacctgttgttggggtcctgcagaagatggggcaattcaagtcaccaagccagtctcaccccaatggcctggctggttgcagaaactcaccagggacaaggggtcaccccaccacaggcccacctggacatgtgactcccctgcacccaccctcacaagcaccaagggcaggatcctcacgccagaggccaagtcctcagtgtgcccctttctccccttcatgttcagcctcagcagctggaagtccacagaaataaatcagacacttctaaaatgggacaccatagggaaggccagatggaataagagttctcttcccacagacctagacttccattgactccactcgaagtcaactgggtgatgctgttggctgcaagtcaaggccaacatgggctgtgctaatagatgcagaccctctagagggaaggagcacatcaccctggcctgttctgtcctgatcacactgaataggtgttctttggtggccctgaatttcatgagggacacgaggaactggcacccatcccgagaaggggaaagtgggacaaaagggcgtcttctaggaagccacactggagagactgggggcatctggtccagagaacaagggtctggaaagaatgttgttgccatcattggctggccagggcctactctggggagtgactccatgttgctatggtgtgcagagcagtcagggtgatagggagtccaattggacacaggttcagtttgctaatggtgacaacacttaataatggagtgggttgccagttgaggtagtgatatagtttggctgtgtccccacccaaatctcatcttgaattgtagctcccataattcccacatgttgtaggaaggacctggtcagagatcactgaatcataggggcaggtctttcccatgctattctcatgatagtgaataagtctcatgagatctgatggctttataaaggggagtttccctgcacaagctctctctcttgtctgccgccatgtgagacatgcctttcaccttccgccatgatcatgaggcttccccagccacatggaactgtgagtccgttaaatctctttcctttgtaaattgcccagtctcaggtatgtctttatcggcagcgtgaaaatggactaatacagacaggaagtggctccccactggaaattaccagctgtcagcaatgccttagcagaaatttctgttggggttgggactaagctggtcctgtcgagagctccccttgcctggttgatcctcagggttctacttagaatgcctcgaaaagtcttggctggacacccatgcccagtctttctgcagggtcccattggggttaaccttctcatttcatcccatgtgaaccaggccaggcccatcagggtttggcaaccccctgatgcagtggttgctgccaggtgacaggagcaagcctgcagctgctggggggccatgcagagacagcctgccagaggggagaccacctggggaggccagagccgtggagacagcaagagaccaggggctgaggacagagtagtacaggtctttggtcccagtagtcctgaaaccactgcactccgaacctttctgtacttagcttaagccagttggagtttctgtcctttacaaccaagagccttgataggaatggggtcctgtgctacgctactgttggcttctttcccgatcgggcgctggaggggaacacagcagtgactacagtgggatgcttactcggtgctgggcatgctagaaagtgcttgccatgccttatttcccacgtggtggggattttgaccccactgtacagacagataagtgaggaccctttcacttatcctgcaacagaaaatccagcagccaaagccaacaagggcccagcatagcatcttccctctctgacttcatcctcacgctccacacaccatccccctggccattcccagcagcccagtaagcactgcctcacacttccagttccggaccagccaggatggccaggctggatgggggccatccaccggctgaagccaattgcctattctcgagctgaaggtgaatcaatcccgcataaatcttcgggcagagaactgggtgggggtagaagagggggaatgtctagaaggaaattctgggcacattcctggaagtgaggaggatggatattggacagaaattatgtcattgcaggcaccctcacttgccctggccacatggacagttcctccccggctgtgttccgtgcctcctctcgtgctccagggcctgtctgttcctggagcgagatgggtcccagggctgggcaccagtccccatctccagccatcaggcactttcctctctgtgttttggcgtaaacactccctaggtttgtggatctgaatcctcttcccaacacactcaagctttgctggcctccctgcagtgtatgtttaaggcaccacacagcctccaaggcctggcacccgggcagtggcacctggtaaacacagcagtcagatttcctcatttcagccaagtgtaaaatcaaggtaatggatctactcttttttttttttttttttttttttttttttgagacggagtctcactctgtcaccccggctggagtgcagtggctcaatctcggctcactgcaagctccgcctcccaggttcatgccattctcctgcctcagcctacatagtagctgggactacaggtgcccgccaccacacctagctaattttttgtatttttagtagagacggggtttcatcatgttagccaggatggtctcgatctcctgacctcccaaagtggtgggattacaggtgtgagccactgcgcccggctggatgactcttgagacaacaccattcagacaaaggcaaggcctcccacttaaactcataaccgtgtctcctttctctccttcgatttgagcggctgaatttggttacagtcatctgacctgtgggtgtgaagtccacctgcctggcataaaaagctgtgcctcctttctaggtgaggagaaagagagagacctggctcatctgaggtgtggttgggaggggggacccaggtgtgctggaaatgaaaagaaatgcattcctgtttttcgtcccaacatgcaaacaactgaacaaaagcattagggcctgagactgggagtaaagaattccttgtcaccatggataccaggaaatggccccacttatatataataagggctttagagatgctggaccatctgatattccagcctggggccacatgggagtgtgccctggtgttattccttatacagttccatgaacatggctctggaaacacctctgtctgcagaaaatgaggcttttctttttttgttcgggggtgaacagagggcagaggcctgggcatcttcactcagcacccctttgtaacccagcacttagcaccatggctggcgcacagcaatgtcacatgtgtgagtgcacacgatgcctcactgccaggggtcaccccacaccggtgctgttgggggcgttggagtggttatctcttctttagtcctcaagctcctacctggcagagagctgcccaacaccgtcggggtggggtgggcgggaagggaagaagcagcagcaagaaagaagccccctggccctcactctccctccctggacgccccctcttcgaccccatcacacagccgcttgaggcttggaggcagtggatttccgagcctgggaaccccggcgtctgtccggtgtccccgcagcctcacccgtgctggcccagcccccgcgagttcgggacccggggtttccggggtggcagggggttcccatgccgcctgcgaggcctcggctcgggccgctcccggaacctgcacttcaggggtcctggtccgccgcccccagcaggagcaaaacaagagcacgcgcacctgccggcccgcccgcccccttggtgccggccaatcgcgcgctcggggcggggtcgggcgcgctggaaccagagccggagccggatcccagccggagcccaagcgcagcccgcaccccgcgcagcggctgagccgggagccagcgcagcctcggccccgcagctcaagcctcgtccccgccgccgccgccgccgccgccgccgccgcccccggggcatggcctgtctgatggccgctttctcggtcggcaccgccatggtgagtgagcgcatccttcgtccgccgggaacggttttattttcaaggagagcaggaaacacacaaagactcgcaagctcgacctgacacccctcccaggagcgcgtcctctgggcgctgacccagggcaccctagagtggcgcccggctccgatcgctgcccctgcccctccgccagggccacctggagcctcgggatgccccttgcaccggcagagagcacggactaggtggaggggccgggagtggggcgggggcagcgagttgccctacaagttggaccgatggccttgacctgatggcttctgggcggggggcgtggggagctggggacccggagcgcactggggactggggaggggccgcagcttgggccggagggaagaggggacttgaagaaggggagccccgcgcgcgcggctgtgggcttggggaccggggacttctcgcgccatccccaggaacgccaggcaaggtctgggggaacaaaagaggaagctgcccccagagagccggagcctgcgactgcactcccggggacaccctctcccggacccactcggggaggcggcggcgaaggcccggggagacccgcgaggggcaagcccggattcctgccggccgcctttctgcgcgcgccggagagagagacgcggtggggacagggatgcgcatttcacttccccgagctccggagagggatggcggggtgtcggcgagttcactgctggacacagttactgtaagtgctgtttccaggggtggtcaggaatctccctttctggttttctggcattaggaacaaacaacaaaccaatcatcaggcccccagccacccacctcaccttatcctagcgcccttcatgtctacgcccagcacacca

SEQ ID NO: 9272 - DNA, 6000 bp, Homo sapiens
gtggctgggctcacaggtgctgggaatgccccatcatcacactcagctgccacacaggaaaggacagtggcttgaatagagaacagagaccctcagtgtttggccctccacctctcaggagtgaatcaagcacacctaaaacgagttaatgtggctggaggcactgatcacccccaggcagccccacactcaggcctttcccacccgaggcactcgttagaggcgctggcagcctcagctgccccggctggagaagccacaggagccagccaagggcaggcgctgcaggagcatgggcggatgacaccgatgatgggcttcatggagatgcctgcagacaatgccagcagctaagggagccgcactgatctcaggctgcaggaaaggtgctgtctcagaagtgggttctgctctcctctgaggggctcaggcccctcaggagagctgggggtgggggagtcacaacttcttatggggggagctgagaaatccaagtgcacccagaggtaggtggccagagagcagtggctgaagggcgtgtcctgctggatgtggatgggctgattcaagaaaatgatgaaaacaatttttatgtgtagacctgatttgcccaagacaggttcccaagtcgtttgtggaaaaggaaaggcaccccctgactgtcagtcacaggccggtgacctcaccactgtttgggtgattgcattgctgttattatagacgggttgcaacattcagctcctggcctggttcctggaaatggcatgctggggaccctaagaaatgatgcacacgtgggaagacaaagctgaccccagcagcaggctgtgggtgagaggcagcgcagctgtgggaggccagcctcacctcctcccctctggaaacagctgtgtgttcaggggccatgctccagagaaggaagtgagcagccaaagactgggaagtaatgcttgtaaatatgctaaaaacagaagaaaagatggacatgaggggtgcaaagagagagcatcccagtggagaactggaatctgcaaaagtcaccaattaacattccagaagcacaaataactatttgacatgagggtattgcagatggctttaagagcaggctgcatctagccgaacataagattaatatgcttcaagatggatcaatagaaaacatccaaagcaaatcatggagagaaaaaaatggtagaaacagaacattatgttgatatagtcaatgccaacacaggtgtgactggagtcctggagaaagggggagagtggggagggagagggagggagagagacagggagatgcaagatttgaagaaataatagataaatattttctaaatcttatgaaagacagcaacccacagagtcaagaaattagatccaagccagatgaataagttcttaaaggattatactcaggcacaacatagtcaaactatctctaaacaaatctatcaactgttatcattaataaataatcttagaaaattcactaaaatgtgaaaattaaacagtattctcttaaataaacgatagttcaaagaagaaatcacaaaggaaattggaaaatactttaaaatgaatgaaaataaatagaaacaccacataccaaaaggtccaggatgcagcaaaagcagcactgagaggcaaatctatggctgccaatgcctgtatttaaaaaaaaatctcagataaataacctaaacttcctcctgagaacctagaaaaaggagagcaagctaaacccaaagcaagcagaaagaaggaaataaagattagtacagaaacaagtgatcttagcaaggttgcgggctataaagtcaatatacaaaggtcaatactattttttatagactaacaccaaacatttagacagcaagactaaaatatatcatttacaatgagataaaaaatattaaatacttaagaataaatacaactcaagatgaacaagaactcaaccctgaaaactttaaaaatctgcagagagctgggcctggtggctcacgcctgtaatcccagcactttgggaggccaaagcaggcagatcacttgagctcaggagtttgagaccagcctgggcaacatggcaaaacctggtctctactgaaagtacaaaaaattagccgggtgtggtgcacgtctgtagtcccagctacttgggaggctgaggtgggaggatcacctgggcccaggaggttgaggctgcagtgagccgtgattgctgtactccagcctgggtgacaggagtgtgaccctgtcccaacaaaacaaaacaaaacactgcagagataaattttaaaagacaaataaatggagagctattctacatttatggatcaggacatttaatgtgttaagatatcatttctcctcaaattaatctatgaatgtggcgtagtcaaaaccccagtatgcttgttttcttctttctctcctgctcccttttttgaagacaattgacaaggtgattctaaaatttatacagaaataacatccagaacagccaacacaaccttgaagaaaattggagaacttacactatcatatttcaaaacttagttaaaaactaccgtaattaagatggcgtggtgttggtacaagtacagataaacagagcagtggagaagaacagatggttcagagatttaccttcctcccatatacggccattggttacatcaaagagccagtgcaatgaagacaggagggcgttttcaatccctagtgctggagacactaagaaagcatttggaaaaaatgcacctttcagcctacatagaaattaattcaagatgcatcataaacttaaatctgaaaatgaaaacagtgctgcttctagaagaaagcaaataaatgtattttcatattcttcatttcttcagagatttcttaaagaaaacacacacatactaactataaaagtgattagatttcattaaaactaagaacttctgtcatcaaaaaacaaagacgaaaactgacatcattacaaaattaaatggtcagccgggcgcaggggctcacgcctataatcccaacactttggcaggccgaggcaggtggatcacctgaggtcaggagttcaagaccagcctggccaatatggcaaaaccccatctctactaaaaatacaaaaattagctgggcatggtggagggcacctgtaattccagctacttgggaggctgaggcagtagaattgcttgaacctgggaggcagaggttgcagtgagctgagatcatgccactgcactccagcctgggtgacggagtgagactccgtatcaaaaaaacaaaaacaaaaagcaaaacaaaacctaaatggcaaactacagactgagaaaacatattcaaaatccatctatgtgacagagggcacctatttagaaatattaagcaattctacaaaccaatactaaaatcaaaacaatacaacttaaaaaaaatgaagtggcacatcattaatcagtacagaacagcaaattaaagccttgatgatatgatcatcacattccaatcagagtggctacattttacagaaactgacagtgcaaagtgagggcaagcacgtggagccactggaactctcacattgcaggcaagagtataagtcggtaaaaatttggaaaactggttgatagcatccactagcattaagcacattcttgtcccataacctggcaatttctctggtagatttcactcaacaaaaatgaatgtttgtatccaccaagagacagatacaagaatgctagtggcaactttatttataatagccccaaactgagaacaacccaaatgtccaccaataggagaatgaaaagatactctctcacataaaagagtaaactatggactcaagcactaacgtgcatgaatcacaaaaacatatgaatgaaagaagccagacacaaagtagtaatactgtattccaattatataaagatcaagaataaacaaagctaatctatggtaattgaagccagaataatgtttacctgtagagacagtaattggttaggaaatggaagaggaacatttttacacaatgcaaatggtctatatcaggatctggatggtgaatgtacaggtgcatagacatgtaatattcatcagactttacagaaagatttgtgcactttacttaaaaagcagtccttacaggaaggaaaaaaagggcagcttctggagccacacccacctgttttgactctggaattgggtactttcttgctgtgaccttgagcaagtaaaataatctgtgccttacttccccactgtgaataataacagtgtctggctcatggagctgtgatggggattaagtgagttaatggatagacttctcagcacagagcacctaatacagccttcattccattcgtccttgttaccaggtttctgctaagctcccttccagggctgagatctcagaggcttcaccagctcactttcccccactttgctgcaataatcattggctagaggtattgtgatatgatgtcattaaagttaatctagacgaaaatttgatttacctaaaactattacactgtagacctggaggaatttcagtttttgccgtaattgttttcaatgtgtgttataaaaaataaattccactatgttcacgaatgtacaacttataatctgaccaaaagtgagagatgggtagattttcctacttgggtccttctgtggacaggtactaggtgctgctttacgcccagtgacttgtgagggaacagaactgccctttagtaaccctgctcacttcctgttttctgcagtaacaattacattaggcaatattattacacatggaattgcatcatgctgattttaaaacaatcctccctgtagcattacacagacactgaatcatcatttgtagtttggggggctttacatgcctgcagtggtgaaaactgaaattttgtcccacttaagggagtttcttcttccctttattaattgcaaaataaatatatgtcacttcagagggcagcagctggactacctatgtttgtgggtaagtcactgacaaaatgctttctagtaagaaaatatctttaaatataaatgtatggaataagtgtaattaactagatgtagattaagaaaaatgtaagccacatctcctagttcaggcagcaatcatttgtgacttaaactgtgatgtaaagtatctgtgacctataccagtcagacaccaaatattggtgagctgcctggatttgggagatgcagtgagaatgagtcagagcccacgacatgagggagagaaagggggaccctgaggacttggggtccggtgtgaggatcctgcactcggtttctgtgatggtgtgtgcaggggagtcacaagttcaggtgggcctgtggcagggctgcccatggcccctggtgagcatgtgcggccagccgggccatgggggtgaggccggcttggtggcttggattgcctactcctctgcagggtcccaacgggtttctagatccctccagagaagcctttgggtacatcccatggcttcccagcctccccctctcagcctgtgaagaagaattctgatcaagtgttgggcatgaatacagtcttcctggaagtgtggggctttgatttgcaacctttttacgtgcagtcttcatatatcaggggtccccaaactttttggcaccaaggactggtttcacagaagacaatttttccatggtttgggggtggggtggagggatgctttcgggatgattcaaatgcaatacttttatgttgcactttttttttttttttagacggagtctccctctgttgcactggagtgcagtggcatgatctcggctcactgcaccctctgcttcctgggttcaagtgattctcctgcctcagcctcctgagtagctgggacaacaggcatgcaccatgacgcccagctatcttttgtatttttagtagagatggggcttcaccatgttggccaggctggtctcgaa

SEQ ID NO: 9273 - DNA, 6000 bp, Homo sapiens
aggagctgggcaaaggggcagagggacagctttctttgtttttttgttttcctccatgaaatggggaggtgtcaagtgagcgagatgtccccggccacacagtgaagcacaaggcagccgaagacacagcaggcaggtcaggtctgtgtgcacattggcaggctgcatgcagaccagcctcggcccaggtggagaagcagagggatctgcaggggaaccagggattcagagacctgttgttggggtcctgcagaagatggggcaattcaagtcaccaagccagtctcaccccaatggcctggctggttgcagaaactcaccagggacaaggggtcaccccaccacaggcccacctggacatgtgactcccctgcacccaccctcacaagcaccaagggcaggatcctcacgccagaggccaagtcctcagtgtgcccctttctccccttcatgttcagcctcagcagctggaagtccacagaaataaatcagacacttctaaaatgggacaccatagggaaggccagatggaataagagttctcttcccacagacctagacttccattgactccactcgaagtcaactgggtgatgctgttggctgcaagtcaaggccaacatgggctgtgctaatagatgcagaccctctagagggaaggagcacatcaccctggcctgttctgtcctgatcacactgaataggtgttctttggtggccctgaatttcatgagggacacgaggaactggcacccatcccgagaaggggaaagtgggacaaaagggcgtcttctaggaagccacactggagagactgggggcatctggtccagagaacaagggtctggaaagaatgttgttgccatcattggctggccagggcctactctggggagtgactccatgttgctatggtgtgcagagcagtcagggtgatagggagtccaattggacacaggttcagtttgctaatggtgacaacacttaataatggagtgggttgccagttgaggtagtgatatagtttggctgtgtccccacccaaatctcatcttgaattgtagctcccataattcccacatgttgtaggaaggacctggtcagagatcactgaatcataggggcaggtctttcccatgctattctcatgatagtgaataagtctcatgagatctgatggctttataaaggggagtttccctgcacaagctctctctcttgtctgccgccatgtgagacatgcctttcaccttccgccatgatcatgaggcttccccagccacatggaactgtgagtccgttaaatctctttcctttgtaaattgcccagtctcaggtatgtctttatcggcagcgtgaaaatggactaatacagacaggaagtggctccccactggaaattaccagctgtcagcaatgccttagcagaaatttctgttggggttgggactaagctggtcctgtcgagagctccccttgcctggttgatcctcagggttctacttagaatgcctcgaaaagtcttggctggacacccatgcccagtctttctgcagggtcccattggggttaaccttctcatttcatcccatgtgaaccaggccaggcccatcagggtttggcaaccccctgatgcagtggttgctgccaggtgacaggagcaagcctgcagctgctggggggccatgcagagacagcctgccagaggggagaccacctggggaggccagagccgtggagacagcaagagaccaggggctgaggacagagtagtacaggtctttggtcccagtagtcctgaaaccactgcactccgaacctttctgtacttagcttaagccagttggagtttctgtcctttacaaccaagagccttgataggaatggggtcctgtgctacgctactgttggcttctttcccgatcgggcgctggaggggaacacagcagtgactacagtgggatgcttactcggtgctgggcatgctagaaagtgcttgccatgccttatttcccacgtggtggggattttgaccccactgtacagacagataagtgaggaccctttcacttatcctgcaacagaaaatccagcagccaaagccaacaagggcccagcatagcatcttccctctctgacttcatcctcacgctccacacaccatccccctggccattcccagcagcccagtaagcactgcctcacacttccagttccggaccagccaggatggccaggctggatgggggccatccaccggctgaagccaattgcctattctcgagctgaaggtgaatcaatcccgcataaatcttcgggcagagaactgggtgggggtagaagagggggaatgtctagaaggaaattctgggcacattcctggaagtgaggaggatggatattggacagaaattatgtcattgcaggcaccctcacttgccctggccacatggacagttcctccccggctgtgttccgtgcctcctctcgtgctccagggcctgtctgttcctggagcgagatgggtcccagggctgggcaccagtccccatctccagccatcaggcactttcctctctgtgttttggcgtaaacactccctaggtttgtggatctgaatcctcttcccaacacactcaagctttgctggcctccctgcagtgtatgtttaaggcaccacacagcctccaaggcctggcacccgggcagtggcacctggtaaacacagcagtcagatttcctcatttcagccaagtgtaaaatcaaggtaatggatctactcttttttttttttttttttttttttttttttgagacggagtctcactctgtcaccccggctggagtgcagtggctcaatctcggctcactgcaagctccgcctcccaggttcatgccattctcctgcctcagcctacatagtagctgggactacaggtgcccgccaccacacctagctaattttttgtatttttagtagagacggggtttcatcatgttagccaggatggtctcgatctcctgacctcccaaagtggtgggattacaggtgtgagccactgcgcccggctggatgactcttgagacaacaccattcagacaaaggcaaggcctcccacttaaactcataaccgtgtctcctttctctccttcgatttgagcggctgaatttggttacagtcatctgacctgtgggtgtgaagtccacctgcctggcataaaaagctgtgcctcctttctaggtgaggagaaagagagagacctggctcatctgaggtgtggttgggaggggggacccaggtgtgctggaaatgaaaagaaatgcattcctgtttttcgtcccaacatgcaaacaactgaacaaaagcattagggcctgagactgggagtaaagaattccttgtcaccatggataccaggaaatggccccacttatatataataagggctttagagatgctggaccatctgatattccagcctggggccacatgggagtgtgccctggtgttattccttatacagttccatgaacatggctctggaaacacctctgtctgcagaaaatgaggcttttctttttttgttcgggggtgaacagagggcagaggcctgggcatcttcactcagcacccctttgtaacccagcacttagcaccatggctggcgcacagcaatgtcacatgtgtgagtgcacacgatgcctcactgccaggggtcaccccacaccggtgctgttgggggcgttggagtggttatctcttctttagtcctcaagctcctacctggcagagagctgcccaacaccgtcggggtggggtgggcgggaagggaagaagcagcagcaagaaagaagccccctggccctcactctccctccctggacgccccctcttcgaccccatcacacagccgcttgaggcttggaggcagtggatttccgagcctgggaaccccggcgtctgtccggtgtccccgcagcctcacccgtgctggcccagcccccgcgagttcgggacccggggtttccggggtggcagggggttcccatgccgcctgcgaggcctcggctcgggccgctcccggaacctgcacttcaggggtcctggtccgccgcccccagcaggagcaaaacaagagcacgcgcacctgccggcccgcccgcccccttggtgccggccaatcgcgcgctcggggcggggtcgggcgcgctggaaccagagccggagccggatcccagccggagcccaagcgcagcccgcaccccgcgcagcggctgagccgggagccagcgcagcctcggccccgcagctcaagcctcgtccccgccgccgccgccgccgccgccgccgccgcccccggggcatggcctgtctgatggccgctttctcggtcggcaccgccatggtgagtgagcgcatccttcgtccgccgggaacggttttattttcaaggagagcaggaaacacacaaagactcgcaagctcgacctgacacccctcccaggagcgcgtcctctgggcgctgacccagggcaccctagagtggcgcccggctccgatcgctgcccctgcccctccgccagggccacctggagcctcgggatgccccttgcaccggcagagagcacggactaggtggaggggccgggagtggggcgggggcagcgagttgccctacaagttggaccgatggccttgacctgatggcttctgggcggggggcgtggggagctggggacccggagcgcactggggactggggaggggccgcagcttgggccggagggaagaggggacttgaagaaggggagccccgcgcgcgcggctgtgggcttggggaccggggacttctcgcgccatccccaggaacgccaggcaaggtctgggggaacaaaagaggaagctgcccccagagagccggagcctgcgactgcactcccggggacaccctctcccggacccactcggggaggcggcggcgaaggcccggggagacccgcgaggggcaagcccggattcctgccggccgcctttctgcgcgcgccggagagagagacgcggtggggacagggatgcgcatttcacttccccgagctccggagagggatggcggggtgtcggcgagttcactgctggacacagttactgtaagtgctgtttccaggggtggtcaggaatctccctttctggttttctggcattaggaacaaacaacaaaccaatcatcaggcccccagccacccacctcaccttatcctagcgcccttcatgtctacgcccagcacaccaacatcgtagaggtagctaaagtacaaatggaaagtcttccgtattccacgccgtgtatctgtgtagttactaccctgatattacttccccgaggctgtaagcccacagtgcatggcacgctccggggctcaccccgcccctcccctgtatttcatttttagcatcctgtatttgaagtcagcagggctcagcaggatttgaccgacagttacctcttgccttgagctcaagagaaaaaaaaaaaatagccaggtttctgcgcatgctccgctgtgacaactgcatcctatgattccaaacaggttactgtagaacatacggagcctcgccagctcattatataatgattttgtgtaaacgatagaatggggccgcagacatggccaggcggtgggtggaggaggggagagcccgagcgggagacccgcaggctgactcgcctctctgggctgccctgccttccctgcgtggcttctacgtagaagaggcagtgaacaaaacggaaaagccgtttccctcccggtgacacttgcttttctctggttgaatctttgggcaacacttgggaattctgccttttgcacttgttcatctattaggatttctaaatgaggttgaccatggaaaattaaggaggttattgatgttagttgcaggtagagaaagttatagatcttgtattagatgctagttaactcttgaattcctt

SEQ ID NO: 9274 - DNA, 6000 bp, Homo sapiens
agcctctggagtagctgggactacaggcatgtgctaccacatctagctaatttttgtatttttagtagagacagggtttcaccgcgttggccaggatggtctcaatctcttgacctcctgatccgcccgcctcgggctcccaaagtgctggcattacaggtgtgagccactgcacctggcctcagcattcccatttctttcaaatgaaccaacacacagagttgctatttggtgtatccaaccagccttatgctgctgccctccctgatgacatggtctctgtgtctgacccactttcccaggcttctgcttgaagggctaaggcatggttttcctctgctcctgttcttcttcctttctccactcacctttcccttcctccttccttcctctctctgtctctacctctcttctttccttccttactttctccctgctatgatccaaatgttggtatcctccccaaattcatatgttagaacctaatacccatagtgacagcattaagagatgcgatcctgggcctggcctggtggctcatgcctgtaatcccagcactttgggaggccgaggcaggtggatcacctgaggtcaggaattcaagaccagcctggccaacatggcgaaatcctgtctctactaaaaatacaaaaaaaaaaaaaattagctgggcacggtggcatgcgctggtaattccagctacctaggaggctgaggcaggagaatcgctggaatctggggggcagaggctgcagtgggccgagattgtgccactgcactccagcctgggtgacagagcaagactctgtcttaaaaacaaaaatcaaaaaacaaaacaaaacaaaacaataacaaaaaaagagatgcggtccttgggaagtgattaggccatgaggaatgggattgacgaacttattaaatggtttgaaacaggttgaaaggagcccctttcctttctaccacgggagggcacagaaggcacacctatgaggaacaggcctccagacactgcattttctggcgtcttgaatttggacttcccagcctctagaagtgtgaacaatacatttctgttgtttttaagttacgcagtctaaggtattttgttataggagtccaaatggactgagacagaaattggtaccaagaagcagagtgttgcagagacaaagacctgcagatgtggaagaggctctggaactggataatgggcagaggctggaagagtttagaggaacaggctcaaaaggcctggactgccaagagtggacataaagggtgatcctagtgagggctgagaagaagacacagagcctccgagattatgtaagtggctgtgatcagaatgctgatagaagtatggatggtaaaggccactctgttgaggtgtcagacagaaatgaggaacgtgttactggaaacgggaggaaaggccattcttgtgacagagggcagaggacttggctgaactgtttgtgtcctcatgttctgtgaaagtcagagtggcaagggatgaacttgaatatttggtggaagaaacactctaaaccatgtcttgaggacactgcttaccttctctccactgcttatggtaaaatgtgagaagggaagaaatcaattaaaaacagatttttttttttttttttttgagacggactcttgctgtgttgccagtggcacaatctcggctcactgcaagctccgcttcccgggttcacaccattctcctgcctcagcctcccgagtagctggggctacaggtgcccgctaccatgcccggctaattttttgtatttttagtagagatggggtttcaccatgttagccaggatggtctcgatctcctgacctcgtgatccgcccgccttggcctcccaaagtgctgggattacaggcatgagccaccgcacctggcctaaagacagaatttatagtcaaaaaggaggcagaacttgcagaatattctcagcctgaccatactgtaaagaataaaaaagcatgtttagaagatcaagggtgtagccaaactagcgtttcaggcagagattagcatggacaggcagaagccaggtgctgtgcatgaagacagtgacggcataaccctgaaggtgtttcagaggttattattgctgccctcccatcacaggcccagggtgccgaggtctgggggacagaactatgcccacagaggtgcctggagtgcctgcaggacctcggcacctgctgcagtgtgtctccctcagagggcacaatcaataaaccttgggcttctgtgcagggccatctccatgggtgtgtagagggtaggagctatggaggcatggctaactccatctggatttcagaggatgctttggagagccttggggtccaggcagagaactgccacaggggcagagccactgcagagagcccccaccaggacaatgcccagtggaggtgtgggggcagggccacctgaagacctcagactagcagagccactgacgtgcacctccagcctgagagagccacaggcaggagactccagcccatgagagctgcagtatgggctgtgcccagcaaacccatgtaggaggtgccacccagagccctgggggcctaagtccctccttagagtgttcagaaggtgggaccatggagtcaaagaagatataatgctttttgccctgttgggttttggacttacttgagacctgttatcgctttcttcttttctgtttttctctttttggatggaagtgtctgccctgtgcctgccccatccttgcattttggaagcacataacttgtgtgacttcacaagttcaccgctgaaggaatttgccccaagaggacatttaccttgagtcccactcacatctgatttaaattatgtgtagctgggactctgggctttagactttttatttggtgccgggaacaatttaagactttgggccctattgagatggaatgaacatatttggcatgtgagaagactgaattctggagggccaggggtggaatgctatggtctgaatgttggggttccccctaaatttatttgttgggacttaatgctcagtgtgattaatactctgatagtactaagaggtgtggcctctggaaggtgattagttcatgaagactttgcctcatgaatagggtggagctctcataagacaggttgaagggcccatctcttcctcttccatcatgtgaggacacagaggcgccatctatgaggaacaggccctcacctgacaccagagatgctggagtttgaccttggacttcccagcttccagtgctatgaacaatacctttctgtagtttacagatttcccagtctacgatatttgttacagcagccagaatagactaagacacacgtacactccctcccttggtcagagaagccaacagggccggggccaggctgaccagaagggagatctccaggcccagcccaaggcaagctcgccacagggatgcgtctcgagcatgagcacctgctgtgttgtcccggcctgggatgacgagggcacggtgttcatccctgtctctccctccctcacatcactcaccactgtcagacaggagagccacaagccctctttcctacttacacttggggcagcatcttctgttcttaactggctgggaacttttatcttcagagtcagagatctgggttgtgaaaagcaggcaagcagacaaacatctctctgcagccttctccccattctcctacccagtttccagaatttgggggaaaaaaatcccataagctgtcatacttcatattgccatcaggcagcagtgggaatggtgcagagaggagctgggcaaaggggcagagggacagctttctttgtttttttgttttcctccatgaaatggggaggtgtcaagtgagcgagatgtccccggccacacagtgaagcacaaggcagccgaagacacagcaggcaggtcaggtctgtgtgcacattggcaggctgcatgcagaccagcctcggcccaggtggagaagcagagggatctgcaggggaaccagggattcagagacctgttgttggggtcctgcagaagatggggcaattcaagtcaccaagccagtctcaccccaatggcctggctggttgcagaaactcaccagggacaaggggtcaccccaccacaggcccacctggacatgtgactcccctgcacccaccctcacaagcaccaagggcaggatcctcacgccagaggccaagtcctcagtgtgcccctttctccccttcatgttcagcctcagcagctggaagtccacagaaataaatcagacacttctaaaatgggacaccatagggaaggccagatggaataagagttctcttcccacagacctagacttccattgactccactcgaagtcaactgggtgatgctgttggctgcaagtcaaggccaacatgggctgtgctaatagatgcagaccctctagagggaaggagcacatcaccctggcctgttctgtcctgatcacactgaataggtgttctttggtggccctgaatttcatgagggacacgaggaactggcacccatcccgagaaggggaaagtgggacaaaagggcgtcttctaggaagccacactggagagactgggggcatctggtccagagaacaagggtctggaaagaatgttgttgccatcattggctggccagggcctactctggggagtgactccatgttgctatggtgtgcagagcagtcagggtgatagggagtccaattggacacaggttcagtttgctaatggtgacaacacttaataatggagtgggttgccagttgaggtagtgatatagtttggctgtgtccccacccaaatctcatcttgaattgtagctcccataattcccacatgttgtaggaaggacctggtcagagatcactgaatcataggggcaggtctttcccatgctattctcatgatagtgaataagtctcatgagatctgatggctttataaaggggagtttccctgcacaagctctctctcttgtctgccgccatgtgagacatgcctttcaccttccgccatgatcatgaggcttccccagccacatggaactgtgagtccgttaaatctctttcctttgtaaattgcccagtctcaggtatgtctttatcggcagcgtgaaaatggactaatacagacaggaagtggctccccactggaaattaccagctgtcagcaatgccttagcagaaatttctgttggggttgggactaagctggtcctgtcgagagctccccttgcctggttgatcctcagggttctacttagaatgcctcgaaaagtcttggctggacacccatgcccagtctttctgcagggtcccattggggttaaccttctcatttcatcccatgtgaaccaggccaggcccatcagggtttggcaaccccctgatgcagtggttgctgccaggtgacaggagcaagcctgcagctgctggggggccatgcagagacagcctgccagaggggagaccacctggggaggccagagccgtggagacagcaagagaccaggggctgaggacagagtagtacaggtctttggtcccagtagtcctgaaaccactgcactccgaacctttctgtacttagcttaagccagttggagtttctgtcctttacaaccaagagccttgataggaatggggtcctgtgctacgctactgttggcttctttcccgatcgggcgctggaggggaacacagcagtgactacagtgggatgcttactcggtgctgggcatgctagaaagtgcttgccatgccttatttcccacgtggtggggattttgaccccactgtacagacagataagtgaggaccctttcacttatcctgcaacagaaaatccagcagccaaagccaacaagggcccagcatagcatcttccctctctgacttcatcctcacgctccacacaccatccccctggccattcc

SEQ ID NO: 9275 - DNA, 6000 bp, Homo sapiens
ctggaatacagaggcccacggtcggtcggtgacctacccaggagggaagtgggattcagacctgactagtttgcctccaggccctactgttttgactctcctgatggtaaaatgatgagtctgcaaattgaacaagtgcttggaggaaggaggtttgctttaggtttgggcaggaaagggaggacctgtattcatggaggcccaaccgggtggcaaatgcttcacagtcctgatctcattttgtctccccagcagcaccaggtggaaggaggtacgtgttgttacctcagtttacaaatgagataacagaggctcagcgagatacactaagttgtcttaagtctgaagatgaataaggactcgatgtaggattagagctgtggccagccaccgtgtgaagtttacttgcttcttggggccacaaaactggctcgatgagcgggcaggacaaggttgggatgatagggtggtccttttcaatgggatgaatggcagcggccaacgcatgtttgggagaccctgaccagaccagcctggtgtgggggaagtggaggcgaggcggggggaatgggaaacgtgtctggaagggcccaattgtggaaagaaggccttgaaccccaggcctaggcacagtcggtcctagagggagacagtgggggcccacccagagagagctgggagactcagaatcccactggagcccctactcttcccaggcaggccacgccagcactggccttgggcatgggagggcctcccaagtcatgtgcaggcccaaagtccttgctttactttacaagacaagcacagagccgaggcccaaggcttgcatgtggcatcatctccgtgtccgtcgaatctgaaaggaccagggaagctcaggaagctgagttcagaggcatccctctgcttggcagccaccctgaccatgccattgggttgctggaaaccccagctgtggaaacggaaccgctgattctgaagctctccccgcaatgcttcttggatgtggccatgcacgggggcaagggtttgatgagagcatctgtgccattgcccggacaagaaggagctgttggctgtcattctttccagaaatctcagcaatgtaaatgttcagggagagcaataagacctcgtggttgccagccaactcctgcttctggaagctttccaaatctccctgtgcctaccattgtgcctgtgctggatttctgcttgtttttcctttttctttcagagtttgaatttgggtttgggaggatagtaatttgatatattagagcagcgataatcgctgtcattaagcagaacccagctccttaatgtctgtgtgtggacgggccaagtgcgagccagtgtgtggggctgggatgcctgagagcacagagaaacacaaagccagggccgccgggcagctggggcaggttagggacacttctttcgttgtcctgtttgagactcagccatggctgctttggatggtctctggttggtgttggactatgatttttctttagcgggggtgactctgatgtcattcagcttggagatgtgtcccaaataaacctttaatcacagaaaaggtgcttggaaggacaaggggcaccttcctggcccggtgactgcagcttggggatcaccctcccattgcctggctttccctcctactttccgagcaaccacctcttgggtttggcgttttaaggtttccccacttggattttaacccccattggcagcaggtttaggaaagccatcagagggaagccctcctccctgacatcatccccgcccaggtggtgttggggcgagtgaggttctggtgctggggaagctgctgcttgaggatagcagtgggaagaagtttcatggcagcagctgccacctatgtgttctgcagagcacctggcaggagagactcgccttcccagtctcggcacgcctggatgccgcattagcacacagggagggtcatggtcagagcttcaggatgcagtgggcgaggtgtctaagatccagatgctagccttggaggagctggtgggacaaaggctgttcccagggattgcacctgcctggccctgcatccagggaggatcctttcagctggagatgccggaagttggcagagctggggtaaagggcagaaacataaagaccaggtcagcagcagctccaactaaggcagatgcccagagcagatcagagaagcagaccagagatgagccggcaccgctgtgggggaaggatcatcccagccatcatgtggtttgggggaaagctgggaccccacttggtacaatttaggaaggtacagaagaatgtgcattccatcatgtgggttctgcttctcccctgaagcctctgtcaagagctgctttgggtcttggtatggagaaatgccttcatttggccagacccatctggcagaggcagtcacgatgccattggacccccaggcaagcagcccctcctagagagcgagggtcttggaaggcctggtatgacccccatgccactctgtttcctagggaaccctaaagggaaaccgcacgtgagggactccactgagataaccctgacgtcaccgtgccactgtgccccttgtctgcagggtaacttggctttgaaggagcatcaggggaccctctgtaggactgggggtgagatcgatggacctgccagctgttattgttgggattatagggaagtgaggaggtcgtgtgtgcctccttggggtctgagtgcctccttggggtgcctaagggagactgaacatcattttggtgatatttattgatgtaactactccctttgcacgatatttattgatgtgactattccccatcacttgtgggatgctgagctgtgcatagcacagttcaaaatatctgatctaagcaggcaggaaggagacagctgctggtgctgcttagagttaggcgcagggatgaaacccatgagatgaggaggctggtggaggaaagggactgggggcagtggagggatggagaaatggacagaagtatggatggggaatgctgaatgtgagggagaccccagaaccggatgacacaagaaaacaatccttggctgtggccgggtgaccatgttaaggccattaaagtcatgcttggagaaaccacatagatgcttgcagctttgcctgtcatccagtggacttcagagcacagcatccgttcgaaatccagcggcagattttcatagtctgacaaattaaatcagctgttctcctggcgccagagtgggcttcctgccccacactcactgaggggtggtagggaggggtggcctgtcctttgcacactagtgggcaaatgatactgtcttcattttatgagcagttcttgccccctgtgacttagaatccctcacgtgtgttttgagatccattttgatgttattaagcccaacttcccagaccttcttcctgttcttcttgttggcacaaaagcccccttcctgtttcagaaggtgcaaaaagcaagaggattgatcagcgcgtggctttgccacatgatcacgaaaatggaggcggtcgatgagaaggcccttaggcattagggggaagaaacaagtagagtaaaaaggaaatgtcactggatgtcatagaatatggatttctgtcctttctgccttgagctttctcttggggagggaggaagaggggtctgggagaacaagacagcccgttctgagcagaagcccctttcagctctgggctgagatgaatggggagcgagggggaggggagggagtgtagcgcagctgggctcatcccatcaatgttggcatccaaagaaaaatcacggctttgggtggggaaactgggtcctgctgtgtagttttcagattgaagttgatgtgagacttggagatcatttggcaaccttattggtgctattggcataatttaaataatgggaaggattttattcttaattgttccagccaggtttagaagcctggaaaaagaccagttctgcttttagaagtataaaaataccgcagggatggaaaatgcttcatgcctgacaggcagatgtaaatgatttccagttatatttcagtacctgcgcaggggcagggccccgttgctagtgatctgatgaactagtcagccagtggggcgcggtgtgcagggggcgtgtgtgtgcacacaggatgtatgtacatggtgtgtctgtgcctacatatgatagtgtgtacatggtgtgtctgtgcacgcatgattgtgtgtacatggtgtgtgtgcacatgatgcacatgtgtgtatatgggtagacgtgtatgtgatgtgtgtctgagtgcatggtgtgagtgcacacatgtccatgtgtgggtgtgtgtgcatgcgcgtgtgcctgtgtgcacatggtgtgtgcatggcatgggtgtgtatcatggcctgtgtgtgcacactgtgtgtacagggcagacgcactcactgagggccccttcagttgtaataggcagaaggagcgcacgaggaggctgaaacgccagttagaatttcagctgtgagctcttctcttccccacttagggctgggatgttttcacagaaatcacagagcagctctcagagcccaaactcattgtttctcctggttttgtttgtgttgactttccctttaatccatgctcaagcccctcacctgtttagaggggatgtggcccgactttcaatgaaaatctctccagttctcctgccgtggcctctcgggctcctggggaacagcaccctgagccttctccttcttaactggtgagttctgcagagaatggggctatggttgatagtgtagtctttgggaacttttgttattggacaaatgtccactttgttttctaggacatctctttgtgtcccccagagtgaaccagctggagccagggagcccctagagcagtagcagccattagggggagccactgggagtcaggtgccttgacttggatccaggtgtgcaccctttctttccaagggtctctgggtgaggcccgtgaccttcccaagcctctccctgtcttgtgaaacctgggcgtgatatacctcccttttagggctgctgcgatcatttaggcagattaaacctcataagtggtttcccatacaagaaagatgctagcagtgcaacagacagaacacttacctgcctgccctcccgccaggaggtggtcttccaacttttgcccggagtctacagagggtgggccctctctgctggggctccgggacatggtcaggagaggttggtctgtctgtaccgccattctcttggccagactgtggtgtctggtccctactcacaccttcctgtcagagtatccagaggccgcagagtatccacaccctggctgggtgtactggctacagatggctgtggctccaggtcacctgcgtgcctgggtgatgagaaataatgtcacaacaaatatcccatctgcattctctgggacactgacccatgaagagaaagcagttctcacagtttttacaggcacaggtcagctctcagagtgctggggacagggttcccaccaggcagccctttctgctcctcccagagactgatggcttctctgcattcagagggatctgggagcattgcaggaataggctctggctcttcagaaatgatcacgagcttaaggaactgggtctgcaatgtgaagccttaggtccactctccttggtgggagctcatgccctccccaggctccaggacccagtcaggattcttaattcacgtggctatgtcagcgcagctgtcactcccggaaatgaagagagacccctcttgccgtccttctcacattgcttgcactttccagcatgcattttgttgtgatgttttgtctgtaattgcaactccagcagcagccagtgtttattaaccattttctatatgccgggctcaatgtgaggcatttcgaacacattctcttgtttggtcttcacagacacccttaa

SEQ ID NO: 9276 - DNA, 6000 bp, Homo sapiens
ttacttttttctcgttgtatatatgcatttttagtgttcataaaagatgtttcttcactttgcatgtcatatctaccaacctaatgtttaaaggcaggctagtaatataatctacttagtttgtaaactaagtttttccttctggcacctcatgagagttgcagaattcatgatgcctttatttgttcttagtatttttcccttttttttttctttttctgtccctttagtatttttacttcctttggttcttctcatccgccataagccaaattctagaaaagttctgttttctttacttagaagttatttaacaagtatataccatacaagtaaagtctctcccttactgtgatgcaaatgtttaataactttaaatagacacatgcacaagctctaatgaaatcaccatcaaaattaagaaaataacaaaccagaggattcaatattttataaacaattccagtttcaaaatatacattaattgcaattctctgaagcaggggttcccaacccccaggccaagcctgttaggaactgggccacacagcaggcggtgagcagtgggccagcaagcattaccgcctgagctccgcctcctgtcacatcggtggcagcattagattctcatagaagtgcgaaccctagtgtaaactgcacatgtgagggatctaggttccccactgtttataagaatctaatgcctgatgatctgaggtggaacagtttcatcttgaaaccatctccaccccgctactccatgcaaaaattatcttccatgaaaccagtctctggtgccaaaaaggttggggactgctgctctaaagaaacctaattattaaatgtgtgttgacttttaggtattggtaactaaatatactcaagaatacacctggcaacattcttaagttatatttatataaaaccaggcaagagaactatatgttggaatttcatgaataatgtggttgtctttcactaaaagaaaatgagttaagctaatattgaataacttaaaataacattttaaccttaaaacgtctatttattaggtagtggtcatattttaccttaataccctaaatccataggtcccaacaagctgtactatttagtatcgtgcctcattttctttttttgctatatttctcaattatattctatactatagaaatgaaaaggcaaggattgggaaaggtgagaaggattgttagtgatttctccctctctagtttaagagatagaaaaggaagatatctaaagaaatttggctcactctgctccctgaagagctttcaatagaaggagctaagtgcgttcaggccttaaggggtgtaagaattcctgctttcctaggatagacacttcattttctgctagaacagtggtaggtgttgctgctgtgtcacctgaggcagcctctccacgtgaccacaatctttgatttacagatttatctcatttaaaaaacaggtctccataagaaaatcctttttctccactacttcatgtaattggtacgttttataggatttttttcaaagaaattaatgaaaaataactgccttgacttagaatattttggaagcaattattcatcttccttttaaatctattctaaatgtgttactggtccacttctctagaagaaagtgtgaaagcttagtgcatacacatagtgacttttatccatactatggtaaccacattttctgaactaaaaatgtttgttttatagttttcatttaaaaatcttaaaacaatctttggaagatttttcatatcacattttttaatttttttgtgcttggtgatataagagtcatgtgaaaatgtgaaaagaagtagcatgaggagaagatatttttattattagagatgttctagaaacttaaaggtggatgttcaccttgcctgtttctctagatgttgtctatcacatccctttttaaaaatgaacataattcaccaatcctaagacagatcttgaagcagattgggagttcagtaagaatatgttgtattgatttaaatgaaataaacaattgaatatttagaatgaccttctcctcgtgattccttcaagtgatgaactacagtgtgtggtttcaaatttgtgattcgaattattttagtatctcatctatatattttttgagagtgagagaatgtgtgtgtttgaatgtcaaattcccttccttcctactgggaatttggtcattgaataacttaatgtatcccaaggttcagttatctgttgactgtgttgcactgtagtaattataattagcacagtcctcagacccaaggagcttaataaaattatttgtatatgtcattttcgttcttgaagttaaaaattgttttcatatgtaagaaatgattttcaacctgagaaagctgattgccaaaaaatggattattaagagatgattattcttaatatctgtcatctactttctctgtgaagataggaaataaatggtagagaggtaaataaatggtaaaatacagtgttagagctcctttacaaggaaactgtgataattcctttttaaatcaacttccaaatctgctttgtaaattcagaaatgtgtaaattcagtctttttaaagcaatgaataatactttgcaaattatatcatgcacagtaaaaagtagaaagcaataacaggagtaatatgaactcaaagatgctccttatttcattcttattcttaaataaagtatgttttatggctgtttacaaaccagttttcaaatgactggtatgattttgactttcttgagtctacccaagagcaaaaaggttggcagtggtgtggagagaaatacagtggacttgcatatcccattaaatggttgttaaatgtcttaactagttgagaattaattgtatattagcagttgttatttttgttttgtttgttttgagatagagtgtcattctgtcacccaggctggagtgcagtggcacgatctcggctcactgcaacctctgcctaccaggttcaagcaattcttctgcctcagcctcctgagtagctgggactacaggcgcatgccaccatacccggctaatttttgtatttttactagagatggggtttcaccattttggtcaggttggtctcaaactcctgacctcaggcgatccacccacctcggcctcctaaattgctgggattacaggtgtgagccaccgtacctggccatattaagttttttgagagaattagaaaactgggtttcctcaactccaagatgttatcagttgtaaaatgtacccgtatgttttataccactaagaaagaaaaataagcctccaattaagcaacatgccatcaattgtaaaatataaccagaggggggagaaaagtagtgtttagctgggatacctccctactccctgaaaaacaagtcagggttttattagtaaatgaaaatgggagaatggatatttggtggcagtcatgataaccatttcatttctatatcattattaacctcttaaaatatccatcttaagtacattatggcaaagcttcttaaaatggtggcattggaatctcaagaaagtctcttctcatcctactccttacacagttgaaattaattgttgctgcctcctttctgtatctttttctttggctatcatttcttatccttttaatcaataaattcaacaatttgatacaatcagataattatttcctaaagtttgacttagagttaagcattgtacttaaaaagctacagggtagtctttcaattaaaatttatcttttaaattccatagggaccaaggtatttgttgatagcttcaggtctgataacttaaacaaaatgttctggcatcttgaaaaacaaactgcatggaatttattccagcttctcttccaaaggtgtcatggccccccttccttaggtcaattttgacacttacctatcaagttttcagaaatgcaatgagttcttgcttcttctgttgtgtatgtgttagtgataggaaattttttggtctcttcttagataataaatatcattggaatatttttcaaactgtgactaaaatgtctttggcattctccattgtactttttatatatgtttatgccctccctgtcttctgtatctgtaaggaatggacctgacattaagacttctccatagagcacatgagtaaggatttactaacgaactacattaaacccttgatagccctgaacaagcatctaaagaatcactcctctctgtctttaataagtcatggtaaaaagtatgggtaggtaagtttatgactgtattttaatgtttatgaatatgattaagatggtcacactttgaacagactcacaaaataatcttcaacttgttagtggtttcatttttttgaaaacggaaattctaaaaattacttatggaatgtctggtgtttgggggatgatgtcagaaatgaatctgttctgttggcctcaaccccacatcagactcatcagagtctgcatctcttttcctttttctgcacatctacttttgtttcttcctaagtgcccagtaatgtaaggaagcaagttctagttcccctgtagagctataaagctataaaggagactgaacattcacattactttgcagaaaggtgcttatgaaaattcagagacttggcggctttggaagatggctatgtaacattaaagtatgttctcttctctaatgatttgatcattttaacagtatgcattaacccacaggatttccagtagacattttcaattgaataggaacggcaataaaacaaattactaaagtgactataatccatttatatgtctattatttatatgtaatatatatatacatttacagatgctatattattttgcttgtaggtatcataacgtgattctagttctgcctccttaactattcttatttttattttttttagaacactgatatttgcatttaatggggaacaaaagatgaagaaggaaaaggaatatattcactaaggattctatctgcttactgctacagacctatgtgttaaggaattcttctcctcctccttgcgtagaagttgatcagcactgtggtcagactgcatttatcttgtcattgccagaagaaatcttggacagaatgtaacagtacgtctctctctgattgcgatggaaggtgataaactgatactcctttattaaagttacatcgcactcaccacagaaaaccattctttaaagtgaatagaaaccaagcccttgtgaacacttctattgaacatgactcatggagaagagcttggctctgatgtgcaccaggattctattgttttaacttacctagaaggattactaatgcatcaggcagcagggggatcaggtactgccgttgacaaaaagtctgctgggcataatgaagaggatcagaactttaacatttctggcagtgcatttcccacctgtcaaagtaatggtccagttctcaatacacatacatatcaggggtctggcatgctgcacctcaaaaaagccagactgttgcagtcttctgaggactggaatgcagcaaagcggaagaggctgtctgattctatcatgaatttaaacgtaaagaaggaagctttgctagctggcatggttgacagtgtgcctaaaggcaaacaggatagcacattactggcctctttgcttcagtcattcagctctaggctgcagactgttgctctgtcacaacaaatcaggcagagcctcaaggagcaaggatatgccctcagtcatgattctttaaaagtggagaaggatttaaggtgctatggtgttgcatcaagtcacttaaaaactttgttgaagaaaagtaaagttaaagatcaaaagcctgatacgaatcttcctgatgtgactaaaaacctcatcagagataggtttgcagagtctcctcatcatgttggacaaagtggaacaaaggtcatgagtgaaccgttgtcatgtgctgca

SEQ ID NO: 9277 - DNA, 6000 bp, Homo sapiens
ggtccctgaaatcccctcttttttctaaaatacttaatgattattccaccccctaattaaagaaaagcccacaaaatcagaaacccaaacttcactgtgtgcgactcattctcccacacaagtccgagctctctttcaggtgcccactttctctgcaataaaagcaaaacggtgcctttcgcaccatgaccacttgtcccctgaattctttctctagaccgtgtcaagacacactggctggggctagggtcccatggatgtctggagaccctcctgagccctccggagatagggtgaccgctgtcatgaccagatgggagtgaccatgactggggtccaggcactggcacaggggacagagtcacaggcagggaggctcaggatggaagaggtgcaggcttggtgaccagacctgtggtgatgcttctggaccccagcggaaggtacaataactgggcctaggggctacgtgtctgaattgttgaaagttctacatcaagctaacaaagggttaaatgaagtgtgttcaatcctctgactgacaaatgcactctcacgcctagagcacagctgaggattctcagcttctggcccccaaagagtcccccgctctttctgcctgcagctccgtcctaacccacgaacagcctcactggcacatgcgtgaatatcccgggcttcaggccgagctctgcccatggcccttgcacgcagctttctcttggctacacttgggggctcgggtgctcacacctgtcgtgcagttgctctcagggaaatgaacatgtgcaggggctggagatggctgagggacatttgcactgggaatttcagggtccccagagctttcttgatctatggggatgggtgtctcctggcccaattgactccaggcactgggtagacaggaaggtccaaggaacagcagactggagccctttaacgtttggggccggggcaggtttgcctcttgtcctggtcagggtggtgctgggacacaggactggattgagtgtgctgtgggggccatgggctactctgtcctggccttcagaatggaaagggctcattcacagaaacaggagatgctggaaagaaccagtttgggggtgaaaagcataggcttatctcaaatgggtagcggtgccttaggtacatcctactgtgggcaccatgttaagttttgggggtttgaggctcagaggaaaggtctggcctgcagacagaagcttagggatcttcgtagaatacatggaagctgaggtgagcctggatgagctgcctggggaaagaggggaggatcagggaggctccaaattggtgttttaagaagccccacatttaaagactatggagtggagcatgagggtgcaaagcagattagaacgtagcattactacaattataattcatcccccatctgcttcatggcttctgccatcagacacaagcccctaggttgctgaacagcaccctttatgctgtgttcccaggacacggaatgtatgatcctgcaggaagactcatggaaccaatgggtcaaaggaggagctgtctctgataaggaagtgtttgtgtaaatagaaaatatttgcttgagtaagagcgaggagttgggtgtcaggtggagatgggtctcccagaggtggtctgggagccctcgcgagtcaggccctcaatgtctcccctaaatcactttgtcagaattagtgaaggcagaatctctgcagtgaacaagttatgttcttttagaaaataacacaatgcggagggaattctcaaaaacaaccatgcaagtggtggcaggagtggctgttgtaggggagggaggagcctactaagcagggaggaggctgggtgcagaggcctggcgggaggggactatgttcccaggtggctgacccagctcagctccacgcccctgtcccatggtcatgccagcaggtggaccccaggggctccagctttattctggggcctctgagagccaggtcagccctatgtcagctccacgatctcactgagccatgcacttacaagggttgagttgctccaggaccctgagaaggacaaagacgaaaatgactcaattgaaaatctcactattcacccatggcctggcatgtgccacacacatataattatcatctgcgtggatccccaccgacatctcgaagcaggtccctctatcccacatgtcagggacaggcaaatgcaccatggtcacagcctgggaccccatctgaggcaggctggctgcaaacccagagacgtctctatcctgtcttctccctggccggcaaccttcattgttccctgcggtaggatgttaaaggcagcttcctggcacttccagaccagggaccttgggctgcctgctgggtgggtcagtgctaaatggccccctatgaagaagggcacagcttggggacctggagctcaagggatcacctatttagattcgctgtcaggacatccagtataggaggaaactggcttggaattcttctggggaaggggccaggaggaacacagggtagtgggggagtgggggcttgcaaatgtcagcagacagcccccttccccaactcctccttcccacctcccaccccccattgtctcccctcgtcgtccctcccctcctcacctgcactgcactcccaggcgggtcaacagtctctccgtggagcttcgtgccctcggggcttacctcctaaaaaccttcaagtctgcacccctactgtgcctccgtggctgcgccctgctttccacccaggatctgtgctgattggtttgtttgtaaccacaccgggcacgttgtccatgcaggcacttcatgaggttaattaatgttgtcccatgaaacctcaggacagccacctcccaacttgccctattattcatttcatctttttctttaaatcgttccacttttctttggccctaaaatgtatttaaaacgaaactaaattacttttatacttggaaattctaacctcaccagcctgggaccaatgactgttaacataaatagcagctgcgctcccggaatcccagagggtctggaactcgaattcacaattcctggaaaggtgtttgttttcgttttaccagttgtcatgtgaatcggtaaagcacttcaaagtccgcagaggagccggataccaaaccaggttcctgccgccgagcccgtgatctttggacccgatctgctcacagctgggagctggctcttttggtctccagggggctctggtcttcagtcccaggcaccaggcactgagctagcagcagacactccataaatatttgtcaaatgaagcacacagatgattaaataaatgaaattggagcgttttattacttgcgtggtgtgggctcttagtcacccccagctgcggagctgtgtgccggagactgtagatggagaaaggtactttgctagagctgagccccgggaacaggacaggtgactcactttcaagtccattcatttttttcccaccaaaataataactatgtttacttccaaggtatcttcgtagattcaaaactccaattattttttaaaacattagtccaaatgtaagttacatttgtgacaagcttaaaacaactatttgccactccagccttaaggagaccaactttaatttccggagtatgtgggaaaggaagtggctccctggtccccccaggaggccccccgagcaagcatcgtcatgttgggatgtgtgagttccctccaaagagcggccggatgggagtggggaggcagtggggagacgcggctccccgctacaggctatgaaagaaggtccgcgcccgtttggaagggggagcctggagacactaggtctgcggctttcaatgcgctgacttggggcagcctctctctttccgagttactaacacaaaaacacagttaatgtcgttaaaataccctctcctttagctccgccctcctgtcttcattattaatctcctgtggccaaaaataagccttcactcaccgttgcgtctcaggaatgagtgagtgttttctgaggtgtggacgcgtgcgtgatctgtgatgcacttcggcctctaacccaaatatccttccaaggctgggaattttttttccccatatgtgaaaaaaaaatctttccttttcaaaccatctgttctacctgtaaaaagaggctgttatttaggaaaggatgagggaactcttgcatttgaaatggactttagatttgctgttgggtaattttttaaaaaaagttactttctgagaggaaactcgtgtaaaaaagcaagacgtgaacctgcagggaattagactaacgagtgaagaaagccaatttcaaaaaattaggcgctgtatgattcctgtatctaaacataacatttctgaaataaaacaattttagaaatagaggaaagattagtgatgccagggctccggggtgcggctgtaaaatcgccacaggagtggccaggtgggggtggatacgggaaggtacacagatgattacattgtgtaaaactaatacatgcaaaggaagacgagtaaaacggcaaaactgaataagatcggtgactgtatcaaagtcaatatcctggttgtgagattggacttttttttttggcaaagttttgcaaagtggtaacactgggggaaactaggcaaagtgaatgatttcttacaactgcatgtgactccgcaattaaggaaaaaaaaaaagcaaagaaaagcagggcagctgatgcgcacgtcgagacccgtgagaagcgtgagaagctctgctcacccaggggagagcgcagtgacccgcagcgtctattcatccgtccgcagtcaccgggcgctggcagagagggcgcccggggggcgggtaagtgggcggggcctgggggcgggacgacctacggaagtgacgtaacagggcggagcgcgcacctgggcacctgggcagccgccgcggcgctggctagacgtgcgcgatggagggcgacggcgggaccccatgggccctggcgctgctgcgcaccttcgacgcgggcgagttcacgggctgggagaaggtgggctcgggcggcttcgggcaggtgtacaaggtgcgccatgtccactggaagacctggctggccatcaagtgctcgcccagcctgcacgtcgacgacaggtgagcggcccgggcggggcgctggggcggctggggcccgggctggggtcggggtcggggtgctctggtcccggggtcctgcctctctctcccgaactcacccccggagcagcttcgggggggaaaccaattgccggcgaggccgcggggctccgacaatgtccactcggcctgtccgggccggaggggcgcgggggctttggcgagcccgggctcgatcgcgcacgtcggggccgggtcaggcggctcctctggggctcctctggggctcctcgggggccgcgtctgcccggacgtcctaaggcgcccagtcgtgcttcctgacactccccgagtggccctggttttcggggtctccagctcgccttgcgcctcggacccgcgcccttgggaggcgcgtccggcccgcccgggacccaccggggcgctgcggtctgcgcagggcttagaaaaattgccatgtgggcctctgggctttgtgagtggagttagcctccgttcgacttacttagtaatttacgttggaacacaaattggtgtaagactgtaattatttcggtcggaagcttcggcttggctcgggcgaggcttcccgggcgcccggcgcttgcgcggtggagctccggggctcgggcctggcagtggggtccggcacggggcccggggtgttgatccgtccgcccagcgcttcctcgccgcacactctcgttttagctgacttaatttcgagaccgacccgctagggaagggccttgcattcaagttctgtggccgtgccatggggccctcctgcaccccagtttcccagtccaaaagtcagaatggaacc

SEQ ID NO: 9278 - DNA, 6000 bp, Homo sapiens
aaagcacagctctgttgcaaaataatatctaacatttaatttgataaacctgtgttggttgagcacttactatgtgccaagcactgagctatgtccttgagttgctacccaacgtgaaattcgagtctatccaattttctgacatctcgtctccacactggtgtccactaaactgttttccctactggttttgatgcatcactgaataatctcacttcctgggtgaaaaatactttacatttctctcttgacaactgtgtttcaatagccttccattgacctacatacctcaggtatgggcgtgtgtgtatctggcattttcctccttgctgggtgccaattttatgagacataatccacaaacagttcaaatacctacttacgcttaagaatctacctgtctatatatttccagaagcttcagtctctccccacccttatgtatattagtgctaatgaatatgagcattaaaactaatctgttcgtcacagactaacttctgattgtcacaaacaactgacagaatcatctttggcagtttgattcttttcaagaaaaaaacacgactgaaaacgattaagataaacttgagttaaaattcccccccaaacatactgatagacaaaaggtgcttaacctattgtaagattaacagcagtacaattaatagtaatagctcccatttactaagtgctttactttgtgctaggcactatgctactctcattatgaatatctaattttgacctcacaacagcccattttacagatgagtagactgacttcagaaagaagtatacggagctagggctccaatctcgggtctgtctctatccactaaatggcaatgtgtgatactaccaacactattttaaaaagttttcgattctacatgtagatagaactttttctatctatatactctaatatgtttgtttataaatatgcatatatatgaaattggtaaatttaccagagtacaattattctaataaacaacctcatagttctatagttaagatggacctgaactcattttgttgaaagtccctgctttttatctgaacagtgcctacaaaaaaaaaatctgtttgcattttactgaagcccctcagttcttaaggccttttctccacactgtccaggagagctcagaagagacacacttagggactcagtcgccatggcaactgccaagctgcagggcctccagctgggaggtgggcctggaaggttgtggaaaatacagaaggcagccccagggtggtttcaacagtttccccggcctaggccatcccaccaggaagcagaaggcaccctgaccagcgcccctgcagagatcaaccatggccagcctgggactgtttttcttctttttgaaggggttaatgggtaaaaggaaatggatcgctccatttatacttaagaaggacaagaagatcatttcttacggaagaaacgaagtacagaggaaccgtggccactgttgccctccactctctcgagggccttcccctcggccctccctcctccctgcagagccgcacttgcgcgaacttcccacttgggggttatgggaagggcctctgtggatgatgggaaagctccgcaggggataatgggaatgcctcgcgggggatgatgggagacccctgccagaggaatatggacagccccttttgatttttaagtagtgaaagaggatttcctctcattttccagtaaggaaaaacctcctgatgatgtcctcatctttctgcctctcatctccccaccactcccacgccccaggaaaggaggaaggtgggctgaacaagcattttgagggccttcagaattggaaagcgctgcttctggcatcaccaggcatttccaggtcactgtggggttaggagtcagggatcctggggctctgagtgaggcatcgacttggcttgatgaagtcctcctggggcttcctgggtgcacagagaggtgcccagagctccgactgcctcttggcagctgtggctctcagctggatctgggctgggatgcagcttctttctggaaggaggaatttagaatccagtccaggtgctgctgcaggagatgccgggaggcccatcctgttgttcaccccttcttgcctttggtgtcaattatttggataattgccaaacccacagtgtggtgaaattactatagattgactgaaagatttgggagggaagaccctggctaattcgtatgggatagaaatcaaattgtaaaccttaggatttaatagctatagctagacgtctagctgctaatgatgtgatccagaacagggtttgcttaaccatgtggtttgcttaagccactctctggtgtttgcaatccaaggcatttgaactagtggtcctctgcttggtagatggtttagtcactgccagaaaactatagttatttctttatatcacagatctgggaggcagtatagtgatgggcaacagttgctcttgggtcagctggcttgatttgaatcccactagctgtatgatcttgggtaaggatcttaactgctgtcgaccaaagttaaggctgttgaggcggaaattgataaaggcttattgaaagccaaatttgaagattgaatggggaagacacaccaacaaagttgggtgtgttccaaagtctgttacaagttgcagtgcttttataagaaagttgaggaatgggaaggggactcctcatattgcagttgtcttttttcattggagggacaatatagaggttacagtcattggctacagatgacaacatacaggctaaaatgttttctgcatatgcacaagacaatcagtgaaacgtcatgattcagaaacaaatcagtatccttttcagtgtcagtagtttacgtattaattagtacatcaacagtctgaggaactcatgatacgatttgagagattcacagtaagattgtttgctcaagtacaggatgtaaaacacgagtcataagaccttctccaggtagttaaaatatagtttattcttttaagtgtagggatgcatgacttaactcatgcctggcatggccttaggtcctgtttgtaagttggtatcttactgccacagcgtccattctgtcagtcttatgatctctattttaacattaatgcttgttagttgttgtgtctaaactgcacaagggtattagtgaggcatgttcgacctcccttcccatcatggctgagaacgcagtttttaaggtttctggggccctcttggccaagaggggtccattcagttggctgtggtggggcttaggaggttatttttagtttataaccccctataactccctttccttagatgttcaatggaggaatgatagtgaggatttaataagataactcataaaattcttaaaacagtgcccacacacagtgtcagaacttagtaaacactggttactgtcattgttaggacaaatttgaaagctaaatttctgacattttaaatgtaaaaaacgagtatttatttgcatatacttatgttaccattctagatttctaacatttaaaatgcttctggcattttattataaaaataggacatgcttaattgtagtaactgggtaactgccaatatgtagagaagaaaataataatcatctgttatccctaactccccacttttccccataagaaaagctgttaaattttggtgtttacaacatttttatctttgcatctaaaaaacgacataattttggaatctcgtgtgttgttgtaacttgtgtatttattcagtaagtaatatatttgggcctgatgatgggttatggttgtaacctttcatattagcattgggaagaatctctaggggatgtgtgctctggaagatcagcagcttattcaccgcgtggatttggcttctgggattctcccatcaagaccaaatcctatagttattcagtcactcctccccagctcctgcagcaacaacaaataacacagctttgcagtctgggatgatggcagaggaaatgggagatgtgaggggccttcggcaggcggagtgcgtcaggtaaagcagatttccaagcctgcacgtgtacatgcgtgtgcgtctgtgattgtgtgggtgtgtgacagtgtaggggagccaggagcgagaggagaggacggcgatcgtaggggacacctgagagtcagaggcccgagggggctgggactcatgtcgaggtcggggaaggatgtaaaacccggacggacatcactgtaggccgcacctgctgagaggccagagctgcctccttgagagtgaagttgtttacagacaagagaagagatcttggcggacacatcacagctagccgcgaatcccgaagggtcagcagagcctagaaaggtaagtgggggtgggcagcatccccggaggggcctgcgaggcctgggggcggaagggagcgggcagtgcccgcactgggcaggggtgaaaccctctcgagagttggcccggacgcgtttcccgcgtccttcctcttgagggcccagtacccaggtggctcctcgttgtggcgtcacagaacagccgacaaaagtgatggatttcaggggccagcgacggcgaggtccaggtcagagagccggtgggcagccaggcacagaacccgctcaggccctgcccagtccccgccccctcgcttcccgagcagtgattggccgaagcggcccctcgttgctatgacggcaccagagtgctgccactggctccacctcgtcccttccgccccgcccctccgtattcccgggcggtgattggtcgaggtgcccttcccgttgctatgacagtacgcaaaggctgccagtggctcctcccgcttcgtccgcgtcgcctgtccccgctccccatcttccgggctgggagggaggcgggaccggccgcgtctccatggcgacgcgggacgcggcggtggaggcggttgctacccacctgctagaggcgctgcggctgtgatccaggctggggcgagaccatgtcggacctgggctcggaggagttggaggaggagggagagaatgatattggggtgagagctcctggtgagaaagggcttcccagggtgcgcagcggcgggggaacctcgaggttgggtttggagagtgaggaggcgcagaaaccagaggtctgagccacagctccccaggatccccggcagggacgaaggccacgccagacacacctgcgtgcgtcctggaagttgatggtgaaaagtgaaacgctgtgacgtctggttaccacatgccgcctcgttcttcccccacccccatcctgcctcccattaaaggcaaagatttcccagcggaaggctttggaagtttcctcctccctgtgttaattcccatcgaggcagttttctcggatgagcagatcatcccacgctgccatactgcccttgaataagtcatttctgtagctgagatttgctcccccggcatttagatgcatggaggatagttgcttcctggcagcctccaagaaatgctgaggaggccctgggctcaggagagggttcctgaagatattaccttataggcgtatcctcacatgtgctttcttcagtccccatctgaactgacccaggtctttggagttatttcctgagttaggcagcagagaggagaaagagggcacatccagcctgtgagctgggttctgtgtgggaatatttctatcacccagagagtagttcctccctactccagagagtgacctctccatggctgacagatagggaacctcagccactatggtctgcatgcacagtacagagttgaggtactttcagaattaactgaaaaatctagcgactctgcagtggtgctgtcagtgcctgcccagacctttttgctagctctgggcactcatctcccagcttccgcctgatttgctactcaagctatcacctctgtgcgctggaactacctgcccagtatggagagccagaagtgcctgaaattcacatc

SEQ ID NO: 9279 - DNA, 6000 bp, Homo sapiens
caccttgaaacttacatactttgaatatttatatttacactgtagttatttattcacttactgtcgcttagatttgtattctctaatcttgtccacaaagagtttctgtataggatcaagttccttattaaatgccactgctgtaacaccaatgttcctccgcaaatggactgagacggctgaccgaatgacagaggagaacctgaagagcctctgaagaatcatgctgattctgttacagaaaacaagcagcagaaacgttaatatacttattataaatcacctctaaatatatcatgagaatcaaattctactaattgctacagaattacatcatatcagatctcagtctatacctgaccacagttcccttctcctccttattccccattgcaagttttttaggtcttaaccaaaaggctctgggataatggaacagttagaaactcaggcctgaagcttcatcagggttagagcacaaaatgtgaggtgaggtatttcttcccccttgaacttagtcatggatcagagaaaacagtagaggtagactgttgcaacactgtccgctcctaacaggaaaagtacactggcccccaaactaatgtacaaggtttcccatacctcagccgggcatgacaacctgaaaatgtgtacttcacaggcccacagagggagaaactgctctgcctgttacaaatggattccagccatttaagaatactgtaacaactaaatcaaagtccagaagaaccagcaaagaaaaacagcagccagtccaaatgagctgtgcatgacagtggggaggatccggcagtccaactttatcagtgaaataaattggtgaaggagatggaagtctgaattttaaaaataaggacttatggccaggtgcagtggttcacgcctgtaatcccagcactttgggaggctgaggctggtggatcacctgaggttgggaatttgagaccagcctgaccaacaaaaagaaaccctgtctctattaaaaatacaaaaattagctgggcgtggtggcgcatgcctgtaatcccagctactcaggaggctgaggcaggagaattgcttgaacccaggaggcagaggatgcagtgagccgagattgtgccattgcactccagcctgggcaacaagagcaagactccgtctcacaaaaaaaaaaaaaaaaaaaaaaaaaaaaaaaaaaaaaaagacttaaagactttcaaatccctagacttccttaagctaaaatatattactttctaactaaaacatttcagtagaggacaattcctgttgagatttactttagtgatttaaagatcaaatgcaaaaaataatccaaattacaacaaataggtacaaacaggaattctagaagaaaaggaataaagagggccaggcacggtggctcatgtgtgtaatcccagcacttcagcccgaggcaggtggatcacttgaggtcagaggttcgagaccagcctgcccaaaatggtgaaaccctgtctccactaaacatacaaaaataagtcaggcgtgctagcgcgtgcctgtaatcccagttatttgggaggctgaggcaggagaatcacttgaactcaggaggcggaggctgcagtgagcccagatcacaccactgcactccagcctggatgcagggcaagactctgtctcaaaaagaaaaaaaaggaaatgattaaaagagaccataaataattagtagaatacatttttctcagattaaggccgagtctataaactgacagggcttgccaaaccccatattggaacggtgacaaaaggctcacaatgcaccacagcctggtacaatttctcaatctttttttttttcagacagggtctcactctgttgcccagaatgaacacggctcactacagcctcagcctcctggactcatgcaatcctcccaccttagcctcccaagtagatgggagcacagttgtgtgccatcacaccaggctaatttttactttttttttttttttgtagagacgaggtcttgccatattgccctggctggtaaaatttctgaatcttcaagtgaaaatctgatatgctaacatgtttcccatgccctccccaaatttcctaatagcaatactgtcatcatcacattgacaccggacttctactaagttataataggactagtggaagtatacaaactatgttattggtctaaagtaatatagaaattagatataagtatttagaggccaggcgaggtggctcatgcctgtaatcccagcactttgggaggccgaggagggaggattgtttgaactcaggagttcaagaccagcctgggaaacatggagagaacctgtctctaaaaaattagagcttgtattttaagtgacttcattgttttgttttttaaatttcatttcttttgtaattcattttcactgtattcaaaagtgtccacaggagtgggtgtgagaatggccctttaccactcagagtttgagcagcactagctagaaaactgtagagtcgcacaatagttctcaaaatagggttgggggtgggggaagaagtgagtttttttctctccaaggagacatctggcaatgtctttagacatttttggttgttctcaccaagctgagtgctactggcttataatgagtacaaagccaggaatgctgccaaacactataacgacaataacagccctcccacccctaagaattatctggtcaaaatgtcaataatgccaaggttgacaaactctggaatggcatgtaaaaattatcaaaagaaatctacaatgagccaggtgcagcggatcatgcctgtaatcccagcactttggaagaacaaggcaggaggatcacttaagcccaggaattcaagaccagcctgggcaacacagtatgaccccatctctacagaaaaaaaaaaaatagccaagtgcggtggtgggtgcctgtagtcccaggtacttgggaggctgaggctggaggatcacttgagcttgggaggtagaagctgcagtgagctgtgattgcaccactgcattccagcctgtgttacagagtgaaaccctgtctcaaaaaaaaaaaaaaagaaagaaagaaatcctacaatcaggccgggcgtgatggctcacgcctgtaatcccagcactttgttgtaatcccagcactttgggaggccaaggtgggtggatcacctgaggtagggattcaagatcagcctgaccaacatggagaaaccccgtctctaccaaaaatacaaaattagccgggagtggtggcacatgcctgtaatcccagctactcaggaggctgaggcaggagattccttgaacccaggaggcggaggttgcggtgagccgagatcgcgccactgcactcctccaccctgggcaacaagagtgaaactctgtctcaaaaaaaaaaaaaaaaaaaaaaaaaaagaaatcctactatcaatgcaatcaacaaaatatgcttcacctgacagaatgaaagcaaactgtttgaagaaattaaagaattcataacatatcacttttataccccatcagggaaaaatacttgagaaaaggctacaagcaaacaacaaatgacctcacaaggtcatgtgccacttattatcattcctatgtttaaacacacagaaactgaggattagaagtatctggtcaaagtggtcgggcgcggtggctcacgcttgtaatcccagcactttgggaggccgaggcgggcagatcacgaggtcaggagatcgagaccatcctggctaacacggtgaaacccggtctctactgaaaaatacaaaaaattagccaggcgtggtggcgggcacctgtagtcccagctactccggaggctgaggcagaagggcgtaaacctggaaagtggagcttggagtgagcagagatcgtgccactgcaatccagcctgggcgacagagcgagactctgtctcaaaaaaaaagtatctggtcaaagttacacagcaaaatctaacttaacacatatatgcaaaaaaaaaaattgtgcaattcaatgccactttcccttctggcaaactaaggacatgcttaacattcagcaataggttcacccgacatttgcttagccctagatactgtgcaaagtacttccatatatatcctttccttgtacccttacagcaatactctcaaagagttaaagtgttcttatccctgctttacagatgataaaactgtatctaagaaagattaagctgcacgtattctcacagttaatttgctctaagtctgactgcatagatgttactccttctgcaacacgggtaaaatccactttcattgtttcaattatccaccatgtaagtgcctatgattccccaatcgcatttctaattttagtattcatcctgagccccaaatctatccacagcattcaacagttctcatctcccttataagtcctacgaactcatccaaaaaacgaacacataatcccatatcaaaacttgttccttctcctttaatccctttcattttttttcactgattagtgaatgcatattgtccactaaaacgcagaagatagtcattacacaaatagctgtgaaataccacctgacataaattctctattccagtaccatcgggtgccacgagagcatatgatagcgtctgacatgatcagaaagactggggaaggcaacagtaagaaaacactagtctgagcagaggccttgttctgggtgggagcatggttctatttatagtgatgactgaccggccaaaggttagtaggttcgctgcctcttcagtgcatattcctatgaacaatccataaagtcgcctaatgaagtgttagcaccatcgtttttaggtgggatgcaaactttcaatattatgactaattttttccctcttaatggtacacgttctgcctaagtagcctagacgctcccgtgcgcccggggcgggtaggcctggccgaaaatctctcccgcgcgcctgaccttgggttgccccagccaggctgcgggcccgagacccccgggcctccctgccccccgcgccgccccgatttgccctcagagagggtatcgatcttatttctgggtctacggcaaactccaaggtctacaaacgtagaggtcagctgtgaccccgggccaggccgtgaaggtccccaggacacagagctgctctctcctcctagtaaaggtgagaggcagcccaggcctcgtgaaaaaacccagaactggagtcccaaaaggccacgctgatctagctaccctcccagtcaccttgcactcagtcccgagctgccaaagcctccgccgccaccacctccgctctacttccggccctggctccgcccccacacgcctacccgccatcgcaatgcattatgggccgccgtttcagtcggtcgacgctcaccggacaggaagcgtctcggagacagtctgcgaccggacgggtctaggtgagacagaagccaaacaggaggaggaagtggagggtaagtgcttccgggtcccctggcacagcctccgccatcttttcttcgcctaatttgacccgttctttttcccctccttgaaaccttgctctgtacgcatgcgctctttgagtggcctttcccctagttcaagctcccctccgagtcagcgtcctgttcgttagggttatcgaagtgtataaaggtgcagggaaagtgagactgtgtaaaacaaagcggattggggcgttgtgcttccttgtacctcgtgagcctccgttgccttgggcggtcgttttgcgcaccctgccgggagttgtagtcctggacccgaaggtgcctgggaggcgggaggggggttggggcttctcagcgccgattccgcgggaagggccctgggacctcacacttctagtcgcgggagctgcaggtcttacccggagagacgctgcacgtggagccctcgccgctgccgttctcagccggctctggagtgcgggcgggggcgacagggccgatt

SEQ ID NO: 9280 - DNA, 6000 bp, Homo sapiens
aattagtgcaacatgacatgggacattttaaattctttttttcgagacagagtctcgttctgttgcccaggctggagtgcagtgacacgatctcggctcactgcaacctttgcctcccaggttcaagcaattctcctgcctcagcctcctgagtagctgggactacagacataagccaccatgcctggctaattttcatatttttagtagagatggggtttcaccatgttgaccaggctgggtcaggtcaaactcctgacctcaggtgacccgcccgcctcagcctcccaaagtgctgggattacaggcatgagccaccgcgccccgcctgacattttaaattttcaagcagttactctccagcaggaaaaacaatacagaagtacagaagggaagcagaaacactcctctcttccttctcccaccctaagccccagggcactctcttgccgcaggcttcatatcaatacagcactaaaatcgtcatttgtgtattgcctgtgataacaattacacttgaatcccaaattgaaattattaacaattaaaaggtgaggtagaatcaaagaaaaaaaatccatagaatgaaaaacttagaatgaacttgttgtggattaaatcatgttccccaaaagatatgctgaagacgtaactccggtacctgtgaacttaaccttattcagaaagtgggtctatgcagatgtgatgaagtaaagatgaggtcaggttagaggagggcaggccctaatctaatgactggtctccttataagaagagaggaatttggccacagaaacttacatggaggggagagattggagtcatgcggccaagggtcaagaaatgccagcagccatcagacactaagaagagggaaggaaggatcctcccccagagcctccggagggacagtgtttctgctgtcgccttgctttttgaactctggcctgcagaattatgagaacaagtttctattgttttgagaccaggacattaatgcagaaatttgattctccacagctgaggaaagggaagatgagggaggttacacacttgctcctggtcacaggtgtgacactacagtgctcaggacctgtaatcacatcaggatgcttcctgtcaaaccacatcatctccagaagcatgaagatggttcttcttaaaaagttactgtaactaaaacactgcacctaaggaggaacggcagtgacgtgcaaagactgagctgggctgacccagattgacagctccaccctgctttgccttcactagtgtggccctggacaaactactctgcctctccaagcctcggttaccctgtctgaaaattaagtcacattgttgtgcacattttccaggacgttgcaaggatacaatgaggtgagccacgcacagggcttcacgtgccctttgagtgtccaacactccatcagcaagaaatcaaggtcagctcttgatcttataaactatttctcagactcctgtccctccttgttgtttcaagctgatttcttggctcacctttcccagtcctctgtaatacagtctttgatgaattctttctctaaagcccagaagctgccacttctcactcgaaggagctggtggcaaactggctttgactttcttgttctttcaacctcagtaattgttttttctcattgtctttaatagtttaccatttcaagtggctccatcagatttcttcttgctgggattgccttcttgttttcagcctcacctacagtcagcttcatttggggagcctggatggcttcttctgaagaacacaaactcttattgcatatgctggatccatattttcaatacaagtcttccaaataattgtgtactaagaggctgataatcaagtgaatgcaccatgattaaaataggattcgccaaaataattaggtggccctttacattcaagtgttcaggtatgagaatagttttgctgtctgctttacctatgttagtggagatgacagaaaatctttcagaaaaagaatcccaaaggctttttttgaagctactacaaggtatatggctgcacaccttctcctgtcttcagctggagttattgtgttaacatgaaagtctcttttttcataatagaaattgctgtaattataattactttagaagagtgttattattaataagaccaaattgcacggttcaagcaggtgctggttgaaagaactgttcaaaagttctacagttcgaaagaacccacataatgggatcagccgcaaacctggcagtcatctccatgccaacgtggccctgcctgccagcacacacgccttgcagctctcaggcgggcttccgggcacatgcctgtgactcctcacagagtcactgggctttaaacaatggacctctagttcctgattaaagccttcggggaacaagcacacttccaacagttgactttcccataaaagaaggggagctggagggctctggttcctgttgaacctctcctctcaaggcctctcccgtgcacacctggatccagcccttcattctgttgctcattcagcagtgctgaaggaaagaggagatgggggaacagcacggagttccggagggtccagttgcagtcatacaataagtccctaacaccttggggtgtacgttcagggttctctggctagaaagggtagtttgaggccaaaaccaaagagatcaggaggcatgaagggaaggaagtcgttatctgtctggtggttcagaacttggcttctgaagttcagctccctggcttccatttttggccctccctctttcttgccctgttgccctggaaagtcattcagtctctccgagcttcagttttcccacccccaaatgcgtataagacccccgaggggtggtgggtggtgggtggggattcctgggaaagcacacctaaagcacagagcgcagtgcttgtcacgtactgagctttcagacattgtctatgactattacttaattcttgaaaaattcttggttatttattgcttgaatttacaattccatttttctctccacctaagcaatttttattttaggcttcagagaatcagcagagaataaatgcatgactcctggccattaatagagcaggaaagctcactccaggttcagaagtcacctcactgctgccccctctagccggctgctgacaccctgctggtggtcagagacatttcagggcaacacaggcaggtagtgaatcctaatgcagtagtcaggaaagcctgactttacagtaggcatttggaaagatttggttataaagcagcttatcgctaaatcaagccaggagggaggtacaggatatttcattccccatcacatgtaaaaattaaatctgtctctgtagaagcagcgctccctggaaacatgctaatggttgagaagtaatcttgaaccaactactgccttggctacggtaaagacaggagcctaggtactcaatacatttctgttaattaaattaattaaacctcatcattttaaaataaaggtcattgaattaattaacaggcaagttattatttataaaagctttttttttttgattgccaaagttaagtattttttagtccttcttcaggcttctccctttcccctttgctctggagggagggtttcagggcttcttttatcatagccctcagaccacccacatttacttttagtagagagaattccctcgcatcaaagcacacatgtccaatggggattcattcaaggcctgttccaaaagattctctgcaggtcacagaagaggttcttcctcaatatcttgtcatatttccaaggttctcagcaccaggcacatgttcccacgtgttggctgcaccaagaccacatcttacagccaagttaagctccctcagctgatggggattcctattccctccctctaaccatccactcctggagatggcaaagatcactcacgtggcttcccatgacttagacgaaaggcaactagaatcaaagtttgaatatacgcttttgaaggtttttttttccccctaaactaattaaacaactacagaagttattcggcagtttccttttttaaaagaattagcatggcatgtctttcctcttaaagtcttgaataatttaatgagaattatacaaaagtcatgagtatgttctatttatgggggaatcatagctgaatcaaaacccaaatgacaatgttaaaaataaaaataaactatcttcaaatagtgcattcaattgagcaaaggacttcaaatcccacttggattagacagtttgaaagtaggagggggcagatcaattgggattttttttttttttttttcagatcactgtgcttgggaacatttgtttcttgctacaaaaagtgttagtaaatgaacatcagagtaagagaaaaggaaagctgtttgattttatttttgtgttgtaatcgggataccacttggtccccggacacctcactcagcccctgtttttttcccggtagctggaatgcttttcacactctgcacacccgcgtgtagatgcatcgctccgtgcagaggggcagggccgccggatgagcgaggacacagctgacaaaccaactccgagaaaggaaagcgggcgcaggggagacgctgctccttcctcagagcagcaagcgagccacttcttaaccgggttgcttttagctgagctcatgcataaatcctttttaaagggtactgcgcctttggaagccggccacgagcctctttagcaatgagacagcatggtggtggggtggggggggggcgggggggagggagggtatgaacacgaggtgattttccccataatagcccgtcgcccaaggcccaccgctccgtctcccgctggaagtaggtgtcgcccgcaagaaggaaatcacgttattggaggcggcaagttccaggtctcctctcccgcccagccccgcggagggggagctcacaagttctgaaacactcgcgcacacccctcagtgcgccccgggcgggggctgccgtcctccgcgactcaagagcgagcgcccccgctccccggcccacccgagcccctctgcgttccccgctcttctgtgcggggacagctgctgctttgggggcgacgctaagccgcgtggaggcgtctctggacagccccctccctccaacgagcccgaaaagcccgcggcagcagccgggggtccctaccttctgcgggggggtcccgatcagcatctccaggtagtagccgcggccagagtccccctgcaggttgtctaccatggccaagaagttggcggcgcccgcgggggacgccagggcaggctccagggcgagcgccaagccgtcggcgtggcgctcggcaggggtcccgggtcccggggtgggcgcaactacgcggttcgtggccgcggccacccggaggggcagcgtgaagggcgcgggggccagctccggggcggcgcgcaggagccactgggccagcagaggcagcagcagcgcccgggccagtgcgcccatgcccacggcggggcccggggggcgcgcccagcctagccggtcccgtcccgtccggcagccgcggctcagcgactcggccggcgcgcggggctgcgggcagggatgggcgcgcaccgggaccggcggcggcggggaggacgggaggagggcccaggggaggaggctcgcgggaggggaggaggctcgcgggaggggagaaggcggaggccggggaggcgggcgcggaggcgcagagccgccccagcccgcgccgccaagttgggcaagttcttctccgctgccccctctggcggccgcgactgccccgcagcggcccagcccctcccccgcggccaaggtcacagcggggctcggggggcgccggggtccacctgcgcctgccctccccaccctcgccgggctcaggccgcgcctcttccccgggaaactcgagtcccgaatttcctcggaaagcgccccagcggccacggccaac

SEQ ID NO: 9281 - DNA, 6000 bp, Homo sapiens
aaagttctgccccggcaaggccactcatctgatctcagagttgtgtaacttatatataagttatgtgcttatttcaccacagccatttgctaaccctgctggtagtcagtggtcatttttctgtagggaccatggttcttagagaaaccactggagaccacgcgggagcccaaacactatctgacaatgccagtaccaaggacaaaggacacctcagcactgttctgggtcacggcttccaccaccaaaaagcaattcaacggttatgggtgaggtcagtgattcaagttttatgtgttttataatgaaactggggcaacacaactacctgcacagtagccctcacctatacacagctccatgccaagggcctgccccaccaggactcaccactgatccctggagaatgagatgatgaagcgaatgccagcggggagtcgagccatttacgtcgccactgaccactgagcctcggtcgcagaataagatgcttcataaatgagtcattaatcctggctccagatcctctctctgttgcccctgccgctcccacaggctggaaagcgtggaaagaaggtgtcctgctgggtcttgtccccttccttctggcagtggctctgctctctacaaggaggaggagaggcattcagagtccagtgtcgtgacattcacaccttcagcgttactggcagaagtaaccacacacgtacagtagcagtacccagtcctgatcaaagctgcacgtctgatacaagcaggggcccccaccagcagtgttactaggaagagggggagtgaggtggagtatctacccttgaggcggtttgttctgagaacctggaaatgaatttcaaataatgttctgatggtggataaaaaggaaccaaggaactcatctctatctgggaggcatctagagatcaacccattcacaaaaccaagtatgtgtccagcagccacgctatgtgcccagatatcaaggcatgccagggcactggactgcctcagttccacccctatggaccaggccacctttgaaccgtagtgacagagaaatgtgggcctagacaagagggcagatcaaaccaatcatttaattgtgactttgccatttgaatccaaaggaggaatgaatttgcctcgtctgcctcttcatttttcatctcctgtggtcacctcagaggtcacagaaaatgacctgattatgaagtcagggctgaaggcagagcaatataggaaggaatggggagggaggccagagaactgagaaggggcccagcacagcaggcaggcctggtctcccatcccaatgtcaaactcatgacattcctgagtcactgcgtcctccaaagccaatcagttccccacattcacttttgcctccctcgaaagtgagcttccaaaaatgcacattctccaaggatttttcccttataccaccttttacaaaaagattcaaaatccctgctgagctttcgtcccaggagccgcccctcatctcttctatctgctccagccagaactacacctttctcctaggtcctacagggcctgaataggtgggattcaccccactccaatacctcctccttccaaggctgaccctgggctgtgtaagccgaggcaagtcacttaacctttctgctccctctccttcaaggctaaacaatggggatgatagcatccatgttgttataaacatgcaatgagataacctatgggaagcacttgataagtggcctggtacgtagtaaatgcgcaacaaacactagctgatattatcctcattgtaaattcaaaagaggaaggcccgggactgcagggcaaggtcctacttccatctccttgtccagaacctagcacagaccacgtgctcaagaaactcacgttgaatgaacagccacaaatacttcaaaaccacgtctgctcaaacctctagatttaagcaatattttgctcaaaatgggtgggctccagaatgggtctggatctactctgggaaatgactttgtgatgacaacttcagagtaaagaatttggttcaacagtgtctggaaacggatggtcagaagcaaacgtcttcctctcaagtgctgcttctccatgtccagcgtgtctggaaacattccattgccatctactaaataaatcaaaaacctccaactctgataaaacctgtgacaacaacatcaaaggcccagaaggcactgacaaatcaagaagggaaaaaaaacctctttgatttctttttaaaacaatgatggattcttttccctgtaaaatgggtgaaagaaaagtgctataaattctcatagtgagtgcagttaagatgtgcaaagacagtgattttacatttgggatgttaagagctcaactaatgaggcccttcctccctagcctgtgcagcaccactaaagaccacttcattttgagtgggtcaagacctctggaagcacgaaccatgactgacatgctctcatttgagccccgtgaccaccctgaagaggcagggcgttcttttcacaagggagaaaaatgaggctaggcggctcgcctgggtcagctggataagtggggcagattccagtttgtcctgtttctctgagccacctcctccctccagccactcttcttcctgcccatcccctgcagagaaagggcagcagaatgggagcaaatcacttggtttaaacccagtttttggcacactgcccaagtacataaaaagaagagatacttttttaaaaagtcactctctacaggcccccctggaacttaccattccagggaggaaaagcggcagaatgtccagtttcattgcactgtcaaacacagcaacttaggccaggcatggtggctcatgcctgcaatcccagcactttgggaggcagaggcaggcagatcacttgaggccaggagttcgagaccagcatggccaatatggcaaaatcccatctctaccaaaaatacacaaaagagctgggcgtggtggtgcacacctgtaattccagctactcgggtggctgaggcatgaaaatcacttgaacctgggaagcggaggttgcagtgagctgagattgcaccactacactccagcctgggcgacagagcgagaccctgtcttaaaaaaatataaaaagatagtaacttaggaaacagcccattagagcatctttattacaacctgtaaaacctgcacatgtacccctgaaactaaaagttaaaaaaacaaacagactctgaaagacacatggttttatacctatttcttcaaaaaacccaccctaggcaactgtaaaacagaataagctgaggaaagaaacattcacaagctccactcccagacccacccacatgtgatctgcgctgcctagaaggttccaagtaatctgcagagactcaaataatggggataggaagtgagcaatagcaggagtaaggttcctcagtctttttagggctgaggtggcattacacataatcaaagcggccccacagatattttaaataatctactttatgacatttttttttaactgggtctcactttacaggcaaagatgggtgagaaatgcaattctcctccaaaagttttcatgcattttttcttttcttttttttaaattacgagatagaatacaacttcctgtccagagtgtgctctttctatggctttttgcttttaaaggcgctttccatattaaagatgaatgaaaatggtcactatctctttccccttggctgaagtacaaggaacctgaattccatttgcaccacctcccttacctgcctccaacccccaacaaagagaacatcacaggtgggctgcatgaaacagaacgtgtaaatgcaggtccaaaatgacttggtgaatcacaggtctggggccaggtgttttcaagcttgctctcaaaggggattaataaaaaaacaacgggggaagtctaaaatatttatccacttacacaacttcagacgatttaagttcaagggccggcaggcaggcaggcaggcaccttccaggcaaagagctaagggagacccggaaagggcaggctttagcaattcctcctttggaaattcaaacctggggccgcgggctggggtgttagcggggagtgggggtggtaaggggcttggccagtatccttcgttcaaatgcaaatccttagactgaacgtaccttctcggtcaccaggattacggcgtgggccgtaagggctggaaggctggtggccagcggcgaggggactttccggcgcgtcaagccctttattataaacccagaaggtcgctgtcactcgcattggccaggaggcccacgggctccgggaaccagctgctcagccgacaaacaacgcaaaggcccagggtgccggcgctccgagccagcgttctgtgccggctcctccctgggcggctggtccccggaggaggtgaattccgcgggcacgcccacgtccccatcgcggcagacaatgcgcagggtcccctcctgccggctctctggaccctcagctgtcaccgcggcccgggccggggtgggcaggggacccggctggacagctaagctcgcccctgccggggactccgtggagcggctgccggccccgtgcccgctccctctgcctccacttccccggaatcccagcgttgccccggtccgggaacgcccggcattgtcgccgagggccactcttctagatgtcgtatttcaaagacttccctccgcgaaaatagcttgagaccgtccccggctctcggaaaacatccaaaccagcccccacctccccccgaaaaaaaagaaaaggaaggagaggagccgagctccgagtgcgcagggccccgcgcccggctccctgagggcgccgcaggtgctgagcggctgcggcgcctgagcgccggctgccccgcaggtgcgggcgggggggcggggggtccccgcctcccggtccggccccggccccgcgcctcacctgcgccgccgaggcccgcgctccgcagcccagcccggcccggccgccgcgggcgcttcctgctcgcgacttcctggagcggcgcgcgggaggccccgccgccctttcactttccctggcccgcggggcgccggcggagccgcgcggctcctccccctccccggccgccgcgacccccggctccggccccggccccggcgtgcccagggtcgcaccagccccggggccaccgggcgggggcgcccccacgccttgcggcactgcccggcctttgcgggcgaacccgggtcatggcccgcgccttccccggctccgagggcgcacgggctttcgctggcgcgctccccaccggcctccgggcagtcccaggcggcctctgcacccctggcgctctgtcctcaaggcaggtcttccccacaggcggcgagggtcacatgccgccgcgcccccacccccaaagagggcctttgcttggcctcccggcttctattcctattgtgtcatgtcaaggggcacaatcatgaagactagcactccatagcgtggaaatgcggcacgcggatttggctatgtcgaaccaacttgtaagccaacttgtgtcccacctcgcaggcacgtgacagaggcagctccctgttaggctgcgggagcccgccgggttcttacccttgcgggccagtgccctggcacacaggctcccacgtcaccccagaaacaactcttctccttaggcagccccagggaggggcctggccagtcccctagaagctactgccgaacacccacagtggacccccaggatggcttcagagcagagggggctcccagcccactcctcggggaagagcaaagtgaggcagagcggaaattttccggggaaaaagcctgcccccggataaaacaatgtttaaggataaaaccaacccgaggcctggctgtaaatgtcccaacaggccagtgcccctcgcacccttccccaggcacgttgagcttccctctggagaatggagaaggcattcttccc

SEQ ID NO: 9282 - DNA, 6000 bp, Homo sapiens
tgctgtgcaattgctcatgctaaactctaaacaactcttttgtagagccacatgaggcaatcacatctttagggatcaaatatcttccccaaggacacggccagcacatattttgttttctccagcacatgccatactcactctgtagttccacgcgggggagacctggaacccaggtgtggataccctcatgaagtcacttcatgaagtcattgggatcgctaacataaaagataaacatgcaaagccaagtgcctcgactataatggcaaaaaggcatggcatgggctgggtgtggtagctcacgcctgtaatcccagctctttgggagactgaggcaggtggatcacttgaggccaggagttcaagaccagctcggccaacatggtgaaaccccatctctgctagaagtacaaaaatcagttgggcacggtggcatgtgcttgtagtcccagctactcaggaggctgaggcaggagaatcgcttgaacccaggaggtggaggctgcagtgagcagaggtcgtaccactgcactccagccttggtgacagagtgagaccctgtctcaaagaaaaaaaaaaaaaaaggctgggcgcggtggctcacgcctgtaatcccagcactttgggaagccaaggcgggtggatcacgaggtcaggagatcaagaccatcctgggtaacacggtgaaacagtgtctctactaaaaaaaattagccgggcgtggtggcgggcgcctgtagtcccagctactcgggaggctgaggcaggagaatggcgtgaacccgggaggcggaggttgcagtgagatgagatcgcgctactgcactccagcctgggcaacagagcgagactccgtctcaaaaaaaaaaaaaagaaaaacaaacaaacaaacccaaaagcacagcacagaacaagaaaaactacagggagacagacagacagagaagaaatttaattttccacagtaaaatctccgtggctattcagactgagtagagacagcacagaaagcaaatgataaagccaatcagtactagaaaatgcacatcaggaaaaaaattaattatagagtatgccctccttcaatccttgggacagctgacagtactggactatggactgtaaattagatacaagtattttatgaatgtaaaagttcctgagcttctcactgtactatgtgatgtaagagattatccttgttcttgtgaaatacacagtgaaatattacagcacaaagggcatgagagagagagaggaagggagagaatgtgaccaacattaaaaattggtgaacctgggccgggcgtggtggctcacgcctgtaatcccagcacttcgggaagccgaggtgggtggatcatgaggtcaggagatagtgaccatcctggctaacacggtgaaaccccgtctctactaaaaatacaaaaaattagctgggcatggtggtgggagcctgtactcccatctactcgggaggctgaggcaggagaatggcgtgaacccgagaggcagaggttgcagtgagccgagatcgcgccactgcactccagcctgggtgacagagcgagactccgtctcataaaaaaaaaaaaaaaaaaaaaaattggtgaatctgattgtaggctatttggaaattctttgtattctacttaaaattttgaaatgttctgttagtctggaattattttgaactaaaagttaaaaaacaaaagccagcaatgcacagacgaggactatcttattcacctttctacttcttctctgatgtagcaggccttggggatttttgtgaaatgacagctggatctgggaagaaatttcctcctgcctcactgaaggacttgtctatcttcgtatgtttctgagtcacacagaaagcaggtgtgttggcttgtcagccttgggcctcctgctgctgtttgcgcctggcctaaaggtgtgtcacctgcagtccagcatgtggcgtatggtggcaggctgccaagggagtgctggcactgacttccttcaccaggcgtagggaaacactgacaggcaggagaggtagagggcgttcagatcaccactgagatgaccgtctagggtgacactcactcttccttcacagcccctgctgttgtccgagaatggggtttttaacagtcagtagctgtcttacttttaatttcaggatggaaccacggagaaactgagcactcattatgcaaattatgtgcatcgcgcatggcactggggcatgatgttataatccattggaggggaacaggtgatatatggtagcaaggggcttcctgaccgctttgcatatctcagtttcttgggtagcatccactcaacattgctgacttccagcaatactactcatacctagagatgacagcagtggtatttttcttttaaaatatatcaactgtgacaaacaagctgggatgggcacagcatgaggttaccactatggctgattatatctacatacgcatgataaaatgtctgtatctgccagcagccctgtgattaacagtcaaatcgtcaaccatcacaactagaaaacctaaaagagaaaaggtggccacgagaatttcccagacagcaaaaggctggcagggaggctccctgagggttgtcacagtcacacggtgaccgtagtcagactcccttcctcctgtggcccaacccagtgaccagcccagggctggctcctccggtgcgttcctgccaatagtgaggccagacccaccttaggtactgagctgtgaaagtcaggttccctttggcaaaagcaggtgactcccactgtagaatgttcttgaaattaacagaattcattctgacattttcgggaggtggtaccattcccaatgctatgaaaataagacaaaaacatttacaacttttctcctcaaaacagatgcccatgaaaaagcccacatccagcacttggttctcctctatggctccatgtcttcaaaggccacgtgggtgagggagggagagacaggttggctgtgctgaggagtctagattttctttgaacagccgtgaggagaaatttctggaggggcaggagtaaaatggggacagacaaaggagccttggatttgtctggtggcagaaagctatgagggggtagggtgggcacatggatttcagatatatttccagacgtaaaaacaaactggagacttcctgatacatttgatgcataaaagctgaggtcaatgtccattttgggcttaagcagctggtgccccgattggagctcagctggggaactcacgagtcccatttgagctgcattaggttggagatgctggagagaggctgaagtaggaatgtcagggagacagccagatgaatgagcccagaggtcacaccaagaagagatgtgggctagagacagaaattattttcaaaccttttaatagaaaattcgaaacctggccaggcatggtggctcgcgcctgtaatcccagctctttgggaggctgaggaaggtgaatcacctgaggtcaggagttcgagaccagcctggccaacatggcgaaaccccatctccaataaaaatacaaaaattagccaggcgtagtggcacacacctgtaattccagctactcgggaggctgagggaggaaaatcgcttgaacccgggaggcggaggtggcagtgaggcaagatcaagccactgcactccagcctgggccacagcaacagagcaaaaccctgtctcaaaaaaaaacaaaaaaacaaaaaaacaaacaaacaaaaaaaaaaacggaagaagaaagaaagaaaagaaaatttgaaacctacatgcaagtagaaaagtagaagactataataaaccaccacccatcacccaactggtaccaagagagatataaatgtgcgagtcatgggcctatagcccgtgtttaatgccagggtttggctgaaatcccccaaaggaacagtgccagggaaggagagaaaaggccttgggcatcacaattagctacatagaaacctgacagagcaggagggtcccaagcagagacagcctgacagggcgggaaaccggaggggtatcccggaaggccagggaagagttcatgagaaaggaaggaggtgaccatggtgttattggaacctaggcagtcaatttagaggacagaaaaggtttcaatggatttaggtttagaagccatggagctggggcgctgggggacagaatccagatttcagggtgctcgggcctgaaccggaaggaggggaggtgcagcgggtgatgggaggcacatctgtagggagggctggcactgagggggcagacttggggtcagggagggctgtcagggcactcggggactggtgggggcctccacttgaactgatagtctccagaagggtcagatgacagccacggtgggatcttgggtcttttggggaagctactttatttagacgcccgccagcagagagctgcaggaggacagggaatcaaaagacgccgggagtctccccctgagtttagggcccagacggtctgtaatccgggcgcggatggggctttctcctgttacagaatcgacggcagcagcagcctagttgcgtctcagcagccggccgtggcgtttgcatcttctctcccgaggccccgaaggctcttaagtcacttgcagggcgcccagggatgggatcaggggcggcatctcgcggggcctcccggttcccaagcgcgccccctccccgcggacccctcacctgacaccagcaggcagccacccagccagctcccaaggctccacgccatggacggacgctgggggttccgcggcttcctccaagcacacgacccccgcccgcgcccgggagagcttgtccgcggcggcttccgggaaccagcggagatgggcggggcggggtggggaggggccgggcgaccgggctcccaccccgctgcaggccccgcccaccagcccgggtccacccgcgaggcgcggggcacaggcttggcagatgcacacgaggaagaggaagggatcctcgcaagctttgaaaggcgccgtcaagtcaaataaataaatgccctacaacaccaacccaggactgagatctgcatgctggaatgacggtggtggtggtggctttcagtattccccaggttttgtccggagcaccggcacgccctctcttgaagtccgctctccgcacaggtgagttaaaagcacttcagcagcaaatccagtttgagggtcttctttacccttctccccagggataaacaacacaaaaccaagtcatctttacgcaaataactagtttctttcagagactactaagaaagcgttaatttcctctttttaacttgattagtggttagacgggaagatccggagctgtccagtgtcttgggtaatgcacggcatcgcctgatgtctgacgctagaacaccacgtaaagtcaagcagagggaagtgaatgcgccctaggcccctgcaggccaccaagaagagctagagggagttggtgcaatcctagagatgccggcaggtgcaccaatctgtggcacacgtacgctctccaatggaagacaactcaagaccacaccaagtttgtattaaaaaagtactgttgtgttactttttaccaacctccaatcattatacaaaatgttaaaaaatacacaaacacacacacacactcacagccatagaggttatcgcaaaagatcaacccagaatctttcagaatatgacagatgcactgagaaggcagataaattgattcaatatacaaaaggcctctttcctatggaatttcattagattaaataaggtgttccctcctcacagcctcatccttatgagcaatcatataaataatctatttaaagtccttgaactataacttgtataatttttagttttccccctttgaaggggcctaagagaaaggtttgagaaaccagctcttgaggggggcaggggtgaggggtaagaggtcctgtgcctttca

SEQ ID NO: 9283 - DNA, 6000 bp, Homo sapiens; identical to SEQ ID NO: 1006

SEQ ID NO: 9284 - DNA, 6000 bp, Homo sapiens
ggctgcctggggtgcagtgaaaacagggagtaatggccactgggcacggcgatctttctcaggtaaggcaaacgtgctaaaatgggatgatggcgatgcttgcacaactctgtaaatgtatgaaaaatcactgaaattatctgggcacagtggctcatgcctgtgatcccagctactccagaggttgaggtaggaggattgcttctgccccggaggttgtgaccagcctgggtcacaaacaacatggcaagaccctgtctcaaaaacaacaacaacaacactgaattatacacttgaatgaattttatgagctgcaaattatagtgcaataaagctgttaaaaaaaataaaactaggccaggtgcagtggcccatgcctataatcccagcgctttgggaggccgaggtgggtggatcacgaggtcaggagttcgagaccagcctggccaacatggtgaaactccatctctactaaaaatagaaaaattagctgggcatggtggctgtaatcccagctattcaggaggctgaggcgggagaatcactggaatccaggaggcggaggttgcagtgggctcagatcgcaccattgcactccagcctgggtgacatagtgagactctgtccccaccaaaaaacaaaacacacacacaaaaaaaaacaacagtaaactctcaattccatctgctcaacatgctccttctcccatcttttccttctcagaaagtagcccctttacctgttggattattctagactcttccttctcttctcctgccatgctcaaccccagtcctgtttgcctcttcttcctaaacacctgttgactcaattgctctccatcgccacaccgcagtgtgggctgcctgttgcctgcatgtttgcaggagcttcccaatgattctcccacacttgcccctttccagtgcctttacacacagtgctccaagaatccttttaaaacaatgcatacaactgccatgtttaaaattgtttccataaagcttaaaataaggccaggtgcagtggctcacgcctgtaaccccagcacttcgggaggccgaggcgggtggatcacctgacatcaggagttcgtgaccagcatggccaacatggcgaaaccccgtcactactaaaaatacaaaaattagccaggtgtggtggcacatgcctgtgatcccagctactcgggaggctgaggcaggagaatagtttgaacctgggaggtggaagttacagtgagctgggattgtgccaccgcactccagcctgggtgacagagtgagactctgtctcaaaaaaaaaaaaaaaaaagaaaacttaaaatagaaccaaacaaccccttttccagcttacaagactctacccacttgtcactgcaccctccaaccccaagacggacccatcctgccacagagcctctgcatatgcgtgcctctctgcaaaaatatactgcaccttgcacacccacccacaaaataagaccgcctactcaatcctgggaaggcctgtccctttttctgaaataactgccttcacacattttgaaaatattaaggaaaagatggtaatgagagctggtagtttgttccttttgccaagtaaagactaagaagttgatatatccaaaatggtccatattattattattattattattttttccagaaaattcagttctgaaacccagcatctctaaaccaccgcaatactccaatggtgcacagtctgttcactctactaagtgtctaaacatgggggaaagaaacataaataagacaaggtccctactctcatagttcatagcctaataaaagtggaagtacctaaatacataatttcagtttaatgtgggacacgtaagtgtcagagggtggacaaagtggccttgctccttttaacacacataagtgacagagggtggacaaaatgacagagtctgatgataccaagaggaaactcagccaccggcagaggagtcctcaaagtccagaggtgtgggcagctagagttaccaggaagagaactgtgataaggtgtgtattgacgataaggtgtgtatttagaaggtggggtggcaagggacgccactgctcatggcaagaagggcatcagccaggtaagagcagtagctggagcagttcagtgttatggttggccatatgaagaaagtgctatttggtgtaactaccagcacacgagagaagtttggaaatcgtcattcatgcaagctcctttatttcgaaatatggggcacgtggtatgctaccaagcaagtcttctgggtgagcttggtaaattcaccatttatgcatgcatttgtttttcttctttttttttgagatggagtttcgctcttgttgaccgggctggagtgcaatggcgcgatctcaactcaccacaacctccgcctcctgagttcaagcgattctcctgcctcagcctcctgagtacctgggattacaggcaggtgccaccacgcccggctaattttgtatttttagtagagatggggtttctccatgttggtcagcctggtctcgaacacccaacctcaagtgatccacccaccttggcctcccaaagtactgggattacaggcataagccactgcgcccagtctcttttttgttttgttttgttttggtttttgatttttgagacagagtctcgctcttgtcacccaggctggggtaaaatggtgtgatcttggctcactgcaacctctgcctcccgggttccagcgattctcctgcctcagcctcccgagtagctgggattacaggtgcccgccacaatgcctggctaattttttaaaatatttttggtagagacagagtttcaccatgttggccaggctggtctcaaactcctgacgtaaggtgatccgcccacctcggcctcccaaagtgttgggattacaggcatgagccactgcacctggccttatgcatgcatttcttttttcttttcttttttttttttttttgagacaagagtctcgctctgtcgccatgctggagtgcagtggcgccatttcggctcactgcaacctgcgcctcctagattgaagtgattctcctgcctcagactcccgagtagctgggactacaggcgcatgccaccacgcccaactaatttttgtatttttagtagagacacagtttcatcatgttggccaggatggtcttgatctcctgaccttgtgatccaccccctcgacttcccaaagtgctgggattacaggtgtgagccaccacgcccggctgcatgcatttctttactgcaatacacgagtcctgtgagatgggtattaggcccaagatgaggatattagaagtcaggccattcggaaaattgcccaggtcacacacccagcagctagcagaaccagattcgagctcaggtcagtgagatagtacaggtctccactacattatgctactgataaaattattggttcagttctcaaatagctcttttgccaatgatcttgcaatctatcctggatatgtctcctgtgagagattgaagagttcagtaaaaccgacagttatacaggctataaataactagacacagaaagaagtaatcacacaagaagtgtatctgctcagataccttaaaatcgaaaatgtcagcaagaaatctctctctttacccatttttaatttcatagaaaatcaaattcagggttgggcactgtggctcatacctgtaatcccagcactttaagaggccgaggtggaaggattgcttgagcccaggagtttgagaccagactgggcaacataatgagaccttcgtctcaaaataataataataataataatttagaaaaagaaaaaaacaagttcaagagaaaaaccaactgccagatcccaaaaaagttcactgtaaatatgtctatatgaaggaacatttctcagttcgatgaaaatgaggacagtgaccctaccacataagcaaaaacatttagcaacagataacagatatgtactattagtaataaaattgataatgatccttagtccacagcacagaaacactcatcaccaatgggcttaatcaactctgggacacactgttttgaatgtggtctttcaaagtggcaattaaattgtactggaaaaaatttaagccacctaatggcagcagacttgtggggccggggggacggtcttccctcgccttaccaaaaaaatcctagcaaagtcttcccaattgtggggctgcagtcgcgagtgtaaggcaacactgcgggtaacagtccccgcgagcagccgggaaccctgcagggcgcaggggccaggctggcagagcgcgcactgcggcccggatcccttctcctggggactggctggaagactggggtcttccccaacgaggaaagcccttagttctcacaggtctgcgtccccagcctcctccccagccagggcaccagcaaacaaaggctgagcgtctcttcgtgggccggccccgggagggcgcgcgggccgcgacccacccctggacctgcacctgccgccccgctcggcgagggcgtggccggcatcatatcctccgcgccagggtcgggtaaccctaggggaccccacccagtctccccgctgccctcccggtctccggccccgagctctccgcccccgcactgcagcagagcgcgccgcaggcccgggccgcgcgccggtaagccacctgcaccccgggccgccccacggcgccgcccaagccctctggacccggagaaggacccgcgggccggcggggaggagatgcccggctcctccggcttcgcccagcggctgaggactggacgccggacagggcgcaggcacgacttaccgcggcagtggccctgttggcgggcgcgctcacgtgcggcgcggaggagccctccgggctgggggagagagactgggcagggctgcggcgcggccgggagccagaaccgccgaggaagagccggagaaccagcggcagcggctcttccccaccgcgcgggtcggggcggagcctggaagccgggcctcggcgcttggggcggggctggaaggcggggctggacgcctggaggcgggctcaggggcgggacctggaggtgggccataggcgcgcgggggcggggtttccgcgggcggggcggaactagaagacggggcctgaccgaaggaggcgggatcaagggcggggcctggaagtgggctgtccctacaggggcggggcctcggctggccgggctaggctggaaggcggggcctgactcatgaaggtgggatcaagggcggtgcctggaggcgggccataacaacaggggcggggcctcgacgggctgggctggactgaaaggccaggcttgactcacggagtcggggtcaggggcggggcctggaggtgggccttagacgcgggggcggggcttcggcttgggagcagggcttggggagggccccggcgtactggggcggttcagtcgcctcagccgcggtgtgagggagcgggagtcttccttagcttctccgccatgggtgtcgcttcgtagccgggctgctccgggaaaggcctcgtacaggtgagcggggcggcgttcgcgcctcacctggggacccccgacacaaccgagtggaaggggacattggtcagtgcccgcccaaggtcgtccgcgcgtgtgtcggccctcggaggtgctttggagtcactcacagaaacggagaagcgggggctcctcgaagggtgcgcggcacctggttcaccccatcttttccctctggaccacgtccaagccctccacacacgtttggggcgcagggggcgcggcgggcttgggacccctgctaagttgccccagcccgcacgggcctcaggtttccgaccctgggcgacaggagaggtgagatcatttctacctggacagagcttatcacgtggactgtggctcaggaaggagaccttgacgtcaaccttagaaagcattcatatctccagacaatcaccagc

SEQ ID NO: 9285 - DNA, 6000 bp, Homo sapiens
ctaacttctagagattacctttgttttattttccagtctttcaattaaaattttaattttggttatcatgtttacaatttccaaatacagtaatttcctgtttgcatagcattctgttcttgtttcatagttataattgtttcttacctctgagaattttatgttatttaaatttttttttctgtttcctgcattatctctatttccttcaaattccctttaattttctgctttttcatttcatgctagaggctttcttttaatgtctggtaacttagagtagtccattcatatttaaaaatgaagtgctaacaagtgagttggaagcactatgtgtatgtgggcagggatggtcaactggtgagcctcactctgagagacttggccacttcactggggtcctctaaatgtcagaaattatagatcctttctctcgggctggtcagcttcctcaggaaagaactatctatctttttctgtgagcagtagggtgatataagcctcgaagccccaagagggaagatggagcaggaggtaaatcttctcattaagccatgtagattttcacttacttccctgttttcagtaagatgccgcattcccacactcagacttagtggcccccatgctagagactcttacttaaccttgccagagagtaaaactcctgttttctgcaggggagggcagggcaggcctcccagctttgagggctgagggagatttgaaggctgaagacttcatatggtctttaaacatgttttcagttcaacccagaattaaagagctacctggtaccccaatgtctgagctattctggagttctaaggcacaaatattcttgctggcttccctacttcagcaacgtgaaaatcacagaaacaaaggcagttacctctcacctatcacaatccactttccaaaatgtggttgatatctcttttctgctatactattgtttctgtggtttgtatcttcagttttttttttttttcctgtagggtcattttaacaagatttttggaggaaatggatggagataaacatgtgtgttcatgctaccatctttaattagagatgtatcaatagcgatctttaaaaagctttcaatttctatatggctattcatgaattttaagagaacaaatatttaagatttgggtaggtttaagaaatgatatgactcctcaaaacagcattaattatatcctcatttaagaaatatattaaacttacttttgaggccaataggttaaacctaaagagtttagccaagattcaggaataaaggcccacacgaggtaaagtactgtagaaaagaaaaagaaaaaaaagaggaagagaagtcagtaagacatacatctaatctatcaatctattaagattcagataaaacagaaaagctcttttgaagtgtccctgattaactcagaaatgattttttcctcctttcagttcttctagctcgtttgcacaattcttataatacttataattactgtattagtctttttttttaatatcttaactcacattatattttaagcaattcaaggatacaaatcatggcttagcaattgttgtaatccttattacctagcagtttgctttaggtacagtaagtgttcaatacttcatccccacaaggttgaagtaattatagacatttaattgctcaaagggaaatttacctaccctagttctcatccaccacatactgagcttctgccctatctcccagagtacaatgttatttccctcaatccgaaatctcggcactctttactgttatcccacgataacaacaatggctaagttctgagcactcactgtgggttaagcacagttccaagcattctgtatgcattaagataatcctccaagacaatcctccaaggcaagtatgcaattttaaatgatgaggaaatggaagcttagaaaggatacatcacctacccaaggtaagcggcaaagataaattttaactacctactacatcagtgatgatgcattcttttcttaacaaatatgtattacagaattctgtatgtcaggtgtgtgagacacaatattgaatccaaaagagatggcttctgccctccctaaacttaaaatctagtggtgaatagagaaaattggtattttcactacattgttacaagtgctcacgaatgagtaataaaagatgacatagaagcacattagaaggccctccttccacttcgtatcctccttccctttgcttaatttctccccatagtacgttatcacctgatactatatacgtttttcttatttaacttgcccattgactatctccccccggcatgagaatgaagactcaaagcagggcatttttggctgttttggtccttcctggcctgtaacagtgcctggcacatggtaagcaccaataaatacttgaattactttttggttgtgggtatgatggaatttaattttgttttgagacagtttcgctcgttgcccaggctggagtgcaaaagtgcaatctcagctcacggcaacctccgcctcccgggttcaagcgattctcctgcctcagcctcccgagtagctggagttacaggcatgcgccaccatcccggctaattttgtatttttagtagagacagggtttttccatgttggtctggctggtctcaaactcccgacctcagatgatctgcctgcctcggccacccaaagtgccgggattacaggcgtgagccaccaggccggccagaatttaagccttaaagtgattgcttttatttattcatatagcttctaatccttgacatactctttgaacaaggatttacaaaagtgctaacaataacatcagtagctaacacttattaagtccctaactgttcctaggcattattttacgtgctttacataaattacccccgttaatcctcacaacagtcagaagaggcagcagagtgaagtcagccagtgtatttgggttcaaatttagaaggcttttatttagtagctttgcaatcttgagcaagttactgaaaccacaggatgctcatctttaaaggacagtaataacagaacctaccccatagaactgtttcatgcgtcataagcatttaataaccatcattatcactacccttttacagataaggaacctgaggctcaaaaaatttgctgagggtcccagctcacatggctaatctgtggaggagtcagaattcgaactcagttgtaacttcttcacttcacttcagttttaatagcctggccattacattcatctgcaagctgtgctgatggtgcaggctgatatattttagttagggttcagaagtactaccactcctccactttcctggtttccaaacagttgcagaacgttggatcacgggcactcaattttctcccttttgtgtgcctcaaaattctcaaatcattttggggagagacttgggacttgctgtgtgagtgggcatattagtgtcttagtgagcatcagtctccttatctgtaaaatggaatgttatggggttaaattaagggagatccaggacgcaaacgacacacctttcaacccgacttctctggcctacttctcctgttccccagatcccgcagggcacactggtgacatcacaagctcctcgggtccaaaccctctcacgccctcattcaaggcctttccacttcttccctccctcttactctttcctaatcagcatcagtgccagggggaaaggcctctgtagaaagccttgactttccagtctggtttcaatgtctctccaccgtgctccctgacactcatcacactgagcattaactgtagatttacccatctgtctcctccacaagaccacgacctccttaagggcagggaccaggctttatccactttgccatcgcgtctggtgctgtataaatatttgtagagactaaaacctcctaggctagtgctggcacacggaacactcagcaaacacgagatcccttcagattttcttaaaaagagacatagggagaaagaatcaacagttcatgtgtgcacagtctaaccaatgtattcttcccttgtcactgaacgccagaaaaagcccctggccatccatcaggaaagtacttactgaagccaaattgggagcttaagaaaagaacaaagccataaatcgctctttctggcaatggcgacggtgaattttccaccatttttcctggggctttagacaatctgtggaaaaggaacacaatcagcgccagcgatgtgctccgtggcaccattgatccattctcgcctcctcgctccgccgcgggtacggcccccgccgcgcagaaccgcctcccgcgcctccgtccgcaacccgcgcccccgcctcgagcgcatacagacacccaggctggcgcgcgccccgcaacagaaggggtggcggaggatagggcagggaggggggttctggggcgatagacgcgcgctccagctctgcaagcgtggcctccctgtgggaggggagggcagggaacaaggctcgcgcggcgcccaccagcatgcgggcctactaggtcgcggcgcccaggccccgggccctgcccattcgtggagacttctatttctcattcgaggcggggtatgggggggccctcgacctcgggtccttcatacgcccacccaggcccctcccgacacctcggccacctcagcgctgagttctccgcgcaagcgccgactggggagccgcagtggggaagaggaaaacctgagggaaaggcctaggcgcgacggcaacccccaccctggcgcaggcgcacaacgaccctccccgggtgggagccagcgagcgcgggggcgggcgtgatcccgcggctcgcgacggcgaaggagggggcggtggggtgcgactgcgcacgcgcgctgccagcccacgtgacgcacctcgcttcaacgccgccacccgctccctcccgccgtcggctgacgtggagggccggaggtggcggcggcggcggcggcggctgctgctgctgctgcccgcgtccgaggctcgcgggcggcgggcccgggtgagtgcacacccggcgcgctgccgggctcccggatgtgtcaccttgtcccgctgcagccgagatgccgggggagcggggccttccacaccccctccgtgggtgtgtggtgagtgtgggtgtgtgcgcgtctcctcgcgtccctcgctgaggtgcctactgtgtctgcatgggttgggtcccgcgcgatgagggggtgtggccgccattgcctaccccagtgggtttgcccccttggtctggtgccccttcgcgagcgaggccctgggatgccggtgcgagggtgtgagtagtccctttgtgcgcaaccccccgctgcccgtgcctcggccggtgcgtggctgacacctccgctgggtggaggcgctcgcgtgtcgcctcgtcgccccttttgtgtcggtgtccgcgctccctggcggctgcgtgggcgctctcggccttgcaggtggcccccctttgtgttactgcccctgtctgtgggctgcgcgtcccctagcgcgcgtggccgcgccttctgcaattgcgacccccgcctagagccttgctcgcgcaagtgtgcgtccttgcgtgtctccgagtgacgcagagtgtctgcgcatgggtcctgttgagtgcgtgatctcttgtgtgcggatttaattctgtcgagtgggtatctcttgtgtgcaggtttcgttggtgagcgtgaacgttcgtgcacaccccttgctgtgtgtgcgtgtcacgactctgttgccacctgttttcgtgtgaactggcagtccagtccagggcctgtccccacggaacggacccaggaggggggtaacctcgccgctcccctcgcccccgcgcctctttctgagcattctctcccacagacgctaatgggaaggggggtggacaggatcgagtctggccagctgctccgcagtgttgacgctgccagtgtggcctcttcagccagcctgt

SEQ ID NO: 9286 - DNA, 6000 bp, Homo sapiens
gaaaccctgtctctattaaaaatacaaaaattagctgggcgtggtggcgcatgcctgtaatcccagctactcaggaggctgaggcaggagaattgcttgaacccaggaggcagaggatgcagtgagccgagattgtgccattgcactccagcctgggcaacaagagcaagactccgtctcacaaaaaaaaaaaaaaaaaaaaaaaaaaaaaaaaaaaaaaagacttaaagactttcaaatccctagacttccttaagctaaaatatattactttctaactaaaacatttcagtagaggacaattcctgttgagatttactttagtgatttaaagatcaaatgcaaaaaataatccaaattacaacaaataggtacaaacaggaattctagaagaaaaggaataaagagggccaggcacggtggctcatgtgtgtaatcccagcacttcagcccgaggcaggtggatcacttgaggtcagaggttcgagaccagcctgcccaaaatggtgaaaccctgtctccactaaacatacaaaaataagtcaggcgtgctagcgcgtgcctgtaatcccagttatttgggaggctgaggcaggagaatcacttgaactcaggaggcggaggctgcagtgagcccagatcacaccactgcactccagcctggatgcagggcaagactctgtctcaaaaagaaaaaaaaggaaatgattaaaagagaccataaataattagtagaatacatttttctcagattaaggccgagtctataaactgacagggcttgccaaaccccatattggaacggtgacaaaaggctcacaatgcaccacagcctggtacaatttctcaatctttttttttttcagacagggtctcactctgttgcccagaatgaacacggctcactacagcctcagcctcctggactcatgcaatcctcccaccttagcctcccaagtagatgggagcacagttgtgtgccatcacaccaggctaatttttactttttttttttttttgtagagacgaggtcttgccatattgccctggctggtaaaatttctgaatcttcaagtgaaaatctgatatgctaacatgtttcccatgccctccccaaatttcctaatagcaatactgtcatcatcacattgacaccggacttctactaagttataataggactagtggaagtatacaaactatgttattggtctaaagtaatatagaaattagatataagtatttagaggccaggcgaggtggctcatgcctgtaatcccagcactttgggaggccgaggagggaggattgtttgaactcaggagttcaagaccagcctgggaaacatggagagaacctgtctctaaaaaattagagcttgtattttaagtgacttcattgttttgttttttaaatttcatttcttttgtaattcattttcactgtattcaaaagtgtccacaggagtgggtgtgagaatggccctttaccactcagagtttgagcagcactagctagaaaactgtagagtcgcacaatagttctcaaaatagggttgggggtgggggaagaagtgagtttttttctctccaaggagacatctggcaatgtctttagacatttttggttgttctcaccaagctgagtgctactggcttataatgagtacaaagccaggaatgctgccaaacactataacgacaataacagccctcccacccctaagaattatctggtcaaaatgtcaataatgccaaggttgacaaactctggaatggcatgtaaaaattatcaaaagaaatctacaatgagccaggtgcagcggatcatgcctgtaatcccagcactttggaagaacaaggcaggaggatcacttaagcccaggaattcaagaccagcctgggcaacacagtatgaccccatctctacagaaaaaaaaaaaatagccaagtgcggtggtgggtgcctgtagtcccaggtacttgggaggctgaggctggaggatcacttgagcttgggaggtagaagctgcagtgagctgtgattgcaccactgcattccagcctgtgttacagagtgaaaccctgtctcaaaaaaaaaaaaaaagaaagaaagaaatcctacaatcaggccgggcgtgatggctcacgcctgtaatcccagcactttgttgtaatcccagcactttgggaggccaaggtgggtggatcacctgaggtagggattcaagatcagcctgaccaacatggagaaaccccgtctctaccaaaaatacaaaattagccgggagtggtggcacatgcctgtaatcccagctactcaggaggctgaggcaggagattccttgaacccaggaggcggaggttgcggtgagccgagatcgcgccactgcactcctccaccctgggcaacaagagtgaaactctgtctcaaaaaaaaaaaaaaaaaaaaaaaaaaagaaatcctactatcaatgcaatcaacaaaatatgcttcacctgacagaatgaaagcaaactgtttgaagaaattaaagaattcataacatatcacttttataccccatcagggaaaaatacttgagaaaaggctacaagcaaacaacaaatgacctcacaaggtcatgtgccacttattatcattcctatgtttaaacacacagaaactgaggattagaagtatctggtcaaagtggtcgggcgcggtggctcacgcttgtaatcccagcactttgggaggccgaggcgggcagatcacgaggtcaggagatcgagaccatcctggctaacacggtgaaacccggtctctactgaaaaatacaaaaaattagccaggcgtggtggcgggcacctgtagtcccagctactccggaggctgaggcagaagggcgtaaacctggaaagtggagcttggagtgagcagagatcgtgccactgcaatccagcctgggcgacagagcgagactctgtctcaaaaaaaaagtatctggtcaaagttacacagcaaaatctaacttaacacatatatgcaaaaaaaaaaattgtgcaattcaatgccactttcccttctggcaaactaaggacatgcttaacattcagcaataggttcacccgacatttgcttagccctagatactgtgcaaagtacttccatatatatcctttccttgtacccttacagcaatactctcaaagagttaaagtgttcttatccctgctttacagatgataaaactgtatctaagaaagattaagctgcacgtattctcacagttaatttgctctaagtctgactgcatagatgttactccttctgcaacacgggtaaaatccactttcattgtttcaattatccaccatgtaagtgcctatgattccccaatcgcatttctaattttagtattcatcctgagccccaaatctatccacagcattcaacagttctcatctcccttataagtcctacgaactcatccaaaaaacgaacacataatcccatatcaaaacttgttccttctcctttaatccctttcattttttttcactgattagtgaatgcatattgtccactaaaacgcagaagatagtcattacacaaatagctgtgaaataccacctgacataaattctctattccagtaccatcgggtgccacgagagcatatgatagcgtctgacatgatcagaaagactggggaaggcaacagtaagaaaacactagtctgagcagaggccttgttctgggtgggagcatggttctatttatagtgatgactgaccggccaaaggttagtaggttcgctgcctcttcagtgcatattcctatgaacaatccataaagtcgcctaatgaagtgttagcaccatcgtttttaggtgggatgcaaactttcaatattatgactaattttttccctcttaatggtacacgttctgcctaagtagcctagacgctcccgtgcgcccggggcgggtaggcctggccgaaaatctctcccgcgcgcctgaccttgggttgccccagccaggctgcgggcccgagacccccgggcctccctgccccccgcgccgccccgatttgccctcagagagggtatcgatcttatttctgggtctacggcaaactccaaggtctacaaacgtagaggtcagctgtgaccccgggccaggccgtgaaggtccccaggacacagagctgctctctcctcctagtaaaggtgagaggcagcccaggcctcgtgaaaaaacccagaactggagtcccaaaaggccacgctgatctagctaccctcccagtcaccttgcactcagtcccgagctgccaaagcctccgccgccaccacctccgctctacttccggccctggctccgcccccacacgcctacccgccatcgcaatgcattatgggccgccgtttcagtcggtcgacgctcaccggacaggaagcgtctcggagacagtctgcgaccggacgggtctaggtgagacagaagccaaacaggaggaggaagtggagggtaagtgcttccgggtcccctggcacagcctccgccatcttttcttcgcctaatttgacccgttctttttcccctccttgaaaccttgctctgtacgcatgcgctctttgagtggcctttcccctagttcaagctcccctccgagtcagcgtcctgttcgttagggttatcgaagtgtataaaggtgcagggaaagtgagactgtgtaaaacaaagcggattggggcgttgtgcttccttgtacctcgtgagcctccgttgccttgggcggtcgttttgcgcaccctgccgggagttgtagtcctggacccgaaggtgcctgggaggcgggaggggggttggggcttctcagcgccgattccgcgggaagggccctgggacctcacacttctagtcgcgggagctgcaggtcttacccggagagacgctgcacgtggagccctcgccgctgccgttctcagccggctctggagtgcgggcgggggcgacagggccgattccggagtgggtgagtgcggccgccggggaggaggggagcgcgggccctcgcgggccggcctcgttccggggccttttcccccacaagggcccccccgcggccgcctctgtgttttgtttccgctggtccccggcgctgtgactcccatttccgttcgtggagacttgagggagccgggtggggaggggcgggagagctgtgcggggagcgaaggggaggggcggggggcgagcggcctggagcccggggggaccgggcaccgccgggacccgtgccggacgggtcgcctgtcgccgctccctcctttccgcgtcccctcctcgcccgtccgcactcctcagcagtctcagcctgctcagctgggatgtggtcctgacgcccccgagattttaagagcaaaatgcagaccctgtctcatcgcgggactcagcgattcactcatttcaaatccgctctctttatagaacaacacacaccagaatcatttatcagcgtatatggtagccatctgggtttgtttttttgtttttaagcaaggaagtaaaccaaggagataacaatgggttgtctacttggaaatttttttgtgtactagaagacacgctgtatgtgcgtgtttggatttagggaccccagtttgatcaggttagcggaccgagaggacaatgcctaatattgcattgcaagatgattagaaatttagaaataaaattcatttcataagtagtttccactaatagcagtaggtctgactcgtgagaagagcaaagatttagcaggattcacttgagcgaattgtagaacgaggcggtgataacattcttcggtagtgttatcttgaacttcagaagaaaccgctcaactctttagcaactgcttgagggactagcctgtctctcagggttccatccaggctttccaagcttctttatttttagacatacagtgacgctgagtggacttcaagtcaattttacctgaattg

SEQ ID NO: 9287 - DNA, 6000 bp, Homo sapiens
ggctgtaatcccagctattcaggaggctgaggcgggagaatcactggaatccaggaggcggaggttgcagtgggctcagatcgcaccattgcactccagcctgggtgacatagtgagactctgtccccaccaaaaaacaaaacacacacacaaaaaaaaacaacagtaaactctcaattccatctgctcaacatgctccttctcccatcttttccttctcagaaagtagcccctttacctgttggattattctagactcttccttctcttctcctgccatgctcaaccccagtcctgtttgcctcttcttcctaaacacctgttgactcaattgctctccatcgccacaccgcagtgtgggctgcctgttgcctgcatgtttgcaggagcttcccaatgattctcccacacttgcccctttccagtgcctttacacacagtgctccaagaatccttttaaaacaatgcatacaactgccatgtttaaaattgtttccataaagcttaaaataaggccaggtgcagtggctcacgcctgtaaccccagcacttcgggaggccgaggcgggtggatcacctgacatcaggagttcgtgaccagcatggccaacatggcgaaaccccgtcactactaaaaatacaaaaattagccaggtgtggtggcacatgcctgtgatcccagctactcgggaggctgaggcaggagaatagtttgaacctgggaggtggaagttacagtgagctgggattgtgccaccgcactccagcctgggtgacagagtgagactctgtctcaaaaaaaaaaaaaaaaaagaaaacttaaaatagaaccaaacaaccccttttccagcttacaagactctacccacttgtcactgcaccctccaaccccaagacggacccatcctgccacagagcctctgcatatgcgtgcctctctgcaaaaatatactgcaccttgcacacccacccacaaaataagaccgcctactcaatcctgggaaggcctgtccctttttctgaaataactgccttcacacattttgaaaatattaaggaaaagatggtaatgagagctggtagtttgttccttttgccaagtaaagactaagaagttgatatatccaaaatggtccatattattattattattattattttttccagaaaattcagttctgaaacccagcatctctaaaccaccgcaatactccaatggtgcacagtctgttcactctactaagtgtctaaacatgggggaaagaaacataaataagacaaggtccctactctcatagttcatagcctaataaaagtggaagtacctaaatacataatttcagtttaatgtgggacacgtaagtgtcagagggtggacaaagtggccttgctccttttaacacacataagtgacagagggtggacaaaatgacagagtctgatgataccaagaggaaactcagccaccggcagaggagtcctcaaagtccagaggtgtgggcagctagagttaccaggaagagaactgtgataaggtgtgtattgacgataaggtgtgtatttagaaggtggggtggcaagggacgccactgctcatggcaagaagggcatcagccaggtaagagcagtagctggagcagttcagtgttatggttggccatatgaagaaagtgctatttggtgtaactaccagcacacgagagaagtttggaaatcgtcattcatgcaagctcctttatttcgaaatatggggcacgtggtatgctaccaagcaagtcttctgggtgagcttggtaaattcaccatttatgcatgcatttgtttttcttctttttttttgagatggagtttcgctcttgttgaccgggctggagtgcaatggcgcgatctcaactcaccacaacctccgcctcctgagttcaagcgattctcctgcctcagcctcctgagtacctgggattacaggcaggtgccaccacgcccggctaattttgtatttttagtagagatggggtttctccatgttggtcagcctggtctcgaacacccaacctcaagtgatccacccaccttggcctcccaaagtactgggattacaggcataagccactgcgcccagtctcttttttgttttgttttgttttggtttttgatttttgagacagagtctcgctcttgtcacccaggctggggtaaaatggtgtgatcttggctcactgcaacctctgcctcccgggttccagcgattctcctgcctcagcctcccgagtagctgggattacaggtgcccgccacaatgcctggctaattttttaaaatatttttggtagagacagagtttcaccatgttggccaggctggtctcaaactcctgacgtaaggtgatccgcccacctcggcctcccaaagtgttgggattacaggcatgagccactgcacctggccttatgcatgcatttcttttttcttttcttttttttttttttttgagacaagagtctcgctctgtcgccatgctggagtgcagtggcgccatttcggctcactgcaacctgcgcctcctagattgaagtgattctcctgcctcagactcccgagtagctgggactacaggcgcatgccaccacgcccaactaatttttgtatttttagtagagacacagtttcatcatgttggccaggatggtcttgatctcctgaccttgtgatccaccccctcgacttcccaaagtgctgggattacaggtgtgagccaccacgcccggctgcatgcatttctttactgcaatacacgagtcctgtgagatgggtattaggcccaagatgaggatattagaagtcaggccattcggaaaattgcccaggtcacacacccagcagctagcagaaccagattcgagctcaggtcagtgagatagtacaggtctccactacattatgctactgataaaattattggttcagttctcaaatagctcttttgccaatgatcttgcaatctatcctggatatgtctcctgtgagagattgaagagttcagtaaaaccgacagttatacaggctataaataactagacacagaaagaagtaatcacacaagaagtgtatctgctcagataccttaaaatcgaaaatgtcagcaagaaatctctctctttacccatttttaatttcatagaaaatcaaattcagggttgggcactgtggctcatacctgtaatcccagcactttaagaggccgaggtggaaggattgcttgagcccaggagtttgagaccagactgggcaacataatgagaccttcgtctcaaaataataataataataataatttagaaaaagaaaaaaacaagttcaagagaaaaaccaactgccagatcccaaaaaagttcactgtaaatatgtctatatgaaggaacatttctcagttcgatgaaaatgaggacagtgaccctaccacataagcaaaaacatttagcaacagataacagatatgtactattagtaataaaattgataatgatccttagtccacagcacagaaacactcatcaccaatgggcttaatcaactctgggacacactgttttgaatgtggtctttcaaagtggcaattaaattgtactggaaaaaatttaagccacctaatggcagcagacttgtggggccggggggacggtcttccctcgccttaccaaaaaaatcctagcaaagtcttcccaattgtggggctgcagtcgcgagtgtaaggcaacactgcgggtaacagtccccgcgagcagccgggaaccctgcagggcgcaggggccaggctggcagagcgcgcactgcggcccggatcccttctcctggggactggctggaagactggggtcttccccaacgaggaaagcccttagttctcacaggtctgcgtccccagcctcctccccagccagggcaccagcaaacaaaggctgagcgtctcttcgtgggccggccccgggagggcgcgcgggccgcgacccacccctggacctgcacctgccgccccgctcggcgagggcgtggccggcatcatatcctccgcgccagggtcgggtaaccctaggggaccccacccagtctccccgctgccctcccggtctccggccccgagctctccgcccccgcactgcagcagagcgcgccgcaggcccgggccgcgcgccggtaagccacctgcaccccgggccgccccacggcgccgcccaagccctctggacccggagaaggacccgcgggccggcggggaggagatgcccggctcctccggcttcgcccagcggctgaggactggacgccggacagggcgcaggcacgacttaccgcggcagtggccctgttggcgggcgcgctcacgtgcggcgcggaggagccctccgggctgggggagagagactgggcagggctgcggcgcggccgggagccagaaccgccgaggaagagccggagaaccagcggcagcggctcttccccaccgcgcgggtcggggcggagcctggaagccgggcctcggcgcttggggcggggctggaaggcggggctggacgcctggaggcgggctcaggggcgggacctggaggtgggccataggcgcgcgggggcggggtttccgcgggcggggcggaactagaagacggggcctgaccgaaggaggcgggatcaagggcggggcctggaagtgggctgtccctacaggggcggggcctcggctggccgggctaggctggaaggcggggcctgactcatgaaggtgggatcaagggcggtgcctggaggcgggccataacaacaggggcggggcctcgacgggctgggctggactgaaaggccaggcttgactcacggagtcggggtcaggggcggggcctggaggtgggccttagacgcgggggcggggcttcggcttgggagcagggcttggggagggccccggcgtactggggcggttcagtcgcctcagccgcggtgtgagggagcgggagtcttccttagcttctccgccatgggtgtcgcttcgtagccgggctgctccgggaaaggcctcgtacaggtgagcggggcggcgttcgcgcctcacctggggacccccgacacaaccgagtggaaggggacattggtcagtgcccgcccaaggtcgtccgcgcgtgtgtcggccctcggaggtgctttggagtcactcacagaaacggagaagcgggggctcctcgaagggtgcgcggcacctggttcaccccatcttttccctctggaccacgtccaagccctccacacacgtttggggcgcagggggcgcggcgggcttgggacccctgctaagttgccccagcccgcacgggcctcaggtttccgaccctgggcgacaggagaggtgagatcatttctacctggacagagcttatcacgtggactgtggctcaggaaggagaccttgacgtcaaccttagaaagcattcatatctccagacaatcaccagcccctgcctgccatcctctcgagcgctgggacctagacggtccagtccgaccgcttcagggtaggacgcacctggagggtgcgcggtaggcagtgctcacctgagcacaggccctgtccccacccagctgtggctccagccaacccgaagtgggccacttgtggatgaaggctgtcatttctgcagtggcctcgctccttttaactcccgagcgtcctttagaaatgttcagaccaggtctggagttcgtgaaggcgaggcagtggtcaatgagcttgggaggtgggggaggtcatgagcacctggaagttgtttagaacactttgtgtatatgcatgtttctaggggaggggtatattatcagcttccaaagtggatctatcacttccctggaaacactaagaatattttaatagcttgggatgctggacctgtggcccagccaggctgctgattctgattttgtctccatttggcatataccaagtgccccagatgtaaa

SEQ ID NO: 9288 - DNA, 6000 bp, Homo sapiens
caaaaagctttcttcatttgggagcaactgaggagaaattttaggtaatttaatataatttgctgatttttccaagtaattaaacacaaattttaactctccaaactttttaatccaaagttgagcaagctttgggtcataaattaccacctctctagccatcagaaaattgcccaacagtcaagataacatctggtaaaaagtcttttaaaaggcaaaaccaccatatatacataaggtgctattacactggtcacacaattcactttcacagagcaaactgttagtatcaagtttcaggaaacattactaatagtttcacgtaatatctttacttctaaatcgaaaatagacgaacatatatggaggtaaaatcaccaaaacactcaacagaaagtaaagattcttggttcagtttaaataactgcttatgattactacaaaataagactaacacaactttggggatgaggaactaaattcttgataaagactttctggaagtttttgggttttgctgggtttagataagttttttcttggggaggggtgaaactgcttcctgtgtgtgtacaggaaacgtgaaagccttctcaaatatgaggaaagctaatgccaaagcaaagacaaactggcacacgcctaatcacaaataccaagaaagtcacaagtgaagcccactcttctactaatcttgtgttcagtggcacaagattataaggcaattcccttctcgcctataatacagttaattctatccacattttcttctcataactagatacttgtcaaccataaacagacacacgaaaacacctcagggcagcctaaatttccaagctatttcttaaaaaaaaaaaaaaggttttcaagtgaaaacaaagattcaatccaaattaacacttcgtgtagttacaaaacaaaatgcatgccaaaggtcactgtataccatgtttataacaaggtatcttgaattttccttttgcagatagtcatagccctctaaaaacctaatgtaaattacctaaatacattgttgcagttacctaggcctctccacccccatatctttaagtcataaacagtaactctccataagtaacacgaaggagcaaacatcagacaatattttggaggggaaaaaaaatttaacaaatggtcgtttttactgtccacattccctaacaagacattacactaatatggaatgttttaaattatcttaaatgttactgcctctaaaaaactggacttatttttagatatcttgcacacaataatgtgttaagtttctaataggttccaccaaaatattgttaaaaggtttaagagatgatcttatacttagatctcaaaacaaagatctcactaggtcatttagtccatttcccacccctaccaataattaccattcattcaggtctattccttcaaatattttttcaacacccaccaggtaaaaaggagtgtgccttcatggcgcaaacacaaggggtgacccttcctcctgcaataatctctgagcttatgcctctcgaggtaaaaatgaactttttacaagagaactttttactagtcttaacaagagaactaggtgtagacattgacagaaatccttaactttctggcatggtttgaagtataaataaatttggacagctaccataaacaccactgctataccagggaaaatcctccaaagtactgggatacctgaagtatgcgtaaaaaatcttgactataatcaagtaagcttttttcataaccagtttctttgaaatgatcttctgcagcttaaaaccttaacacatgaaactttagttctggtctcacatttttaaaagtctacttgaaaacaatattatcctaaagtaactgatcaagacatgagaaattaaacaacacaaaagctaaaggtaattcccctgagttattaaaacacctcaaaatcaaaatgctaaatatattcattaatactttggacacataaactataaaagggtcacagaggaacccttaagcattcaaagaataactaaaaataactttacacaaaactttcttatgactcatcaatactcaaaaaatgactataatcaaaattgtttgaagtacaaaacacatcaaggaatatctttaattcctttcattcaaaaattgactacatagttttcttggggggggaaaggcctgaaaagtttattaacaggcctcatcaccattaccttaccttttggcctcggcaagccacaaaggtaattccacgctaaaaaccttacggggacacatctctaggttagaaccctgagtcattaaacacgaatcactccaaaatttgccagtatttctaataatgagttacaccctaatgattcacaactccagactggctacagccttctggctcctggagtcccagctgtatgaccttagaccagtcagtgcccctctccagactcactctcctcatctataaaatgggaacagttcctaccggctgggcaagctggtcgatccactgaaaaccctaaaaacagagcctggcacttgtgaaaacaacgttctaaggcgtattttctgacaatttgggcggaattcaagaaccaaatggtgctagcattcctgcgctgtgcccagattatgggattcgtgtcacctagggttgggcgaaaggcacaggcaagtaaccagagtcactgactcactaattttaccatttttaactatttcagattagggaggagcctttcgccaagtactgagctactcagcagctttggtggctccgaagcgagagtgggtttgtgcctataaatagactggtgaagttttgtggcgatacacaggtatctattctaattcacctctcctcagccaccaactcccccggctgccgggcaggtcatccctccaccccgagccgccggggacactcgcgctccccgcccaacttcggaggccagtgagtgcccctcgctccagcgcggacccccagggccgccgaggcagcggctcccgaccttcgccggcgcccggcccggcccggccccgccgtcctcgcccacccggcagccggccccattttcttaacccgtgcattgtccttgcgaatcaccccggcggttcccacactggtggggaccgagaggagggacgagggaggagctgggggaagaggatgaggaggaagaggaggaggaggaggaggaagacaacctccaccccttcgctcgggcggccagtgaaggtctggcgctgtctacggccccccaggccccggctcccgggaggccgcggcccccgctcccaccctccgcaactttccctccgctcgcgcccgccgctcctccgggacccggcctgaggctccctcccccggcggccggccctgggcccgcggcgcctcctcctaaaatggcaggtccctccctccgcccggccggcctcggctccggcccggctgcgggccgccgggggagccgagcgccaggccgggcggggccgcggccgggccggacactcaccgggacgatggcggggcgctcgcgccgcttcctccggtgagtctcagcctcgggctcccgcgccgcgctcccgccgcggcctccgcagccagcgccgccccggcagcctctctccgcccccggcgctccggctcctggccgcgccgcagcctgctcagtctctcctcggctcgcggttccagcggcgcccggggccggggaggcgacagccccctccccggcaaataccgcagtccccgggccccgattccaggcggcggggccgcacggccggcccggcgcagagggcggcgtcggcgaggccgggcgccgagcggcggctgctgccggcggcttcttcccgaggaggattttgtaaatctcacaaaatggcgcgcgctccgaacctgcgcagcgagaagcgccggggcccgggcggcggcggcggctcctccgccaggagagcccgaaccgcccgcccccgagtccccgcacagacagacagacactcgcacacacccgcacactcgcgcgcacaatcgccctcgcacacgctccctcgcacacacactcgcactcacaccggtcccgcctgctcgccggcggcggcagcggcaccaacagcagcagcaggaacagcagcagcagaagcggcggcggcggcgcccgcaccccccgctcggggtgtccgctctctgaggccgacctgggccgcgatcagcagcagcgacagcagcagtctccccggatacccccgccgcggttgccgccgccacccccgcctcactccaatggggctttttattattattcgggcgggaagcgaaagggtttaaaaaaaaaccaaccaacaaaatggcgacggaccgacccggtcgctatagcaactgtcaatcaaaacgcaaaaccccggctgacgtgctgacgtcctcctcccgccccccagccccgagccggcgggcggggcctgttgctcaggtaacggcagattccgttccctcctttccgtctccccctctgtccccagccaaccacccaaccccctcaggtcacgtgaaggataaattcggagctcgggtccgctacgagtgtcagaggagggcgcgtgattcgcccgggggaggggagaggagggggacggctaggccgagggagggtaggggctggggaagggggggcgaggcggcggccaggcctgtgcgcgatcgcccgccgcctcccggccgccccgccccgccccgcgcccgcgccgactgcggcccggggagcgcgcgcggcctcccgcgccgccgcccccgcagccctagcgccccgcgcttccgcgtcggcgcccgcagccccgcccgcgccggggggaggggcgggctgccccgggcgggggagggggaggaggaggggcgccgcggccttcgggcggggacccgggaagcccaccccgcgcgcccgggcctggagggctctcaccgcggtccgggcgccgcgctcgcctctctccccgggaagcgcggcggccgcgaccgtccgcgcgtggagccggttcttcgaagggctggcgggcctcctagccggaaaatgccggcggaggccgtggtgggggcggggaggagccaccgccgcgccccagacatcgcaggaattccggacgctgcgccgggcccggcggccctgaggctggcacctggctccggtcgggccgcccaggttttgtggcgcccgagaccagcgttgggaaattaggctggagccatcatgaaaactttttcaggcagtgcacgctcgcctgtgcctgcccatctgcttccaacctctccccacctttcggggcgcagcctgcctgctccatcggaatgccctttagatgaatccccttgtgctgttactgtgtccttgtcgtccagctctctggttttcttttctatacaccttctcggtttccagagtcttaattcgcctgcttgtccttaaccatcaaaactctttattaatatcctggctttcgctgatttttattctccctaccccttctccctagctatgtattgctgggtgagctcccgaggcttgaaaacccaagtatgctgtgctggctgcgttgtaatcggtagagagccaccagctaaaaattgtattttgtaccaactctaatggcatttaataaatgtatacctaaaaagagtgtgtgtgtatatatatactattttacagcagagtcactaattgatttctaagcttgattttgccaccttgtgatagtgttcgtaaccaatttttttcataaatttcacaaatgtgacaacagataaaatcttataaacaatattagatgtaaaaaactcgcagtaaatgccgctgtctatgctacatgactcaaatacacctgctttaaatgatttccagcaaaaatgtccttgctacagttactaggacattgatatactaaggtaaccattcagattagcacagactttgaaagaaatccgactaaaccgaaaataaa

SEQ ID NO: 9289 - DNA, 6000 bp, Homo sapiens; identical to SEQ ID NO: 1008

SEQ ID NO: 9290 - DNA, 6000 bp, Homo sapiens
tgggtgagtgattgatgggtggattggtaggtgaatggatgagtggatagttgggtgggtgagtggatggctggatagatgaatgcgtggactggtgggtacatgtgtgggtgggtagttggatgggtgaatagttggataagtaggtaaattctaaccatgagaagcacagattggtatctggcaactctgtgtagagattagattccaattcctgctctgatcctgactcgggtgtgatcttgggccctttccttaatgtcttgaagccttttcccttcatctgccctgcccatctcacaaactgctgggaagaaccctggaaggacatatgtgcacgaagatgctttagaaaccctagcaagcttctcaggtgtgaccttagcattggagggaacttgaaggtcattgggctgactctcccgatggttggatcacagttcatggtaagagcctaagcttagagtccagacagacctgggtttgtgtcctggctccaccacttgtccgagtgtgactgtcctgcctgtgtactcctctgtgatgtggaggtgatgatggtggcagcttcccctcagggctatgtgaggattcagtgggatcatcgtggaaagccctgggcacatcacccagcaggggtgccacgacgaaacccaaggtctgccctccggggtcccaaaaaagaggcccagtcttgcctttccagagcagggtaccctagaggccatgggattgaaggagagctctaggatgtccagctcacgggttcacaaaaccctgaaaagtgtctgtataaatgctcattgcagggaaagatctgtggctttatacagaaagaggccatgacacataaagggttaaccacagtccatctaatccaggactctcacttaggaaactgagacctatgtcctgtccaagggcactctgtgggtcaggggacagcaaagcacagacattcaacccagcatggaggcccctccccacccaggagcaggagcctgccttggaatgccagacctgagataggattactgccacctgggaacagcatacactggtgagaggcaggggcagggagaacaccaccacaggggcagggagaacaccaggatggggaaagggaaccacagggcctactcttttaattaagcagtagaattgtaagaaaattgcaactttcttttaaaacctgtctttcaaggttgttaaaatggggttttaataacaaaactgtgggagaaagaggtggctgatgtcaaaaacatctcaacccactcccctgggggacctgcagttctctagttcgtgagtttctgctaacaaaaagcacactaaaagaggggccaaaacaaatggaaatcaagcttatcaaacacagatgacatggagttgaccaaagcatctagagctgagattccaggaagcagatctctctcctttctctgggaccatcctaggagaggttccagggccccctggcacagaggtgccaccagcgacctcaaacttcaggcgcaggtgggggcaacaggcgtagttgaggctacagggacacaggtgtcagcacagcatacgagagggccaccttgtttgttttctgacttcctcttaaaatacagtttatcgcccttgatctttagtttcaaatagtaactattcacagtaaacaatgtgacacagtaaacaacgtgtacagaaaaacaaacaggagaaaacaatttgccccttgtacttcacccagaagagccactgctaatattttgatgtatttccttctattttagttgcaaactgtaacaaccattaaataaataaatacgatgaatttgtaaagtttacagagtaataataggagtgatgattgcacaacatcgtgaatgtactaaatgccactcaattgtacactttaaaatggtgaattccacatgatgtgagtttcacatctattagcctcctgggctaggaatactgcctagacctcaggaaccacggaattcatcatctctttccttttccttaaagtttgacctcctgtgtgtgcccttcaacaaacggtttttcagcttgtcctgcttttgaacttcatacggattgaagaagaccatgtgtatttttcatggtttgcttctttctcaacactgtctctttgatattgatgttgatgaattactcatttcactgctgactagaagcccactgtgtggaggtcccatcactcagctgtccactctgctgccactgacacatgggcagttttgcccaggagcagggcatcagaaacacccaattggagtccagtgtgacagtttgtccagggcctgtcattgtacaacacatcatttcactttgtttttcaaacatagtgaattctttcctaattaaagaagaaaagagtataaagagaaagtttccagtgcagcctggagatctgtactggttgtatctggaattccagactcagccttgcatttcacatagcagatagatgatgatgatggagaaggagaagaagaaggaggaggaggaggaaagaaggaagaagaagaagaagaggaggaggaagaagaagacgaagggaagaagaagaaggatgaggaggaggaggaatagacagactgacaaagattctctactgttgtcacttaacaacatatccatgcaggtgtggataaacctgggtgcgcatcacactgggaacaagcagctccaacaacactgaggcagcctcttcccaagtcagctggacaattaggctgctttgctcaggtcgttcactgttctgagcaggacacagccaaagcccctcgcccccacctctgtgcaaggatccagtgactgacttggggttgaccctctctgcaaagatcaaaggtcatgcctgtctaaggccttggacgcatgtcccagactgacttccagaaaagagagcctgaactgccctgctgagtgcccaaagaggcccccctgcatccacgaaaggtacccatgagggtgtggaaggagaggcatccacaggaactgggctcccacctgccccacctgaccccagctctacactgagaataggggagatagaggggcccccagggcctcctccaaactccccagagcatccactgtgaggtgacctgaaccaggccccaagctccctcctcagggaggcctcagactcctccacctccgcagcctccaccgtggctgctctgtgtctctctctggcagcaccaaccacccccactgctactgacaccaccattggagaaggctcagggctatgagttcagcctctggctgctctggagatctagggaggcaggagggctgcaagtgggggctgggagagctattccaggtcaggggtctgtgggctggagtctgtgaggtgtgcacatgtggggctgagggatggctggagaggccctgttggtggccactgtctccaccttcagagcccaggaaggagatttggcccctcctgcatcagataatccctagctccttagttcccaagtcttcagtccccagcctggctctcctggggtggctgcccttgctgtgggaggctggggggatcttcagcccagcacctccagcagcagggcctggtgcccccagctctgcactggcccaggtctcagatcctgggctgtcagcccctcatgggtcccaggtgcccagcccagctgccccaggaggcaggggggtctgggggacaccaaaagagtcttagagaatggacctcaccactcagccacacagaaaaactgaggcccagaggggacaaaggacttgtcatgggtccagctgtgagcctggctgccagtcttaaggcccagtgctcccccacaggatgctgtcacacacacttggccctgatgaggtcccctcttagctgggatccagccccatgaccagcaccccgaggctgcaaagggtgctgggctccagcaccccaagactccacattgaccccaagactccacattgaccactctgagcagaggagcccttgggtctttggggaggttagagagctggcacccccaccccagtctacccggccccggggttcctctctggatagggggccccagtgcagttcacacaggccctgcacgtgttccttcctcagggcatgcgtggctgaagcttgctcaacactaaacatcccagcccagtttattgaatgtgagggatacgcagggtctgagcagagcagccatcccctcctgcctcccctccttccagcgctagagccagagtgactccactgtcctgtgcccacccccagaccaaggagcctcaggaccactcttggggcagggagctcgaggctataggaagattgccccagagcaggatggctgagtgttcaggagtccagccatgtggtaaccgtgcactgcagtgtcacctgaacagggatgtcaccacgtgaaggcatcccagctgcatccttggctgacatatcctaactgtgcctgtacaaggggctccacacacacacacatccacacacacacacacacacacagtcacacttacatacccattcatgctcacacatttatccacacacattcatactcattcacacacacacacgcattcacacactcacacccactcacatgcactggccagagccagagtcgatagcgccctctagtggccactgttgtcccttctctagaaggtctctgtcttatcagtcacaacccccaggagtcttcatccggaaatcccaggatgcacaagtctggcaagatcattatctcctttcacagagagggatgtgacctggccaaggtccctcatcaggaaagtggtacagccctcccctccacccaccaccaatggtccgggtactcagattccgaataactccagctcctgaggccctgtcagagcccagaggctgggccctctcccaagggaggggctggagcagaggatctgggggcccttgtacacccacctgtcacatacacagggtgcacggtcccccgggagggaagaagacaccttgggggagaggaatttccaggccagagagtcccagaaacggctctcctctgtgccaggtgggacggggtataggaggggagggcctgcctgggctttaggaaaacacagaaatgccaagaacattgacacacagcagtaacaaatgctagcctgctgtcaactatcacaggcttttactgagaggaaaatacaactgatcaggttagattcccctccgtttccctcccccttttccctgagagaaacccagtgctgctcactccacatgcagccattcaacagctctggatgtggctttatgcccaggggacccagtggtggcctcgggggccaagccctggaaccaagtgccattgggtgacataggcctggaacaaacaccacgtgatgctgtcatttgtgatgtgatgagttctttacgaaaaagacagggtcaaacgggagactgtgacaactgctggtttagctggatggtcaggaagggacacccctgagtcaatgaggggaccggccagttgtggaggtgcctggggaggagcgctcctggcggcagaaacagcaagtgcgaaggccttggggtgagactctgctgacgaattgcagaaacagcaaggaggccatgtggccagatccaagaagagaggaggggtgagggagggaaggggtagagggagctgggttgcaggcgggggtgggggttccttggggccttacagaccatgctgagcagtttgcatttgttctcagttttcaaatgcacctgaacaacatcatgtggaacctgtcacgctccttctaacttgctacatgtatatctctagtactaggagatgcaactagataaataagacagagctccatggttcaacatacaaatagacgctggtcccggcccatccccagtggatggacatctgggctgtctgggttattcattcacaaacacaggccagtgagcccctgcatgtc

SEQ ID NO: 9291 - DNA, 6000 bp, Homo sapiens
atgatcttatagcgattctataaaaacagaataattaacaaattcagcaaagttgtcaaatacaaaatcaacacacagaaatcagttgcatttctatatagtactagcagtgaacacttcatgaaggaaattagcagtttcatttaaatagcatcaaaaagaataaaatacataggaattaaccaaggaggtgaaagacttgtacacagaaaactacaaaatattgttgaaagaaattaaagaagacataattaaatggaaagacatcctgtgttcaattatatccatttaaagacacaattaaatggaaagacatcctgtgttggaaagtttaatattgttcacatgtcagtactacccaaagtggtcatcagaggcaatgcaatcctattaacatcccaacagtgtttttttagaaatataaaaacctatcacaggccaggttcggttgttcatgcctgtaatcccaatattttgccaagcctaggagttcaagaccagcctgggcaatataacgagaccctagctttaacaacaacaacaacaaaaagccaggtgtggtagcacatgtctgtagtcataggtactttagaggttgaggcaggaggatcacttgagcccaagaatttgaggcagcagtgagctattatcaggctactaaactctagtctgggtgacaggggagaccctgtgtctagtttaaaaaaaaaaaaaaaaaggccgggcacggtggctcacgcctgtaatcccagcactttgggaggccgagatgggtggatcacgaggtcaagagatcaagaccatcctggctaacacggtgaaaccctgtctctactaaaaataaaaaaaattagccaggcgtggtggcgggtgcctgtagtcccagctactcaggaggctgaggcaggagaatggcgtgaacctgggaggcagaggttgcagtgagccgagattgcaccactgcactccagcctaggcgacagagcaagattctgtctcaaaaaaaaaaataaaaaaaataaaaaagaaaggaagataaaacccatcctaaaattcatatggaatctgtaggaactcctaatagccaaaaccatcttgaaaaagaacaaacttagaggcttctcacttcctgatttcaaaatttaaaacaaagccacagtaatcaagactgtgtagtttgaacactgtactttcctgaaaaaagaaagacagacatacagaccaatggaacagactagagagcctggaaataaacccttgcatatatggtcaaatgattttcaacaagggtactaagatagggaaaggatagtcttcaacaaatcatgctgggacatctggatattcaaatgcaaaagaatgaagctggatccctacctaacaccgtatgtaaaaatgaactcaaaatgggtcaaagtcctaaatataaagacctaaacctataaaacttagcagaaaacatagggcaaaacttcatagcactggatttggcaatgatttagatataacaccaccactaccaccaacatatagacaaattagacttggaaattaatgaaattaatttagtgaaattaagttaatgacattttaatgaaaatgaaaaacttctgtgtatcaaaagacactatcaacagagtgaaaaggcagcctatggagaaatacttgcaaatgatatatctgacaagggattaatatccagaatatctagaaaaatcttacaactcaacaataaaaacaaaaatccagtgaaaaatgggcataggacttgaatagccatttctccagtgaagatatacaaatggccaataacaggaaaagatgctcaatctcactagtcattagagaaatgcaaattaaaatcacaatgggacaccacttcataccgttaggatggctattggaaaaaaacaaaagagaaggtaaccaagtgttggtgaggatgtggagaagttggaactcctgtgcactgttggtgggaatgtaaaatggttcacttgctatggaaaagtttggcaatctctcaaaaagtcaaacaaaatattaccgtatcattcagcaatttcactcttatgtactgaaagcagggactcaaacatatacttgtacactaatgttcatagcagcattattcacaatagccaaaaggtgaaaacaacccaagtgtcaatcaacaaatgaataaacaaaatctggtcaatgtgtacaaaggaatattacacagccttaaaaatgaaggaagttctgacacatgctacgatgtggatgaaccttgaaaacatgttgagtgaaataatccagtcacaaaatgataaatactgtatgattccacttatatgaggtacctagagtaattaaattcacagagacagaatatagaatgatggttaccaggggttgcgagtgggaggggaagaggagttaatgttctggagtgaagaaaaagttctagaaataaatagtgatcactggatatacaacagcatgaatgtacttaatgctcctgaactgtatacctaaaaatggctaaaatggtaaatgttactatattttaccacaataaaaaaacagtcatatgtcacttaactgtggggatacactctgagaaatgtgtcactaggcgattttgtcatggagggatcctcatagagtaacttacacaaactaagatggtagagcctactacacacctaggctgtatggtaaggcctgttgctcctgggctacaaacttgcacagtgactctactgaacaatgtaggcaattgtgacacagtggtattagtgcacctaatcatagcaaaggtacagtaaaagtacagtgcaaaaaataaaaaatagaactggttagggcacttgccatgaacagaggtgcaggactggaagttgctgtgggtgtgagtggtgagtgaatgtgaaggcctaagacattattgtacactactttagactttataaacactgtacacttaggctgcaacacacttatattaaacattttcctttttttttgagatggagtctcactctattgcccaggctggagtgcagtagcacaatctcagctcactgcaacctccgcctcctgggttcaagcgattctcctgcctcagcctcccaagtagctgggattacaggcacataccaccacgcccggctaattttttgtatttttggtagagacagggtttcaccatgttgaccaggctggtctcaaactcctgacctcaaatgagctgcccgccttgggctcccaaaatgctgggattacaagcatgagcctccacagcgcctggcctaaaaattttctttcttcaataataaaataactatagcttactggatgaccagttacatatgtggtccctagttgaccaaaacgttgttatgcggtgcatgacagttatacacaggagagggcctgaaagaaaaaaaaaatttggaccaaaaaaggccttttctggctcagttggattcatttcttccacaggcccactgcccactctgctgatgggcgctgagctgtagactgagctgccttgaggctgaggtaagctgaatttgtgggaacccccacctttcccttgagggaggaagtttaaattatcaggtcaattaggaaagatacaaccgaaaaaaatccaaatttcattcccacttcaaggaggcgtttcctggctcggtgccacttttattatttttggcccaggctgctgaaagccccacagacccagggaaggtacaatgtgacctttgattcgcgtttcagggatcaaagtgagtgagtttgggtgtaaatgcagataacatttcagagagctttcatgaaaggagtcactggaccagggcagaaagggagctggtgtgttacgtgtgtgttccccttgagaagcgtcactttccggtgaatccggctgcctgcccgtggccccaaggactcctggcttgcatccaggtccttggcccacaggcatcagatcctgagctggggcgcctgcaccctctcccacctcttctctaggcaccgtgaagccgaggagaggtggcgtgggacggcttgtgcaagtgagaagagcaccaccacttcatcctcacctatcttgtcccaggatctgggtgctgactcggcaggcttgggctgggcacggccctgtggggagggcttggtagcctgccctcgctgtcgtctccgggtccagcctcggcctgagtcgggaagcacacaattatatccacaacaaggaggcccagaggccctgcctgcagcccccaggtatgcaggtagagggtcctctcggactgcctgccccctgcctctggcgcccagcctgcagctacgtcgaaccgggccctaacaaggttccccgcactggcaatgagtgatgagaggcactccgcgggcacgccgttccagggcgctcacgaggcccagcagccccgctatgcccacatccaccccgacacctgcagccccccaggcttagcccggccccgcagcagccctctcgacgcccagcagcaccccagtgtctggctgacgccagggcagtaacggcgggctgaagcagcatcggcccctcggtctacgccacagccgggtgcagatttcccggatctgagggaccgccgggcaccgtccgctggggatcatgaggggcagctttggcccgaccgtctcgcgcctgtacacgcggccccacctgatcccgtggcacttggcgcggcgtgggaatgggcgcgctctcccatcacccaccgcgcggcactgccgcgccagcagggaccgggagagcctgcgaggtagcggccacacggcatacagcgcaggcgcggcctggatgggaggagcgcgtggagcgtgccgggagcatgcgccgggtcgtacacggcggccgcgcgcacgctgggggcgtggctgcgcgatgtaatcggtctctggacgctgcgcggcgctcctaggagcaggcgttcccgactccggcaagagggtcagtgtggaggcgggagcccgggcggccggcttgaactccgtgcacgcgggcctggagctgcgcccctgcgtcttttcccgacttctgatccgcagaggggcactcggagccccagcctgggtcgcagtgccttcggtctgcgggcctcagtttctcggtccgcgccgggggtttgtgggggcacctggagacatttgggccgttctcgcagtctcgggaagccgcgcccgctccttgcctggcctcacggcggccgatctcgttctccactttctaggtggcgcctggactctcgccctcagagggaggcccgtcccacggtctgtggctacggatcccaggaccctcttcgcgggcgattcgcgtagcctcaggtgggtgggcttcttgttgccgtgggccttgtgagctcgtatttcctgcatggcggttgctggggggcgggcggtgcagtcgtctgcactcagcttgctttaaggctttgggcaggttttgttcttggggctcctgggtctccccagagcagagaacggctccagcgttccaggtgctgcctttggccttgtgggggcaaacacacatgcgccgtggtacctgcccctttaggatagtgctgtccagtctagaagggccgaaagtcttctatgccaggcagtgtggggagaaaagtagggggaccaacagactgataggcgtgggagggctaaggttctcaaaatggtgagagtgcggcccagggttaggaaggctcaggcccaaagcaggcctggctggctggtgcagggaagccttctcccagactgcaggggacacaggtgcgcaggtgagtgggcagggtaggggactgggaagaagggaaggcagagatctgggtagcacactgtggctcccgggcatggggtgtggtcattgtgggcaacctggatacctaaccttggctggtggtgggagctgggccctggatcggggtcactgcttttttagagctcagtgagggactggactggact

SEQ ID NO: 9292 - DNA, 6000 bp, Homo sapiens
gtcgttcaggtgctggcatctcagggagcacctgagggcgccgagctcccaggaggaggcttcacgaggcggcctgggtagccgtacgcgacagcccacgggcaagaaatcccagcttttatattagacaagttctggcaacttccaagcaggaaaacatgttttctttgtagtcataaagttatcctggccttccagggaagcgctagtacataagacgtgcttgattaggatctaaattctctgtagccccttgcctctattaactctatgttgaggcttcatttttgttccgtgttctaactttcacaattttccatgtgtcaaaccccaccaactgtaaggcatcgagaggaggcagaggggtgcaatgggcctgctcccaagatgtttccccctgaattccaaaaatagggcaaagtggacaaagtggagcttggcctgggctcactcggcttttgcctatgagtgatttcttgtggctccttgctgtttaccaactggcccaggaatttactgtgtaaggaacagattccagaagtcatgtagcttctggttgcggcccctggcaaaacgcattttcaagtgctttctacagcacgtacaacactagaaatccatcgtgtctgccttttttttttctaaattctatttttgttttaaaaaatgctcacttcccgtgaaacacctccgggcaagtgcaaaatacaaacatcaattacaatccattgagcccctgagaaaggccgcaagcagcgattctaggcacagaaaactggtcagtggctctcagggtgacaggtgcaagaatgacccagggtgctgttactgaactccaagccccctccccgccctgagagtcatgagtgggccactgaccccagagatggtgggcacataggggccggggaggagagaccctgctccaagccaattccaaaggggaaggatatgagccgggcagtgacctgtgggagccgcagactcgggcagtggacaagcccaccacataggtcactgccctttacaaaaagccccacatatatcccttctgctctccaggaatcagctccactttctggaaacacattgggtggactggatcagtgtccaagtacagaccccttgggaaatcagctgaaagctgcagcccctgcctctgctccaacacagatgtgtgaccacattcaattcacataatgaagacagagaggaggcagccttgaactcatgctaggaaacagcaactgtgaaaatagtaaatgctattactggcagatccatgcctgagccagaccctgtgccgaccgcttcacacagattgtcttgttaatccttcaacaacgctaggagtctaggactattgtgtccagttagaacaaggagttaggccttggcgaaggtcacacaactagttagtggcagaattaaagctcaacccctcgaaggtgccagtcattccaaactcgtgatttctgatgcggccggaccacctggccgtctcagcacaagctgcggcctccgtcttgttagtccctctcccctccccacttacttaaaattgtggattctaggcccggcgcggtggctcatgcctgtaatcccagcactttgggaggctgaggtgggtggatcacctgaggtcaggagttccagaccagcctggtcaacatggcgaaaccgtctctactaaacatacacacattagtcaggactggtggtgtgtgcctataatcccagctactctggaggctgaggcaggagaattgcttgaacccaggaggtggaggttgcattgagctgagatcgcgccactgtcctccagcctaggtgagagagcaaaactccgtctcaaaaataaataaagtaaaataaaataaaactgtggactctaaatagggtgtggtggctcatacctgtaatcctagcactttgagaggctgaagtgggaggatctcttgagcccagaagtttgagatcaacctaggcaacatagcaagaccccatctctatttagcaataaataaaaataggccaggcacggtggctcatgcctgtaatcccagcactttgggaggccgaggtgggcggatcacgaggttgggagttcgagaccagcctgaccaacatggagaaaccccgtctctactgaaaatacaaaattagccgggcgtgaggcgcacgcctgtaatcccagctactagggaggctgaggcagaattgcttgaacctggaaggcggaggttgtggtaagctgagatcgtgccattgcactccagcctgggcaacaacagtgaaactctgtctcaaaaaaacaaaacaaaacaaaacaaaacaaaacaaaaaaaaacaaaaactgccgactctagatgcaggcatagggaaaagtacgcaaatcatgtgtttggagttcaaagtgtgatcatgaagccgacactctggtaaccctcaggtccagaaggggatgcccctcctcccccagagccctcctgaatgtgcccataatcacctccttgtttttcttcatctttcccctatttgtgcacacctctaaacgttatggtggagtcgggcttgctgtcggtctaagcgtgaatggaatgatcttttgtctttgctggacatcctgttagtgagattcatccatcctcccctgtccctaggtgttgggcagtccctgtggttacctcgcagcctgcaggtgccttattccagaaaagcaggcccacacctgaacccactggctgcagctgagttttgtttatttaaacccaacccactctgcttaaagccttattgcaaaacaggcactcctggggttctctggtttttcctcctgcctgggtccccttcaggtccgcccagtagccttccactgggaggctccgggctcagggacccgccctgccttccggccccagaactcctgtcctttcatccttcccggaaaaatcccagtggaagggtatatggcgggtggggaggtcctggaccgctcacattaaggagacggacttttctccttcctcccctccctccacacacacatttcccaacaggactctccagtggaaacctcgaattaaaaggttccaaagcaactccaccttttagatcaatataacgtgttcaaatccttgctactgggaagaaaatgctcacattgggcttcagcacaaagacactgtttcagcagctttgagcgaagttggctgagtatgcgtgtgacacacacacagacacatcgctccgggggagaaacccttccggttctccacagccgcccacggtcctcgttgagactggactcatctcagctcagctcagagatttggctgcaggatccgaccctcccttgccaaaaagacccgttctaggggtgactgcgcattactcccacccccaccgctccgaccggccccaggagaagcccttctaggagagaagaggcgacccccacctaccgtccccgaccactgggaggcctaagggctgcactggactccggcgccccgagcgccaccaagggagtgcgcgcccttcccagccgctggtggcacagtcccaaagccccgcccatgcggggggtcgccaagtcctaagcctccaccccctttatccctgtgccccatccggaggcaggtgtacccgtcacgcaaacctaaagctgcccccggccccccgtggttccccgcaggaggcgggggtgtgtgtcacttttctgaaagctctaaggtctctgccccccgccccccgctgtcctccgtaggaggctgggcaggggctgtggcacagctctaaatccctgcgggtgcttgcttgccccaggcagcttccaggacccgcagccccccgccttccccgcaacccgcttcgggaggagccggacgctcggggattccgcgatgcgtccgcgaacgctcgggtcgggccgcacgcgggagatgagcgcgcctccgccgtcctctccaaatcccttatgtcaaccggggttttcttctttcatttaaaagttgcgctttaaaccaagtgggacgcagatccggtagctgcctattgggcttcaaagtccagggagttttagtcggggtgaagcattttagcctccgtgcgtcttgctgtaaaatgggtaaccctcctcgacagcctccgcagtccttaatgggtgggggggggctccccggcctctcggccccagtcctccgcccccgggtcctacccgcgcggcactcctggcggcggtctccgtggatctgttctgccggggtggggagccaggctctgagccgcggccccgagcccgaggtgcggagccaccgccccacgggtagcggccaccgggggccccagccccacctttcccggccctgttgcctcggccccgccccaccgggaggctgggtggggaggcctccggggagtagggccccagtccccgtcccggccgcgccctcgcgtctccatagcgatcctctcggcgcgcacctccgagccggctccccccggggccgaacaatacgccgctgggccgggggcggggcggggccgggccgggggcggggagagcgcgggcggagtgggcgcgggccaagcgcaccgcccaggcagcagccggccgccggggtctgcgcggcgcggagctgcccagcccgctccgggaactcagcccccgccccgcgccgggcccgccccgcttcccacgcccgtccggccgagcccgcgccggagccacctggagccgcctggagccgccgccgccgccgcaggttgatgcgcggcgccctcccgggacgcgcggaggagccatcttgaaaccaacttcgcaaactttcgcaaagtgctctcgaagtggaagctgcgggggaggccgggcgcgtggtccccacagtccccgccagggcccccggggaggcgggacgcggaccgccccgagggccgggcgcccgggagccgctccccggcctcgccgggtggatgcggaggcgcgccgggtgcatggattgtgttcgggcgcccggctcgggctcgggctccgggccatggcgccgccgccgccgcccgtgctgcccgtgctgctgctcctggccgccgccgccgccctgccggcgatggggctgcgagcggccgcctgggagccgcgcgtacccggcgggacccgcgccttcgccctccggcccggctgtacctacgcggtgggcgccgcttgcacgccccgggcgccgcgggagctgctggacgtgggccgcgatgggcggctggcaggacgtcggcgcgtctcgggcgcggggcgcccgctgccgctgcaagtccgcttggtggcccgcagtgccccgacggcgctgagccgccgcctgcgggcgcgcacgcaccttcccggctgcggagcccgtgcccggctctgcggaaccggtgcccggctctgcggggcgctctgcttccccgtccccggcggctgcgcggccgcgcagcattcggcgctcgcagctccgaccaccttacccgcctgccgctgcccgccgcgccccaggccccgctgtcccggccgtcccatctgcctgccgccgggcggctcggtccgcctgcgtctgctgtgcgccctgcggcgcgcggctggcgccgtccgggtgggactggcgctggaggccgccaccgcggggacgccctccgcgtcgccatccccatcgccgcccctgccgccgaacttgcccgaagcccgggcggggccggcgcgacgggcccggcggggcacgagcggcagagggagcctgaagtttccgatgcccaactaccaggtggcgttgtttgagaacgaaccggcgggcaccctcatcctccagctgcacgcgcactacaccatcgagggcgaggaggagcgcgtgagctattacatggaggggctgttcgacgagcgctcccggggctacttccgaatcgactctgccacgggcgccgtgagcacggacagcgtactggaccgcgagaccaaggagacgcacgtcc

SEQ ID NO: 9293 - DNA, 6000 bp, Homo sapiens
ctcatttaaaacatatcctttccaatctgtgtgaccttggacaagttacttaacctctctgagtctagtttccttatcactgaaacgggcctacctggcagggggttgtggatgaaaacgtgttccacgtgctgtggatttcttcatccatgtaagggtctgtccctgtgtgcccagaacatctgggcctagggtggcaagagtctcctgaattccaccaacactgagtcccagctacaagcaagggcctgctggaggctgaggagtaggatacaagacaaacgctgcacagcccaagccctgcagatcccatcagtgcagaaaccccccaaccctaccacccctcccgaggcctgatcctctctctcgcgcagctccctgctttgcccataccacacacctggcctcctgctcccgctctgcttcccctcaggttctgcccacggtctccctacccactcctggctatagattcaactcagtggtgacctggacggccctcttccagctcacagcagggaggcgacaatttgaccttctgttaattttgctggcagatggaaggacaaagttctgggatggggacacttgagcaaagacctgggggtaaggaagttgttaattttcaaatcagggctagattgtagcctcgtctcacctatctgagcttcccaggaaatccctgggacaggtgtcattgctgagtcaggatgggcacaagttaggggaggaatatagaaggagttgaggtcagaaaagtcaacattcaaggtgatcacctccattacccacctctccttggtgaggaaactgaggcccagagaggcaacttgaatacctaaggtcacacagcagatggtggcaaagccaggcgggaccctcagccccttgggttttgtttctcaggcatttgtcttgtacttctgctcctagaaatgcttagcacagggaccggggttcattttgagacagagggagaagattaaaaataaaacgcgtgccgggtgtgcctttctgctcgttcactttgcttcttttcagctaaaagaagagtctcgggcctggctatttataactaacccagatctgcgatggcttgctcaagtgggggtggggcacacagaccccagggaaacaatcggggaaatccacccaactgggcggcagcctgagcgtccgctgggggtggggggtggttgcagaagaggtaggacaggtggggcacagagaatcagccagatggggtggcaccagagcaggccaggctctgggccatccatggtttagagacaagcaacatatgcccaccccacccccgggaagtgggaaaactagtggaatagtcagctggggacaggtcactacagaacaggttgacatgtgtgtagaccaggaattccagggtcctaggggctctggaggtgcacaaagggaggccccggggaagctggttctcatggatgtggaggagagcccagaacagcagggctcaaatgtatgtgtttgtggggagtccccgatctggcctggctgatatgtaggggctaggatgggttcagtggttgatgagccaaagagatccaatgggattgaggggtcacggatgtccatggtgtggagccccagtggtggagtctgggtcattttctttgtggtggggcagggcgggtgctgacaccatgttgaggggccactcctcagccagctgtgcctgctgggttggggaggtgctgagtgggctcagtcaccaccatggcccccttcctctggctacagcaaagccccagctgttgtctcccagccaatgagggctcaggacagagcaccagcacccaggttctggtcgcagccacaccctttcctgttaggggactgcacatccacacatggcatctggggcccaccttgccgcaggtgacccacctgtccagctttagccttgcatggccctgtgccctgaactcctggcccactgggcctgcctttgctccaaggggtgcttctctgtcctcagctttctcggcttccaggtagctgggagcatggttaacagcttcttcctttaccacatgctctcttcccgtgcctctggtaccctccattctctggttcctgaccacctccccaactgctcctccatctttttggtaagcaccatctcttcctccagtggtccccaccctctccccttctctcatctccctgggtcctgataatgccccgccactgtctcctaacatgctcttggtctccctgccatctcacagccacagcagaccgtacactgaactcagcctcacagactgacttctgtgctcactcccacttcctctggactgactaactgatgtttttgttattttattatgtccagtaggacaactcacattgtctgtgggaccacgcctactgtaaacaggcaattaaaaacttctcctcctccttctcaaatttaaaagactaatgttaaaactctcgagcagttcttaggccaacgtccctgatcctactgccccaagctggcatctgtgcatgggcaacgaccctggccccagccacactggtcttctctgggttcttcctggcctcgtgctccttcatgtcctgcaccgtccccgccttggaactcacttccctcccaccctatgtcactggccacctccacgcctgctatggcctcattccaagcatctcttcctttgggaagctggcccaatgcccaatgctcccccactccacatgcccccagagccccagtgggtctcctcagatagcctcacatgactgtaaggcccaatcgttgtttgctttctgcccctgccctacaggcagagggtctgccagaaaagggccggtctgaatcctagaactgtgcctacaactataccctggtggaggaggctatctgtaagtgactgctgcatgaatacaatattggtttgatgccaggtgagatgtccctctcttactttgaggtcaagtcagggaggtgtcagccagccccagtggacccctccgcaggctagcctctgctctggaccactggaaagggccatctcactgttgcatgtgggcttacctctgcaaacaattcaactctgacccccagactctgcagtggaaacagcctctggctatcccaagacatgctaatatgcatttcctatatacattaaccctcagagccaccctctgaccacagtctgttacattcccttttgacagaagaggaaacagaggctcagccaggtagcacagctgccggtctctgtgtggtcctcctggcaagaggtccagcctgacacagcctggtggtgtggaaggcaagcacaaagggtagctagcccctcagccattggctgaattcccttggtcctcactggacacctccagtgagcactaagttcgcctccatgatgcccataacaaatatacgtcctgttcctgacagttgaggcagcaccctcacaggtggcccatgaccctgcaggtacgtaacgcaatggtctccatctcacagaagaggaaacattcctagggaggttatgggatgatgctgagatgccacagtgtccagctggcaaagccaggcacatgcccctgcccctccaccacagagctatgatggagagaccgctccatggacctctgccatggtcaggtccagggctgctgctcaaagaatggcatgatccacaccttacaaaggtgtgaggtgataaggaacgcgttagctgggaaggcatttgcactttgtcagggatgctctaggatacacaaagcttcagatttacaaagatggagaagagagacaggagcattcatgtcttggccctctggcttgagagtcttttaagcatggaactgagggactcctggccctgaggtccacagataggctttgaaattgaaaacagaattttgcagcctgggttcagctgcgttttgctgagggtctgatgctttccaccagcttcccaaaagcgccaatcagtggccttaactgaactggctctctcacgcttgtctgggctgggggccagctcctcggtccttctcccttccttccctcccaaggccacccttccgtgtgccaggattgccagggacgccaaagagcccctagacactgggcggtggcggcggggggcggcggcagagatgactaatgctccctcccatcgctgcacaaacctcaccggtgtaaatcgttagggtttgcataggcctttcacacgttctgaaggattggtgagacaatccaggagagcaggtgccactagccccactttgcaaacagaaaggctgggagaggtcagtcggttgcccaaggacgtagagctcacaagaggccgaactgggtttgaacccgagtggagagaaggcgagccgggactggctgcagtaaagagggccaggaccatggctgggctcaggcttggtttcccgggctgccagaggtggcccctggggctcggctaccaggcctcagcgcagcggagtcggtggaacgccggcgcggggagctcttgcgggactgcggcgcgcgcggagctgcgaccccgcccctgtccgtccccattgggctactggcccgtccgtcagctgcctgtgcccaatggacagagggccggcgctcgtggcggggcggaggtgcccggcgcgtggtgcccggcgggcgcgcggcacccccccgcccgcggttggcctggcaacgggctgcgctcgcggctccgccccctgccggcggcggcgcggcgcggggcgggcggacccgcggactggcggcgggcggcgggcggcgggcggcgggcggcgcgggagggcgggcggagggaaccaggccggccggagtgtgtgcgccgcccgcggtccggtcacgtccccgcgtgggcgccgctgcccgcgtcgtacggaacgagggcgccgcggccccgtgctcgccgccccgccccgccccgccctgcccggagcagctcggcagatgctctgtgctgcggcccggaggtgagtgagccgacccgcggccggccgcgcgccgctgagcctcaggggtcgggggcacggccggggcatccaccttgcccccacttgggactcttcccaggcctttgtgccccggatccgccaggacgcagcgtcagggatgcccctcaggggtgggggacaccaagggcggggacgcctgcgaggtgggcagggggcggcctctggtcgggcaggtgctgggggagggatgcgccgccaagccgatgaccccgcgggagggggcggttgaggacccgggagggtggacagagggcgccggggatgccgcgcggggccgccgggcgcccccaagcagcggctgatgcggagcccgggcgggccaggcgagctgcgggagcggcgctgaggcgggtctccctagggggaggatcagggaggggcggccggagccgatgcagggccttgcctgaaaccgaggagagggccccagaggcctgggcccgaggacctgggcccgcagacggacagctagcagttctcggtcactgctcttgcagcgagcaggttcctcacaggcatttagaggaagagatgagtatcgacctgctgcgattgtaatacgttcccggctcaatattttttcccttaaaaggcggtgggggtgtttgggggaggggagtgagggcctcagggctggcgctccgtatcctgcgggcgatccgagggggctctgcctttagggcggtgctgagccttcctgggtgatgatggcaggattcggcctaggccgagaatgggggctcctgttaactgagacaagaggatgatgccaagcgagaccagcgttccgcgtagtccgtgttggggtggagggacccgcctggtagagaggtctgtcttgcttggggagacagctgagcccctgaccggctcctttctgcccaagtgatttccctgccctggggattgagctctctggagaaggctccttggccaaattcaattaagcaa

SEQ ID NO: 9294 - DNA, 6000 bp, Homo sapiens; identical to SEQ ID NO: 1032

SEQ ID NO: 9295 - DNA, 6000 bp, Homo sapiens
atacatatactgagcaaagtcagtgtgctgagtgcagatgctgggggaacaaatacagacaggcttgtttccagaagcaagctaatggattgctcacctcacctgcgggctatggtgacagtggaaatgatttatgccctgggtattgccctatgcaccgaaacctaaactcataagatgttattgaggggagcgagtactctttaccttgcaaaaggattcactgcaggattaaataaagctggagaattttagaatttgaaaagacgtcaggggacctgctccttcaatcccttcattagttactggtgaaaaatcatatttaaaaagcttaagagacttgcttagagttattcagcaatgccagagccagcgggtcagagccagcactgttctgttcattctcagtgctggtctctttccatcgggccctgtatgatgtagagatgctccagcgatggctgctgctgctgctaaccaggtcaatatttatcgagtgctttctgtgtgccagacacagttctaagtgctttttacatgttacagcattgctctcacggcaatcccattaacaacactgaggcagagctgagacacagagagattagacaacttgtctaaggtcacacagctcagaaggactggtcttgggcttcttatccatttgtcttttgagcccatgctctgaaccacaacactgtggcttttctttagagtgagtccctgaccagcagtccccatagagaaatgtgtttccactcacatattgaaaggagagtacttctctactgaacatcgtttcagtgctaatagctaatagtttaataaaagcaaagcttggcatcataccttttggcagatctttataaagttgtcatacatagagctgccattaaagcttgtaaagctttgtggataaaagcagcatgaaaagcagttcatatgatgtgtgtgacaacaaacagaattgtgatccaaattacaggtgaaacgggacagtggcccctgggaggctagaaatacctgcagaggcttacggagtgagatgtttgtaaataaagccattcaaacatcaattgtgtgtggttttcttgagaagcaactgtatttaagggactgcttatacaaaatcaagttcttcttagcaaggattgctttaaatattctgacttgaatgaaggccagtcatgttctgccattttcaaaaatcttctaactggagtcttagagttgattttcttttcatttgtgattaattttccagaataacattcccagctcccaccccacccagcgtttatagtccagagattctgagagtaggaagtcttagtaaagcccagaatctaaaacaaataagaccagtcagttctctagttagcttttttcctttcaagttgttagcaatataaactctggaaagcctaaactttaatgcacccatctcagcaacatctcctgtaacgatggaaaggcatagaaaagaagaaaagggaacattattaatcttgtgggaacgctggagttttgtctattatcacaagcagcgtgagccccaagtcatttaaatcctctgggggtgggagacataattatttgcaagggagcattattagctaagtacaaatgggttgctatttgttttttctgttctttgtgatgattacaggctggggatggtgtttagtaacaggatccagcaggtcagttatgacaacttcatcatcactgtcattaaccccttttgtttgcagtgaacacaaaaagctgttcagtatcaagagagtcaagaaaaagggaaagaagagggggtggagaaagtgagacaaccaaagagacagccagggaacagaaattcatacactatgaacaccagaaaaaaatacccctgggtaattgagtcagctgactcaaatggtgtaggggcctcagttagaggaccaaattttggactccttggtctttctgccaaaagagtaattgctcatgtttatagatgcaaatgtttttgccattttggttcctagaaatgccctagggagatgttatttttggtaaggggtcttcctgcttcaagtgtaatgactgtgaacaactagtttcagtatcttctctagcatgccagggtaaaatgaagcaaaataaatagaggaagtgccatgacctttattgaggatctactgggtgccaggcaaaatgctttttttttttttttttttttttttgagacagggtcttgctctcttgcccaggctggagtgcagcagtgcaatcttggctgacggcaagctctgcctcccgggttcctgccattctcctgcctcagcctcccaggtagctgggactacaggcgcccgccaccacgcccagcttattttgtttttgtatttttagtagagatacagtttcatcgtgttagccaggatggtctccatctcctgaccttgtgatccacccacctcagcctcccaaagtactgggattacaggtgtgagccactgtgcctgcccagtgctgcgatctcgactcactgcagctttcgcttcctgggttcaagcgattcttctgcctcagcctcctgagtagctgggattacaggcgtgcaccaccatacctggctaatttttgtatttttaatagagacattatttttaatgtatttttcctgttggccaggctggtcttgaactcctggcctcaagcgatacacctgcctcagcctcccaaagtgctgggattacaggtgtgagccccacgcccgacaaggtgcatttttatgtgctttttctcctctgtcttctcaacaaccctggggtaaaaggcctcatttccacttttcctatgagaacaataaagtagaaagaggtaaaagactgcctctaagatcacccagcacagagcagggatttgatttcaggtgtgtcttgttccaaacttaatatactgtgctgctgggggaaaacaaagagcaaaaggttcttaactgaagtcaaagacgaccaagaaaatgtaggcagatgtcaggtctgatcatgtggatgctcaaatgataaacagacacattgagagaaattgtattaattaaatcataaaaatatgttccgctttttggggaatttactcctcctcctggggtgacccttgacaagacattctgtcttcctgtttttaagcaaaaaaaaaaaaaaaaagtgggtagaagatgaaagtttgatatttcgctcatgcatagctttgtctccttaatatattttgtgcttgcctgtcatttcagctttctgctggcagacgaagctccttcaactgccattcctacttctgacactcctcttgtccttttcaggacaactttatgcctattgtgccttgggtcttgagaagcatgtggtaaaactggccagtggtgatggcaggcatagcagggaatcagattgaggggggctgtggcgtgggagagaaaacaaaagagggaaacaggctatttgatgacagaatcaggctgcttctgcaatgacattacatgaaatatctgaaatttgaccttaactgtatctggtgggtcccgttaaccctgtaagttatggacagaacgttcactcaaattctagcaacgtctaggctcatggaaatacgtgaccaattcaggtgaatgaaagggattttaaaacattaatttccagcttaggtcttcctaagactgcctgcgtgtcccttaccaccactccagcctgagtgtcacatggatcctgaatgcggacttgtgtgcacactgtagaaaaataagcaactgaaaaccccaggcatcggggtggagtgatgatgaaagacaccgagaccgaagatcaggaagctggaaattccccccagcttcggtgtttgggctgtatctcgcttttccacttccctaaatcaccctcgtggtgcgagtgtgctcgcagcagatgctccctaattgtctcttgtattgaccgtaaaaccctaacgacaggaatactctctctccttctatttctcaacaccatttcaacacccaaactaaaacctctcacctgagtgtaagggagtggtgaccttcttaagcggagagctcttccatcagagggctccctaagggcatctctgttcctagccggggagccgtcaccccactttgttctgcttagcctaagacacgcaactttttccagcttttactcttcgctgaattctcacggtggggttggggggatgttcaggctcaggagcgaggttgggggcccggcccgctgggcgctgttcaccggtagcccggaccagagcaggagtttcatcattacctgctgggataggtgggacacatgtatttccggggccaccccagacctcccggaggatgctgattgacactgtccagtttgagaactactgtgtccagggagcagaggcctccccataaccccttgggttgtggacgtctggcccagggcttctctgggtgagcggggcgggcatcagagcgcgtggaacctggggcgggaggtcggggcagtgaaggaggaggagaaggaggaggcggagaccgagggggagggaggggaggaggaagaggaggaggagtccctcgtggccaccccgaggggagggcgaccgtagagacttggtcgggaggcgccggcccagcgaggccgctgggactgtgcactgaggggcgctgaccgttggacgcgcgctccccgcagaccctcgctgaaggagcagggggcggcgcgcgtgcgcggggcgccgggcggcgcgcgagggggcggagcggggaggcgtgctgcgaccccggccggctacagcctgcggcgcgcgcagagcgctagtggggcgcgcggcgcgcgcgcggggcgggggcgcgcggaggggggggctgccccggggcggcccccccaggtcggggcgcggcgggcggcggcggcgggcgcgcgtcccgtccaggtccggagtaaccgccgccgccgccgccaaagctcgccaacatggcggacctggaggctgtgctggccgatgtcagttacctgatggccatggagaagagcaaggcgaccccggccgcccgcgccagcaagaggatcgtcctgccggagcccaggtaccagctgccccggccggcgccggccccaagccgccgccccctgcggccgccagctaccccctgcttcctggagggtcgggcgctgagcctccgctgccccggggcgggtgacacagcggagcgggcgatgcggggccggcctcgtcgttccagtctctgaaatggggcatcggagggccggtggggggcaccccgggagagagcgctccaaagtgcccggcgcggcgccctgcgcgcagcgagcgccccagccagggtctggttatgacttggctggaccagctccatccctgtcgccccctccccccagccctgtcctgtcctgccctgtcccatccccgtggttcttcctgttgcattggtgtagtccccgttggctccttgcctgtcactgctttgcgctccatcctggtcgctccttcttcccgggctcattggtccccctttccaactccatcctctcacctccctctgggccgcttacctggggactgcaggcttgttgcttattgtccgaggtagttaaactgctgttttcagtacttgctcttcttgaagtctattaagtctagtcaccttcttcggcttctcttctattttgtccccgggcaggattttgacccactcagtattctttttggtgccaagtgtgtcacctgagctgctttcctcaacttgtagatctactggtggcactttattaaaaaattgaaacaggagtcacttaaaaagacacttgaatgggtgattccagacaggaatttgttgttaaattatcaaaggagggcccgattgaattggcgaggggctcggtgaggtgcataccaagttgcaattttctctcaaatgatttattattaaggtactagtaaaattttttctag

SEQ ID NO: 9296 - DNA, 6000 bp, Homo sapiens
aggcggaggttgtggtaagctgagatcgtgccattgcactccagcctgggcaacaacagtgaaactctgtctcaaaaaaacaaaacaaaacaaaacaaaacaaaacaaaaaaaaacaaaaactgccgactctagatgcaggcatagggaaaagtacgcaaatcatgtgtttggagttcaaagtgtgatcatgaagccgacactctggtaaccctcaggtccagaaggggatgcccctcctcccccagagccctcctgaatgtgcccataatcacctccttgtttttcttcatctttcccctatttgtgcacacctctaaacgttatggtggagtcgggcttgctgtcggtctaagcgtgaatggaatgatcttttgtctttgctggacatcctgttagtgagattcatccatcctcccctgtccctaggtgttgggcagtccctgtggttacctcgcagcctgcaggtgccttattccagaaaagcaggcccacacctgaacccactggctgcagctgagttttgtttatttaaacccaacccactctgcttaaagccttattgcaaaacaggcactcctggggttctctggtttttcctcctgcctgggtccccttcaggtccgcccagtagccttccactgggaggctccgggctcagggacccgccctgccttccggccccagaactcctgtcctttcatccttcccggaaaaatcccagtggaagggtatatggcgggtggggaggtcctggaccgctcacattaaggagacggacttttctccttcctcccctccctccacacacacatttcccaacaggactctccagtggaaacctcgaattaaaaggttccaaagcaactccaccttttagatcaatataacgtgttcaaatccttgctactgggaagaaaatgctcacattgggcttcagcacaaagacactgtttcagcagctttgagcgaagttggctgagtatgcgtgtgacacacacacagacacatcgctccgggggagaaacccttccggttctccacagccgcccacggtcctcgttgagactggactcatctcagctcagctcagagatttggctgcaggatccgaccctcccttgccaaaaagacccgttctaggggtgactgcgcattactcccacccccaccgctccgaccggccccaggagaagcccttctaggagagaagaggcgacccccacctaccgtccccgaccactgggaggcctaagggctgcactggactccggcgccccgagcgccaccaagggagtgcgcgcccttcccagccgctggtggcacagtcccaaagccccgcccatgcggggggtcgccaagtcctaagcctccaccccctttatccctgtgccccatccggaggcaggtgtacccgtcacgcaaacctaaagctgcccccggccccccgtggttccccgcaggaggcgggggtgtgtgtcacttttctgaaagctctaaggtctctgccccccgccccccgctgtcctccgtaggaggctgggcaggggctgtggcacagctctaaatccctgcgggtgcttgcttgccccaggcagcttccaggacccgcagccccccgccttccccgcaacccgcttcgggaggagccggacgctcggggattccgcgatgcgtccgcgaacgctcgggtcgggccgcacgcgggagatgagcgcgcctccgccgtcctctccaaatcccttatgtcaaccggggttttcttctttcatttaaaagttgcgctttaaaccaagtgggacgcagatccggtagctgcctattgggcttcaaagtccagggagttttagtcggggtgaagcattttagcctccgtgcgtcttgctgtaaaatgggtaaccctcctcgacagcctccgcagtccttaatgggtgggggggggctccccggcctctcggccccagtcctccgcccccgggtcctacccgcgcggcactcctggcggcggtctccgtggatctgttctgccggggtggggagccaggctctgagccgcggccccgagcccgaggtgcggagccaccgccccacgggtagcggccaccgggggccccagccccacctttcccggccctgttgcctcggccccgccccaccgggaggctgggtggggaggcctccggggagtagggccccagtccccgtcccggccgcgccctcgcgtctccatagcgatcctctcggcgcgcacctccgagccggctccccccggggccgaacaatacgccgctgggccgggggcggggcggggccgggccgggggcggggagagcgcgggcggagtgggcgcgggccaagcgcaccgcccaggcagcagccggccgccggggtctgcgcggcgcggagctgcccagcccgctccgggaactcagcccccgccccgcgccgggcccgccccgcttcccacgcccgtccggccgagcccgcgccggagccacctggagccgcctggagccgccgccgccgccgcaggttgatgcgcggcgccctcccgggacgcgcggaggagccatcttgaaaccaacttcgcaaactttcgcaaagtgctctcgaagtggaagctgcgggggaggccgggcgcgtggtccccacagtccccgccagggcccccggggaggcgggacgcggaccgccccgagggccgggcgcccgggagccgctccccggcctcgccgggtggatgcggaggcgcgccgggtgcatggattgtgttcgggcgcccggctcgggctcgggctccgggccatggcgccgccgccgccgcccgtgctgcccgtgctgctgctcctggccgccgccgccgccctgccggcgatggggctgcgagcggccgcctgggagccgcgcgtacccggcgggacccgcgccttcgccctccggcccggctgtacctacgcggtgggcgccgcttgcacgccccgggcgccgcgggagctgctggacgtgggccgcgatgggcggctggcaggacgtcggcgcgtctcgggcgcggggcgcccgctgccgctgcaagtccgcttggtggcccgcagtgccccgacggcgctgagccgccgcctgcgggcgcgcacgcaccttcccggctgcggagcccgtgcccggctctgcggaaccggtgcccggctctgcggggcgctctgcttccccgtccccggcggctgcgcggccgcgcagcattcggcgctcgcagctccgaccaccttacccgcctgccgctgcccgccgcgccccaggccccgctgtcccggccgtcccatctgcctgccgccgggcggctcggtccgcctgcgtctgctgtgcgccctgcggcgcgcggctggcgccgtccgggtgggactggcgctggaggccgccaccgcggggacgccctccgcgtcgccatccccatcgccgcccctgccgccgaacttgcccgaagcccgggcggggccggcgcgacgggcccggcggggcacgagcggcagagggagcctgaagtttccgatgcccaactaccaggtggcgttgtttgagaacgaaccggcgggcaccctcatcctccagctgcacgcgcactacaccatcgagggcgaggaggagcgcgtgagctattacatggaggggctgttcgacgagcgctcccggggctacttccgaatcgactctgccacgggcgccgtgagcacggacagcgtactggaccgcgagaccaaggagacgcacgtcctcagggtgaaagccgtggactacagtacgccgccgcgctcggccaccacctacatcactgtcttggtcaaagacaccaacgaccacagcccggtcttcgagcagtcggagtaccgcgagcgcgtgcgggagaacctggaggtgggctacgaggtgctgaccatccgcgccagcgaccgcgactcgcccatcaacgccaacttgcgttaccgcgtgttggggggcgcgtgggacgtcttccagctcaacgagagctctggcgtggtgagcacacgggcggtgctggaccgggaggaggcggccgagtaccagctcctggtggaggccaacgaccaggggcgcaatccgggcccgctcagtgccacggccaccgtgtacatcgaggtggaggacgagaacgacaactacccccagttcagcgagcagaactacgtggtccaggtgcccgaggacgtggggctcaacacggctgtgctgcgagtgcaggccacggaccgggaccagggccagaacgcggccattcactacagcatcctcagcgggaacgtggccggccagttctacctgcactcgctgagcgggatcctggatgtgatcaaccccttggatttcgaggatgtccagaaatactcgctgagcattaaggcccaggatgggggccggcccccgctcatcaattcttcaggggtggtgtctgtgcaggtgctggatgtcaacgacaacgagcctatctttgtgagcagccccttccaggccacggtgctggagaatgtgcccctgggctaccccgtggtgcacattcaggcggtggacgcggactctggagagaacgcccggctgcactatcgcctggtggacacggcctccacctttctggggggcggcagcgctgggcctaagaatcctgcccccacccctgacttccccttccagatccacaacagctccggttggatcacagtgtgtgccgagctggaccgcgaggaggtggagcactacagcttcggggtggaggcggtggaccacggctcgccccccatgagctcctccaccagcgtgtccatcacggtgctggacgtgaatgacaacgacccggtgttcacgcagcccacctacgagcttcgtctgaatgaggatgcggccgtggggagcagcgtgctgaccctgcaggcccgcgaccgtgacgccaacagtgtgattacctaccagctcacaggcggcaacacccggaaccgctttgcactcagcagccagagagggggcggcctcatcaccctggcgctacctctggactacaagcaggagcagcagtacgtgctggcggtgacagcatccgacggcacacggtcgcacactgcgcatgtcctaatcaacgtcactgatgccaacacccacaggcctgtctttcagagctcccattacacagtgagtgtcagtgaggacaggcctgtgggcacctccattgctaccctcagtgccaacgatgaggacacaggagagaatgcccgcatcacctacgtgattcaggaccccgtgccgcagttccgcattgaccccgacagtggcaccatgtacaccatgatggagctggactatgagaaccaggtcgcctacacgctgaccatcatggcccaggacaacggcatcccgcagaaatcagacaccaccaccctagagatcctcatcctcgatgccaatgacaatgcaccccagttcctgtgggatttctaccagggttccatctttgaggatgctccaccctcgaccagcatcctccaggtctctgccacggaccgggactcaggtcccaatgggcgtctgctgtacaccttccagggtggggacgacggcgatggggacttctacatcgagcccacgtccggtgtgattcgcacccagcgccggctggaccgggagaatgtggccgtgtacaacctttgggctctggctgtggatcggggcagtcccactccccttagcgcctcggtagaaatccaggtgaccatcttggacattaatgacaatgcccccatgtttgagaaggacgaactggagctgtttgttgaggagaacaacccagtggggtcggtggtggcaaagattcgtgctaacgaccctgatgaaggccctaatgcccagatcatgtatcagattgtggaaggggacatgcggcatttcttccagctggacctgctcaacggggacctgcgtgccatggtggagctggactttgagg

SEQ ID NO: 9297 - DNA, 6000 bp, Homo sapiens; identical to SEQ ID NO: 1031

SEQ ID NO: 9298 - DNA, 6000 bp, Homo sapiens; identical to SEQ ID NO: 1035

SEQ ID NO: 9299 - DNA, 6000 bp, Homo sapiens; identical to SEQ ID NO: 1033

SEQ ID NO: 9300 - DNA, 6000 bp, Homo sapiens
gacactgcagccatgcaaaccacttcaaatcgaagtccccccgcttctgggggatccccccaggtgcgtccccctctgcgtgtccctggtctcctccatcttgcaatctcttctctcctctcccttccctctccactcttttctctctggaccttctgattcttctctctttatgttgcagaacaatccagccactaccttccagactgggctctgggtccatcttggcctcttcaaacccatcaaggtgcccacaggtgctggggttcagcctgccccatcacatatgggaagcccagcgtctggcccatcctccctagggtctcattccaaatctcctccctgttttacccacagtcagcacttccagaattttccatctcgtaatgtcctccagccatggcacaggcctggtacgcagaggtgattaacagatgcttttggactgttgaagcttgcattctgccattggttttctcctatcatggtggactgctcccaggccagggacatttggggcccagtgctcctgtttcggcctggttcttaggtgttcaggccacatcactgcttgcagcgtgattgggattctggggcctgagcagggctggtgagagaggcccctctccatgtcccagaggaatgtgctccaccggggggtggcctatggagggagggtaactcaggccagttcccttcctcctttagtaggtggagccactctgtcagtttggaatcctggaaacctggaatcttagagcttttgagtcttagaacataggatcctagttaagagcacagaccccctgaattggaatcccagctctgccatttattagctgtgtgactttgagcaagttacctaacctctctgtgccaatgttttctcacctgtaaaatggtagcaatgattttacaagatttttttcttttctctttctttctttctttttttttttttttttttttgagatagagtctcgctctgtcacccagagtgctggagtgcagtggcatgatctcggctcaccgcaacctctgcctcctgggttcaagtgattctcctgcctcagcctcctgagtagctgggactacaggtgcatgccacaatgcctggctagtttttgtattttttagtagagatggggttttgctatgttggccaggctggttttgaactcctgacctcaagtgatccacccacctgggcctcccaaagtgctggggttacaggcgtgagccactgcgcctggcccgattttacaagattatggtaagaattaagggggttaatttttgtcaagtgcttagaccagggcctggcacagataaaggatctgtgagcatctgagaaataaatcagtgtgaattctgagcatactggaatctttgtccctgtgctattaagatctttaggcctggaagggacctcatttcatgtcatagggcaggaattctgccccagtttccttcagcccagcttgtttatttgtccccatggacagatgatccctttctatccagccactacaattgcaagaaagttctggggggcggaggtgagcctgggcccagcagctgctgcagcagcaaggaagagcctggttgggctttgtccctggaagagggcaggggattccgggtctagggaggtggtagggagcctggttcatttgtcaggggggtgcattagggggctccaggctggggtctacctcgtccaccctctggtagtggcctggcagccctactcccaggacatggtaggaccaacaaatatgtgtggctgatgcagccttctgcaattaccaggcacaacataaatagcagtaatgaatggatgaagctcctgcagtcagccagggccctcaggagggacctccccagtcttgcttcttgctaagacatggagtggtactttcagccccagtaggtttcagggtcatccctcaaatccacataactcactccctatcctgggtggatcgtgggatgggcagaatagtgacagagatagagtggacaactacgttttttttgttgttttttttttttttgagatggagtcttgctctgtcaccaaggctggagtgcagtggcatgatctcagctcactgcaacctccgcctcctgggttcaagcgattctcctgcctcagcctcccgagtagctggcactacaggcgtttgccaccacacccagctaatttttgtagttttagtagagacagggcttcaccatgttggccaggctggtcttgaactcctgacctcagatgatccacccacctcagcctcccaaagtgctgggattacaagtgtgagccaccatgcctggcctagggttttagttgaaacataaagcatgggccaggcacggtggctcacacctgtaatcccaacatttcgggaggctgaggtgggcagatcgctcgagcccaggagttcgagaccagcctgggcaacatggtgaaaccccgtctctacaaaaagtacaaaaaattagctaggtgtggtggtgtgtgcctgtgttcccagctactcagaggctgaggtgggaggatcactggagcctgggaagttgaggctgcaatgagctgatattgagccactacactccagcctgggcaacagagtgagatcttgtctcaaaaaaaaaaaaaaaaaaaaaaaagaaacataaggttagatataaaacaggactttctgctagtatagatgcttgaaggaggctgaggtgggagtgttagtcctgtcaagacaaggaagggacccagatcacgaagggtagcagatttctgctcaaatctgtaaaagagctttgaatgatcagaaatacccagagagcagaggagctgccccaggaggtggtgagatctacatcacctcaggtgtacaagcagggacagggtggccacttcggaagactatagctgaagggacccagacctgagaattcaccgtctggtggcttctcgaggtcctgtccagtcttctgaactttgctttatgaaaatgtccctggaggagaatgggaagaagttggtggtggttggtatcttctccccatcatgccgcctgatttctttcaccctccaggcctgcggctttctagctgtgcattcagctgctcggggcatggagtgcctgccatgctaccttgttcctgcctccatgccttctccctccttgatgccatttctctacccaccttctctcttcttatctcgatcctgtacaagctttcaaggctcagttcaagtctctcgcctttgatgaggcttccctgaagactcctgatctgaagcccactctgatctgatgtaaatccgtcccacctgcagggctgtctggcttgctgaattcacacctgtaagacacctctcagcccgtgtgtgcttagacgaccttgccttggagtctggagacaaaggcttgttttgtctccttagactaaaagctagaaagggatgaatatttgttggacacctattatgtgttagacactgtgctaagccctttaaagatggtttgcatcctgcaaagtgtgaaaccttatcgccatttcacagatgaggcacctgagactcagagatgttaacgggctttgcttcccatcctcagtcaggaagcagcagagctgggatcaaacctgagtgtacctttctctaaagctgtgactatctgccagcatcggaggggtgggggggctcagggcagccctcagcaaccccctggtgcccctcaccacacattctccaaagaggtggagagggttacgctgggcagcccagtgtgacaacatctgggcaggggttgggagcactggactcgtactgggggctgctgcttcccagcggagtaaccttgaccaggcagctcatctctggcctcagtttcttcatcggtaaaatgggggcaaaagggtggaactccaggcagtttaaagaagtgcctagcacacagcaggtgttcactaaatgcttcctgagttgtgaggcagtgagtagaccatttggcctgcattggggagagtcttggtgcttttaatttgtttggctggatgcaaatgaacaaataaaagggggttataaccttgaacactccctctccccaatccacagcccttgggtgagagaggaagggagacaggcctcaggagcgtgggattgggggaactggtgtgacagggtcctggaaagtggtgagaatgaagcctttgcagccggatagaggcatctgtttcacctgggggccctctgagaagccttcctggaggaggtggcctttcagccaagcctagagggtgggaagaagcagggttgtgaatgagaagtgtggaggcagcctgggcggttgagcgacctttagagctgggttctagctcagctctaccgtttaagagctggggtcttaggtgggtgacccctcaccggggcagtggggtgaacacccccgatctggatctcagagaggagacagggtggaacgtggcagagcaggcacctgggacccgggggtggtcagtaatgccccccacccacctctttttactcatgacgcagcccccatgctgaggggtcaggaccccaccccaggcaagaacctggattttaaggagctggccgcgggctgggggcttcctaccctctgggaaggggtgggagctcaccagccgccgccgtcagtctgtctgtcgcctccacgcctcccccctccagcgtcccgcgcctgcagctttccccgaagacatttggtgtcagtataaggacggcttttcctcgcacgcagcgcggctcggtctcgccgccgccgcacgtccccgcaccgccaggcgctcgggctcctccgcagcccccgccgcgcgcagaccccgcgcttcgagccctgagccggaggcgcgagcagagccgaggcaggcgagagaccggcctcagccccgcgctccccgccgcgctggtctctcccgggcacttgccccgctgctcggtccccgcagcacccgcgcccccgccccggcccggagcgccgcgctcccgcccgccgcccgcccagagcctcgccgtccctccagcccgccgcctcctcctcctcccgccatggcccgggcccccgggcccgccgccccccgcccgccgccccccgcgccccgggggctcagctgatcctgaattggcggggggtcggctggcggggctgggggtccctctcgatcgccggcttcgggtggggacgcgttgtccccgcgtctctaacctggacgaccccccgcggccgggccacgtccatgccaaggtaggtgggggctgggtgggtggggggaaggaagggagggcttcgcttcgatgccagtttcttggcgcgttggcttctctcttcactggggcatttatttatttatttctggggatcgatcctccccacccgcgcgtacccgtcaggtgagccccccatcccgcgccttcggggccatgccttgggaggaaggacaggaaactttgaccggtcctctctccaaggccacgaaagttctctcggtgccaatactgaagccagctgagccagcgctgcagaaatttattcaacaagtcaggctgccggccggggcccgggttgtccgcgcgtccggccgcccctccgcggctgcggctctgcgggcagctgggccagagctggtgcccgtgtccggcgggctgagctgggagcgctggcctgggagcgcggcagcgggggccactggatgggggaatcccgggcagggtttaactttcccggaggcgggggtggcggagaccccccctttggctggcaccccagcggggcggaggcctcgctgcatgaagccaggccagggtcggagccggggctgtaggggtgaaagggaccctcggccggctggaggtgttatgtaatgagtgcttatgatgattgggtgctaattgcctactgggtggtgttgtgggggagctgtgggggactacggggcttggcagtggtgggg

SEQ ID NO: 9301 - DNA, 6000 bp, Homo sapiens; identical to SEQ ID NO: 2191

SEQ ID NO: 9302 - DNA, 6000 bp, Homo sapiens
tggcaccagcatagagtcagccgtgtcactctttggttgtgacctcgggcaagtccccatatctctgcgcctcggtttcctgtctgtaaaatggggacaatggtaatctacctcatgcggtggacataaggatcagatgccaggttgcttgatgagtgccgcgttcatgctcagcatctgctgagcgccaactgtgtggcgcagagctgagcacctgtgccgtttatgctccagtgaggcacacgcaagcccccccacctcccgccccggggaccctgtcgcatgttttgcgtttaattatgatgagagaactgttggatcttctctgtgggaaaacacacactactacattgtacagtggagcatcttgatggatctggctttcttttttttttgagatggagtctctctgtcacccaggttggagtacagtggcgcaatcttggctctctgcaaccgctacctcccaggttcaagtgattctcttgcctcagcctcccgagtagctgggattacaggcgcccaccaccacgcccagctaatttttgtatttttagtagagatgggggtttcaccatgttggccaggctggtcttgaactcctgaccttgtgatctgcccacctcggcctcacaaagtgccgggattacaggcgtgagccaccgtgcccggcctggctttctaatatgtcgtcaagtttggactctctaggctagcctggtggctactcacataagtatatttaaagtgaccgacgctgatttcccaacagacttgaccgggcatcctgctctatctgtgttgtccctggtgtgttgcatggcttttgggcaccaggtggaagaagcatgctatcgagaactgaccatacacctgtgccaggattcagcccagcccagcagcccaccttgcaggggcagacaggtctccgtttcctcggaggtcccctgacactgaagggaggcttcccactgcacctcagggtcatacagctcttgccaaagaggctcctcccatgtcagaggctaccccggggagcgatctccagcgtgtttctgggccaggctctatttgtacacaatcggcctcaccagccttgggacaaaggctgtcctgagtgccagccaggagccttttgtcgtgtacagcacaaggatgagccatttgctgatcgctgaggcagcaaagctttgaaacttcttgccaagtgcctgcaggaggattgaagcttatcctttgtaaactgaagccaagtcccccagacagttccaggccacattagttcagggaacagaggccggctgtctttgtgtcatcccatctgacccactgcacacattcctccacccagggctcagatgtggcctctggactgtctaggccaggtttttttgcgctaggtctgggtttctgactcaatggcacccggatgggtgctaagagccactagatctttgtgacaagcttctcccaatgggcacgttcttggcgggggttggtcaaaggtcctgggaaactggaggcccccaatcctgctgccaggtctgtggggcacagcgtcccccaggagatctgccatgcttagtactgatgacctcagcaagctggctgaatgcccatgtaatcacctctggggcaatccctttaagttacatattttgaaaacgttttccgcctgaaacgttaggcaatgaggaaggggaaggaaagggtggtcaagaggggaagcagccgtgggaaatgaaaaatacccctgacaaggagtgtaccccagacagggcgacctcacccccaccttgccatcgttttgttgagtggcccggggcaagtgcagggaagattaagggggaaagggtgattagatgggagcctgagttaaaatcaggggcagagctggtgcagggattttagcttgatggtgtccctggtgacctgctgtctggatagatgggctggatccatttcatgggctaggttaggttgtgtctggaagtgttcagccttcctggggagatgagcgcaggagctcctctgccacatgggagtgtggggaagggagtagataattcttatgtggcgatctgggaaggcttcttagtggaggggacatgtgggaagggccttggagggtgaataggagtctcaaaggcacttgacatggggcaaggagctgatgagaggaaagggttgcaggcggaccaatgtagtctatgctctgggcagtgggagagaccagtaggttggatagatgtctggaaaggaggcaaggagagcagaatggggtttgagacaggaaaggcctggaatgtcaggctaagtctaggattgacctctttcttaggtgctggggtgcctttaagaggcagatcactctgcagccaggtggagcacaggctgcagagggtgaagctggaggcagtgagggggcctgtgccatggtccaggggaggacatagaacgcctagaaactgggtgaatcatgatgtcatcctggagggggaggcatgtccccaattgactttgaagttggtgagagattcaacagcagagaggaggcaggagggcagctgggggttgttggggggacggggtccagcttggattaagggtctaccagggtgtttctcccacaaggctttcgttagccagtgggaagccagcaggccggggtgccaggaggtgggctcctgtggcagctctgcccaggagagtcccttgtttggctggaggactggagggtgctgggtaaatcgtttagcctttttgggccccatattgtccttatctgtaatatcagatgcaaaagcccttctctcttaccccactgaggacttcagggtatccaaggctgcaggggcatggctattttcagaaccccaaaccaggacccatggagaagtggcagtgggacagaaaacgtgaaattagcagcagttgtcccagagaatactaagtgtacgggacagggctggggaagcctgagagaggtggtgagtgctcagacgccggcatgtatggaatctggagccaggctgcgggttctgaccccagcacaccctttccttagaccagctcctggttcagggcgcacaacattatttttcctatagtatgaccggggcttgtcacttcctctctgtgagtcttggctttgttccgatagaggactccacgtgacgatgtatctcggtattagcagtgtctggcacacagccgtgctcaaatggcatgggttcgatgagtgacctctctgagcatcgtgggaaaggtgcggggcgaagtgagaagcaacagtctctggccagggaggaggccctgcagcccccctctcctctccccgcctcctcctccacttggcaggcccgtcacagtagccacatactgccacgtgtgcgtctggaggaaaggagaaacacaggcagaaacttaacatgaccagaaacagatgtcaagaacattatgggtgaggccagcgggtggccgcaggagccagagaggaaggagggatttccaggacacgagtcaagggtgcgtggggctaagctggcgtggctttggagcagctggccttcagacccaggaggacaggaggcggtggtgaccagcacctgggggctggggtcgtagcatacagtcaggtgggctgtggagttgcagcctggaggtggtggcattggcggcagaagtagggttgcttcacgggaggaaggagtcattggagagggctggctgtaggcgcgtggaggaaagaggtgaccctctgcaggtcagcagtagagtgggagggtggggcggttcctgcaggtggctggctgctcttcgcttctggtgggaaggaatggatgccacaaatgcagatgtatacaaaacaggccgtgctttagttctctgagtaaatttcactcccattaggcatttccatgggctgaagtcaaagaaatgtgattttggcagctgggattcctccccgccccccgatatttccctgcggctgcatctaagtgcccctccctgccagcagggaggagctggggcactccatgtccacgtttcctctgcgagtttggcaatgtcccatctgctctgggctccgggtcccactcccatacctcctgattcatgctcactcccacagcgcctcccgggtcctcatccctcttgggacacctgggtgcttcctgtacacaagttccttgcctctctgagggctgtctcacccagccctatctgcccggatacaccctggggccatttcttccctggggtctcagctgcctttctagggttttgcccaggaagagaagaatggctcctctgaagctcggatgtcccaaacctgttgggggtctgcctgggaaggaggagacaggatcactttggccaggaatcccaatcctaactcatctcttgtttcccctctgcacctccccaccccgtcacccagggatgacgctccttgagctcatctgagctcctctgagtgtcgggagagggctcaaggcaacctctcccaaagcttctggtggggctctccttgttctgaaacctaagaacgtgcagaagtctccctttccccctctgctttttgcctcgtagtttctgtatttgttaagatgcttttgggtgcaaggtacacatattcaacccaaagcagcaagagagaaaagtaaccctaagtcccaggcagggcggctcagggtccgtcaattcagcagctgagcagctcagcagctcgctaaggacctgggtctgccccatatctccattctcagcacaacagatttgcccttaggccaatgatgtatgatctggctctgtgtccccacccaaatctcatcttgaattgtaatccaaattgcaatccccacatgttggggaaggcacctggtgagaggcgattagatcatgaaggcggttaccctcatgcttttctcgtgatagtgagtgagttctcacgagttttgatggttgtataagggacccttcccccttcactctgcacttcgctctcctgccagcatgtgaaggtgccttgcttccccttcgccttccaccacgattgtaagtttcctgaggcctccccagccatgtggaaccgtgagtcaattaaacctctttcctttctaaattatccagcctcaggcagttcttcatagcagtgtgagaacgaactaatacagccagcttccctcagggccacaggatggcagtctcaagatggtggccatgagatttctgttctgggtccaggtgtcatatctgggtatcacccgccaggtcccaatctgttctgccagtgtgcagccaatcgctgtgacttgggatttgcaaaagagaaaagattgattcacaagcctgccaagcaaggaggtgggagaacagcgttcaaatctgcctccccaaagacaaggtttagggatatgaatgggttagagaagtggggtgatctaaggtgtggggacaggtgattggcagtggggaagaatgacgtaaccggtttgttctgtacaagcatagttggggttcatggcatttcataggacacatacagaaaacagatgcattggcctgatctgagcgtggtgcttttggtcctccaatatcaaatggccatctcttgggcacatatacggttccccagctgaagggtctcaactggtttcagctggcccaattcctgaaaaacaaccgaagccaccattaccatggtgacctatgaatgttatctctaaagtagccagtgaaggttgtttcagcattcagtggcaaggctttcagctcccttggccttcagcttcatggaaaaaagtctcaaaacccagcgacgaacccttccgtttcatggatgtggcaagggtgggtgaaagagaatcagagattcttctgtccaaaagcctcttctcgcttctcattggccacagctggtcacataaccatacctaacccaacctcggggaagtgagatttacccctgaaccctgaggggctgggctggagccc

SEQ ID NO: 9303 - DNA, 6000 bp, Homo sapiens
gaaagaactgttaagtagataatggggtttcctgtttgatgatagaaatgttttaataatataattttgaataatgtaattttgtattatgtgaaacataccttaaaaaattaaaataaaatcaaatatgaataaaactgattagatttcagaataaaaagttattcatgtatgtatctattcaaaacattttttattcatatcatagaataaataatactttcatttggtatgtctgtaaatatctgacatgttaattatgtaagattttaaaagcaagtgacctacttataaggagatcccaaagagtgggagatttaaaaatgtaataataacaagaaagtgttttaagtaaagtaaatttgtatgtatgtctaagcagaaaattttattatttggttccaagagccaaatatctatttaaaaaatatttcttaaggaataatctctgtgtcctgcaacgtaaagttatcattataaaacaggagtcaaatttgtgaattaatcttagaattgaataaaatatttcttctctttgaaaaataatcatgccccatttacagtaagaatttttatatgttcatgcttgagaggtggtatattaaaattctaatgccttggctttaagtgttgaatatgtgtggaataaaaaaataatgattttgatatttcttatactgtaggaggcagttctctcatactggaaagaggtgtcattgttagaagcttgtcttggtttaacatagtttaagttttgggggtgtattttgtttagttcaaaattttccatattagcagtaagtaacaaaaatgtccagatcagaaaactctttgtgaaaataaaacaggtgctcctaccagatgtggttcatcaattttgacagaattttcatttaaaaaaggcaaaattaaaatttgtttaattgtttgctttctggggaattttcttgttgctctgtctgaaggaagtacagacttcttttgtgatgggaggggatgaatggctactagacagcagcaaaagatgggccatgggtgcgaagagaagagggagttaatgggagaatcagaaaaatatcaccttaaatgtaggacaatcgaagtcaaattgtggctgagcgttttggggaactaagatgtgtgactctgtagggaggaagaatgccttggtgttttcaagggaagatgactcagctagtgcagtcacctgactccaaactgcaagcctactttagtcataaaaaggcaagaaaataagcaattttacctgcaaagcaaaggacgtagtgttgaaaacgagaccagaaatggtgctgttaaagaggtgaacaaaagcatttactttttgaacgagtttcaaaactgtgagggtggcaaataggcaaggtaagtaggagcagccctcgaccatctcagatcagcttcttcagcctaccttgacctctgcctgtctcagctggggatcttaacataaatctctggatatcaggggtggcttttcccgagtcttgagcctagaaactccctctcttgattctgattttcagagaagagaagcagctgcttagcatttgggtgggacagtggttgttactaatatattacaaatttcagcatgtttttaaacatcagaaggagaaagtgcttcgtatttaagtgaaatctcaaaggggcagaaatctaccatattttttgttattcagatgcagtgatgcactggctatgtgagtacaagaaacaagttcacttaatcacaaacacatgcctaaattccattgttcagtgacttcactttcactttctaccttgaattttagactctggaagacccatttctaaactctgtggcccttttcatatgtgcatattttcataagtgttttccagaaataaattatagaggtccttctgtgagtccaaaggagaaggaagtggttggggcagccagaaaggtgcaatctgcattaatatcatattcgatgtatggattgctggggagagagtgggatatatttcttataatgttggatgtatttttcccctatcctgaggcccagaaactctgatgtctctgcagttgtctttccatgctttcctttatacccctcgcctacttctgtaatttctctctctactctccctcctccttcccaccctttttctttccatttgtgctctctccctccattccttctttttcccttttctttctttttgtgggtatctggtagctgcaacttattttctttctgcttttcttactcacttactctatttactaggtatttaacaattgtctttaaaagtaacatcctttctttcttaaaattttatccctaatggacattatttggggaaaaacatttttatggtgcctctagataagtaattatatcatctgcacatgattcccgtattttcttacatgcccgttcctcgtaggtggaaatgggtacttcattgtactcttctctctttatttacaagagtgttttttctgtctcatccctttaaataacacattgtctctctttttgtgacattgaattaattaggtcagatgcgatttttctcatctattcatttgaagactgtttcatattgcttctagggcctatttgcaagcaacaaattattttgttgttgttgttgttttgttttgttttttaatttttggaccatttgtctcatcactccaacaagcaagaattagttctcatcattaagatcccttcaagatttcattcacttgtttcagcagccttgaattatcatcacctggacctgttgttacatcaagaatctctcatttctaatgttctactttggacactgttacctgtgagtttgtttacattaaaaaaaaaaaaccttttagtacttgagtaccctaaagtttcatattttgaattggtgtcagatttattattattgatctctccattgctggagaaaactaagcaataggtaaactctattcttttggtaatttgtattttctgaatgtttcacagtaaatgtttactagtcttgtgatgctgcaaattggcaatcagatatattttaaagtgacaaggttgccctgttcatcaccagttctgtacatcacgcagatcaaaagtaaggtgtttaagtttattttaaatgtttttcccaaaaattctgcttccaccacttttccaagctctaccagatggatactcaagaattgaccaaggcaatctcttctctcatatttcactgtcaaatactcttaatcagtgagtcctgtcaattctgtgtttctaagaaatgatgatggtggtcatgattataatgatgtcaataggaacacctttccaaacttcactgtgtaccacgaactcttcttcctgctgccgatgtattattttctctacactgctatctccccaggaagattctaatgatgttatcattgtacagatgtggaaactgtagcttatgaggttttaattttgcaattcaaggaaatgacaggattctggcagtgtggtagctcatgcttgtaatcccaacactggaaggctgaggcaggtggatcactttagctcatgagtttgagaccaggaagatggtcaaaccccatctcctcaaaaaacacaaaaattagtgtacatggtggcatgcacctgtggtcccagctacttgggaggctaaggcaggaggatcatttgagtcctggaggttgaggcttcagtgagtctaggtcacgccactgcactccaacctgggtgacaagggcagatcatgtcttaaaaaataaacaaataaatacccaccacaaccaaaagcaaaggaagcaagcataataagctagttaatatgcttgttagcaatgtggacatttattttatagttaaaagaaaaaaatagaagtgacagtattgtaactcagaaagtctggttccagagtttgtactgctaaccagaacaacttgagcatcagttgatattttccattttttttgctctactttgtctgatattaatatagccattccagcagtcttatcactagggttagtagtgcacagctttattccatctcttccgtagtaattgtgtctttatgtcaagtatgggtttccaggagacaacatataactggattttactatttttatttctcttataggctttaccttttagttgtggtatataagccatttacagttaatgtgctgattgatgtagctttctgttttctccatgtgttacttgttccattttctcttatctgtcttcttttctattatttatttatttttttaatttcctattatggcctttgttggtttcttagctgttactgttactttagttcttgctttgaggtttgtagtgtacatctcaaatttaccacaacctaccttgaagaggtattacacttctctatggacaatgttaaaacactaaaataacatgtaccattatcccctctcagcctctgtgctacatgcatttttaaaattatataaccacaatattttattatttcaacagtcaattgcatttttcaaagatttgattaaagaaaaaagtctaaaattaacatacaaaattgccattttcagtttttgtcattttataagatctattatatctttgtggcacctatcacagccatttgataaattaatttgtagatacagtaagaatgtcatgtatttattaaagtttttaatagtgattttaaaatttcttattaggtggcaaaaaataataaaaataaatgcccagaacgagtatgttataaaactaaactgtaactccatgtaacagctatagcatagtttgtttgaactgaaattcacataaaataatcatattgaagtccaaaaaatttaaagatgtagtgtaaattcaatttatatgaaattgaagcacgaggtttcctagatacctgctgcctacagagttagaatctaattcttctgattattcttgtaacaaaatcttttgaaattctaaattctgatgcagaacgtatcagtgaaactccctcccactgtctcttgtattagcatcaaggaagcgagaaaaaataaggtaaaaaaaaattctgctgtgtttatttttttaccttcgaaatcttgctgagtattactgttcaacaaatgaaaaaaaaaattctcatcagttgtacctgtttattgccaatatacctggaaagcaaattcactttgtgtacaaagttgcagctgtttccaggtacttgaaacacagtaaccaataaaaatactccttataattaggctcctgatttttgagatgctttgtttatcttctatagtactcttaagataatctgttagaattattttaagtattctttctattgatatttttcttaagtttggctgtactgtcataatagagctttctagaaggaaagcaagtaaagttgcttaacagctttgatatatacattttttcagttaaggtcaatgctatcatagaaaattacattttatttttaaattgtgggttgaaagtctgatttgtgactcttaaacatgaagatattgcttaatattattagtcttaaatttgagcatcagataacatcagagttgaagacttaactctaacatctttgtataatatttccatttacttgaaatctatgtcagtcatatatcttgtttgtcttagtcataattgttttatggatgataatagtttgtgttttagttttcaaatgggaaaaagggtattctatcacaaaagaggggtattcatgaaggagttataacttacaagagatcgtgaaacagtcatcctatttctagcatctgttaggtttgctttctcatctataactgtgcatgacatttcaggggtaacatcaaatcttttttaaaaaatgaatatattatttacctgtcatcacaattatttcctgattactctgtcatttcttagatattatgcaactgtttttttgttaagtaagcatagtaagtgattgaatgaaag

SEQ ID NO: 9304 - DNA, 6000 bp, Homo sapiens
cccaagagccatttctcaggatgtcccacccgggcccccatcccagcactctgggctccctctccaccatgagtttcttggtgggaaaaatagggtggctccttgaggcctgttggcagagtacacagtggcaggctgctgagaacccctagaaggctttatggaggcctcagcctctcagctgagcctggagagctggacagagtctgcaggggcgagttccctgtatgattatgggccgtgtgtgtgatgggggcgcagtggtgaggcctggtgcccagaggccaggggaggatgcactgggccacaggaggaccccagaggccagggtaggttcctccccactgggcagtgggagccaggctggtgggggatggctctggacactgtcggaggtggtgggagggttggggtggaggcctgaaattaaaccacgtggaagggggctgtgagaacatgaggaggcaggtggacttggggaagagcgcaaggagggccagtccaggctctcactagaccctacttctccaaggggactgaggttggggtcttcccgaggtagagaagtgaccataggtagactgtggacagtgatcatcgatgttgctggcagtggagctcctctgctctgacattctctgtgtccagcacctgcttcaggccccgccctgggggagtgggagtcgcatgacagtcctagccttgggtttgactttggccccatccacttagaggccatgggagaggtaattctgaaagcgcttgtcctttgtggttgcctgtcgtatcctacttgccagtgtcaacttctaatgcaggggtgtcgtcccttgggacaggctgggacggggacaacaagatgtggtcaagaccacacaagactgtgggacatgctcaggctggagtgtggctgggccatccagcagagcctcctatttctcccgggctagagaatgaccacagggtgcggcgaccccggcactgttgaaagctgggtgctggctggacacagggggcctctgatggacagagcacaatgaacgagttgcccagcagggtagggagctcaggagtggctgagaggctggccacctgccctctgcagcctcccacaacccccactggcagccttgtggggctggagaggtctgcccagaccctcagtcccaactgcagataaagcctgcgctcctctacaggggtacctcggcatgcttcttggtcctgtcctctccctgccctttcccgaccccagcaccgcacttgggggcgtcccttctgaggcagcggcttcctcactcacctttcagctctggcccctgcccctccaggtctctcccagccccagcccaagccccagccccagcctgggcctgaggtcatggtctggactgggcacgttgggatgtgttttcccaagcaaacgaggaatcattgcacaatctgagtgggaaaccagtggaggggagcccaggactagtcagttgaggcaaagacattcactttggcatctgcattaatatagtgatttattgctcctttagcaatgtcggttatgaagttcaaggggagagagaagaaattgatgaaaacagcggctcatccgggaccgtcttccttctctggtttgtgccttgacttcttcagagcttgggcctgaaggcgtgagctccatctcattcgccgctggcacactgggccacaaacggctcactaggtgcgcatctctggaggctgctggggggcccttcctctttctccctggtcgacggcttgctggggaagcctaggatgtccgactgcctggacatttgcattgccaacccctcaggttttgtctcaggctgtccctcgggctgtgtctgttccccaggctccagcttggtggcagacctcttggcagagccaggttcaggggtccacaagagttcagttccctgggagctttccccctccttgttgaagaccatagagggcagtccctgtgccttgggctgcacccagcattggctgagggtgtcatggatgtgcagccgctggctgacgtcgggctgcagcatgcagtagatgaggtccttgcactcgtctgtcaggttcttggagtgtgggaagtccacgcggtgctccttctggatacgcagcatcttcctgatgttggagtcgtaaggcatggagctgcagaccatgatgtagaggatcatgcccaggctccagatgtcatacaccatgggctggtaggggatgccctgcagcagctcgggggctgcatatgccaccaacccgcagaagttcttgcttaatctctgttggccactgtcatcccgcaggcagagcttggagaacctgaagtagaacagcttgatgttgaagtccttgtcgaggagaaggttctaacacttgaggttctggtgcatgatgtccaggtcgtggcagtatttaatggctgaggagagttggtggaacatcttgcacgccatgtccttgggcagggctccctggcactcaatgaactagttttttttctgcccctggctgggctcccagggcagatctggggctgggggctaaaggcggggactggatgccaccctgagcactggtggctgctctgaggacagtacaagcagcaggggcagcactggagagtgtggccattgttttttctggcagtggagcccctctgctgtgccaggctctgtgtccagcacttgttccgggctatgccctaggggagtaggagtcacatgactatcctagccttggatttgactttggcctcatccacctagagggagtgagcacccctttctcacaggagccaagtggaaccctgggcccctcaggatgacttggtagggcgggctggttgtcactcatgttgggttgggtccccacctgccgtggcccttcccccttttctctgctccttcaccttcttccctaacgctgactgcccactgccaggcctttgtgcattcttggttctcctccttccagacagcctccttctccttcccgctggggacaccccaactactgtctcctggaaaccaaaaataaaactctaaccccccagccatctgaatggacccctcctctccaccaagggcattccaaacttaacctgaaaaactatttcaggccgtgataggaagtgggagtcaggcctcattatccctcctcccttcaggtttcaggcacagctaagcagtgtaacatcgacacagagacttgaagactgacaacagactctgtggcagtaagataccagcatgacagcaggcccggaaggaaacacatattttactgcaaaacaggtttctttcacatattttgaagtcgctctgcaaagctgttttttgtggggaaaatctacattctgtagagaatccctatccctttcaaggtcttttctcctgagagaattaactagagtctggcaccttttatttatttttccttttttttttccttttttttttttttttttttgagacagagtcttactctgttgcccaggctggagtgcagtggcatgatcttggctcactgcaacctctgcctccccggttcaagcgattctcctgccatcagcctcctgagtagctgggattacaggcgtgtgccaccacgcctgggtaacttttgtatttttagtagagatgtggtttcaccatgttggccaggctgatcttgaactcctgacctcaggtgatccgcccgccttggcctcccaaagtgctgggatgacaggcgtgagccaccacacccggcagagtctggcactttttaataagaaacattaacagtcttttctctgtgaagcctgatacctggaggcttcatttgcctaagaaacttggtctccacaaccccttaatgtagacagtcccttttattgattccaggtctttagataaactctttgaaccaactgccaatccgcatgacctagaagcccccctccaccccccactttcaagttgtcccgccttttccgactgaaccaatgtatatcttacatgtgctgattgatgtcttgtctccctaaaatgtataaaaccaagctgtggccctacccccttgggcacttgtcaggatctcctggggctgtgtcccaggctattggtcacatattggctcagaagaaatgtcttcaaatattttacagagttggactcttcgccgacactgccctccaaggttcaccctgttggtgatgacgggagaagtggcacttggagcactgttcgcaggggcgctgagcctcctctctgcctagctttctttcctgcacatgtggccttcccctagccattgtgtaggcaggtcctccagggagccggcttcgctgcagtctccaggacctggccttcccggtctctctttgcctgacactctcttaggccattcctgttcctctttccccaccctcagaaccggcaggccctccctcctccacagcggttcggccttaaaaagacccctttggggcgcacttttgggctgctcacgggacctgagcttgcaggtgtgaagacccttggagtcccagccaggttcccacttcgttctctccgctccccacccgcgcgacccctcggcgccccgccccatgccccgcgcctttcgatgtccatccttgccgtcccgcgcccgccgtccctaaccggcgtccagagaccctactcccttcggtggccccgccgctcaggccccggccccggccctgcctctctgcttaaccaatggcacgcctcactccgtatggtcccgcccttcccttagagcccgcccctcagtccccgcccttaggtccccgccctccgccgtcgcgaccttaggcctcaccctcttcggagggctttggctctggccccgccccccatcttgacggtcattggcccgcgcctgcgtcgcgggcgggaggcggggcggggcggcgcggcgcggagccgagcaggacggccgccatcttgcgcgcagctggagtcggtgcctgaggttgcagccgagagtgtgcgccagcccgcggcccagccgaagctctttcccgccgcctctccgcgcctcgcccaggttcagctccgcctgaccctccgcttggcacggtcccctgaccctcagtccggcctggtccggccttccagccgccccggggacgatgaacggaggataaatggtgcccaaggcagacagcggcgccttcctgctgctcttcctgctcgtgctcactgtcaccgagccgctgcggccaggtgcgccgcgcgatgggggcggtgtgggggctgggcggcgagcggggccggggtcgccccgggacctcctttcacccgcggcgccctcctgcaggggccgcgcctggggcaggggcgggcggggcctggctcgcgggccgcctggcactctctgcggacgcctgctggagcttacctgggctcgcggcgcctcggacttcgtgcagctctgctgtccaggatgttgcctctgggcccttcccgggagcggcggcggccaggagctacgccacgggcgcaccctctcgccagtccagcgtcggagtcgggctggggacagtggctctcaggggcacctggtttcacagacgtcctcccagcagtggcctagtgccagcctctcagtcctggaaactcctcgcctggacagcggtggttgtggctgtcattcagtgagacgttgcgctaaggaagtcctcaggtcccaccgggcctagaggaggcaccaggagtcagcctagcgttgtgtggccggcgcgagcgtcccgggagcagagacctcgccactgtgcggggcccttagccgtgctgcgtgtatgtgatgaatgagtccgtgctttggaactcccctcggagctagtgtgttcttaagtctgtggtggggaatcagaaccgtggcaaccaggagacccttttctacctatttcggtgtacctccccttgaactgcaccaaaaaatcaaactccctaaatgcagggccga

SEQ ID NO: 9305 - DNA, 6000 bp, Homo sapiens
tgagctggcctggaggcacaacctcgtggacttggccatgccctacttcatccaggtgatgagggagtacctgagcaaggtaggtgccgggccggctgcagctccccggcccctgtgtggcatgacccaaccctggcagtgactctggccgcaggtcttaagggtgggcccctttgaggccaacccagattccccagccagccctggctgccttcaggagtggctgctttccttcatgctgaagtggttttctgcccaacgttaagcccctccagaaaatcatcatggggagtgcccactggcagcagccctcctgtagactctggctgggcagctgtcccaatgtgcacactgctaggagcacaacaggcgtgctcatccccagccctggacttcaacaaggtgacagtgaggtggctggcaatcccagctccctgaggagctcccagtggcgtctgggggtgcagctgttagcatacggttggtggtagctgccttttgctgaacacatagtaggagtattcacagatccactgaatccttctaacagctatagggaggatgactctctgcctcatcgaagtgacagtacttgattgtaaaactctccctgggtgttgaagtcctaggagtccctgctgggatctagctttagccactgtccagagacctgtgtcagcagtgtcatctggtacagtttgttgtttctaacactggaaaagctacttccagtagcatctacttgcctatctaacctccttcaagccagatggagagcctcggaaggcactcatgctgaagcatcactcagtggagcgagggaagggaggggcctcccaggtgagtgggaggtaggaaggaaacaggaaggcgggctcatgctgccagctttagcctggagggctgcctgccgcctgcagagcctccagggggctgcccagcccctgataaaggccatcccagagtccattcaaggccgttgccctcctgtaggacagtgtgaccccatcccatctgcatagcatgcctgagtgagactccctgatgactctcaagggttggggaggaagggacagccctggctacgtggcctgagattcgtgggctgccaggggacatggactggttggattgacaagggccctggttcccccaccacagtggatggcaactccctacaggcggcacgtgtggtatgtggtttgtggtatgcagtgtgtggtgtgcggtgtctggtgcgtgcctgtggaagctgctgtcaccatgatgagcaggttttcccatccctcgggtgtctttcctgaaagtagtctgtgttctgagaaccagcacaaggaaagaaagtgcttgaatctcttcctggcagtagaggcccgtgggttagtgtcagaggaactcaggctcaccaggccctagggagtgtcattgctgtgggggtcaaagtgcttgtggggatcccccaggactttgaggcgcacattccctttctgttgcggatgatggagttagcagccactatcacgttggtccacactgtggctgcacagccttggcccagggttcccagactccactggccctgggaggtggtggctgctggagcaccttctctgctgccacccacctattcctgctggggcagatgagacgcctgtcatggggagagttcaaggagaggagggggctggcaaggggtttcccagtcagtggcatgggggtgtgagctgattgtcagcttgagctggtgctcagctgacaccacacagcagtgctgggagaatgagggcgcggacaagaagcacagtcctttcctggtggacagctgggcctggggcctcgtggctcatctgggaagcttgagggccatccctctgagacgcccccagcgctctcccattgtagggagggtacaggcctagctcagccctcaccctaggtgtcagcaagtgtgccccctgcttcctcctcatttctcagccccccccagaccccagctcatggggggcacattcttatttctctttcttactcagtgtgtttgtgaggggatcctagctgcacagttgctgccgcccctctagtgcagtgctgccgcctcgctctctggcagtgggtggggtcagtgcctggtgaagcctcagggaagagtgaggaggcagtttgtcctcagtgcttctcaggtgaagtgtctaggtgccaggtgacttgtctctgagagccacatgatctctctgctggtttggaggggcgggcaaactagactggccagagccagaagcagacagtgttccctgcacatggccccagccctgcaggtcggtaagtggcagtgtccctgtatccagaggaggacttggccccccataagcaggccacatgcacagcctgtaacaactgactgccccagtgcccactgggaagctctgggggccccacctggcgttccatctcagcccagctaccgaggcttcacctctccatgccttgctgcattctaaaagtgcatggggtgtgggctgagccactccacatctgcccatgtgcacctcctccactgtcattctcctggaggccctgtgtcctgaccttccactccactttcacctagaggccggactgcactctgtcaagcgggtgctcacgtgcttttgcctccttgcaggtggacaaactggatgccttggagagtctgcgcaagcaagaggagcatgtgacagagcctgcccctctcgtgtttggtaggtggcacctgtagcccccaaccccctggggagggagcagggagggagtcaaagtcccactgcccttacctggctgggctttggatggggatgggaatagatgggtgggggctggaaggatcccagtggctactgggtgtggagaagtgtacgcccaggaatgttggcacggccgctgtcctccctgctgtaaggatgcctgccttctgataggggtgcctgcctagctgtgaactactgctgtgtcctgctgggcctggcccctggacagcaaggctgctgctggtgtgtgctgggaggggctttgcacctgagaacctgcccagggcagcctggctgtcgagcagactggagaggctgtggggtgcttggacactgtggggcaaacacaggcctgagggtgtggtgtgagtgtgcagcacgccggcgggtctccagcgtccggctgagtgtgtccttccaccattaatgtcattctggtttttttagattttgatgggcatgaatgagacccagctgattgcactaagtaagtgtcccatttggagactagcttatcctctagccaggccaggttctctggctgaccccacgctccttgcctctggatgcctgctctcttggggcctcagcgtctgggtggtaagggctggtcctatagaccctgctccctgggccccgggctactcaggggcagccaggagaggacccccatgggcaggaagagctctgctcattgtgggcttccccctctgcaggccctgccgtgggcccagcccctgccagcttcccctatggatatgcctctgctcccaacttcgccagcctccaatgtacaacttccgcgtgtagtgggcgttgtcaccacccaccctacctgcagagttactaacttctccaaggagcatgtcactccagcagcacaggggacgcaatgggaggcagggacacctggacaatatttatttttgctgaaacccaatgacggcaacctctgagccatcccagagcctggggaggccagggtagaggctgacggcgcaagaccagctttagccgacaacagagactggactgtgggccctcctgctggagccaggccttcctcctgggcgcctccgactggctggagctgccccctccaggccagtttgaagactacatgaacacgtcttgtttggaggtaccggacctcataaaaggactctcagcctcttggcaatcataaatattaaagtcggtttatccaggcaaaggtgctctgcttggtgctggtatgggtaggagggacgggccagtttcctaggccccgcagtccattaaagatttgctgggtcctctttggggtgtgggacctccgttgcccagacaagctgcctaggagaatacagccgcttgcatttgtggtctttcctgaccttgttcgctgagcgcagaaactacaaccgggaaaggtgtgggtgggaaccggcaggtgaggcccggcccgtggctgctgcgggaggggggcccggcggcgtagccccttctcaccggcctcccgcctcccgcctccaggtttgaaacgttagagttcctctgggactgggctagccccacgtgttttcggggagggtgtgcccctggcctccgggatccctggggatcccgccgctctcgacagtcgcgcagacccgaggcccgctatcccgcggcgcggcacacagtgcaccttgacccactgctcggagctgggccacggctccgcctcccgcagccccgcccccgtcccgccgctcgcggtcgcccagggactcggcctcggccattggctgcgctttggccccgcccctacgcctgcctcggcgcgccccgcccaggcctcagtttcccggcccgcacggggcgggctgggggcggggcctggctcggaccacgcggggcgggacctggagctgacgcggccgccccgcccctgggaccataaccggccgccgccgccaccgcggaccgagcgcggagttctggagtctcggacccgaagccgccacagggcgccccgcctcccgcccgccatgcccgcgccccgcgccccgcgcgctctggcggccgccgcgcccgcgtccgggaaggccaagctgacgcacccggggaaggcgatcctggcaggtgggcccctccgggacgcggacccctctcccgccgcgcttctgggtgggcccgggacgctgaggccccgccccacttccgggttgggccgtgggctggggagtcgtggaggcgcggtcctggtccccacccggcgcgctgggactcgcccgcctcccgtctgtcaccccctgcgcctcgccgggacaacggggtgagggcatgggggcgtggggccccagcctatgttccccgcggcactggcgcggcggccgcgccgaccgaagtccgggacgggggaggggcccgagcgccagcggccgggcgggagtctcaggagcgggttcccggtccctgcaggcggcctggcgggtggcatcgagatctgcatcaccttccccaccgagtacgtgaagacgcagctgcagctggacgagcgctcgcacccgccgcggtaccggggcatcggtgaggagggggaggccgcggcgccgcggggggcgggtacccagggcggcggcaccgagggccgtggggtcctgaccgccccctcccccaggggactgcgtgcggcagacggttcgcagccatggcgtcctgggcctgtaccgcggccttagctccctgctctacggttccatccccaaggcggccgtcaggtgaggcccggccggtggctgctgcgggaggggggctcggccgcggcagcccctctcacccgcctcccgcctccaggtttggaatgttcgagttcctcagcaaccacatgcgggatgcccagggacggctggacagcacgcgtgggctgctgtgcggcctgggcgctggcgtggccgaggccgtggtggtcgtgtgccccatggagaccatcaaggtggggaaggtcctggcgaggaccccggacacgcagggagtacggagacgggcggccccgctggcccggtgctcccggggcaaccggcaagctggggagggtctcctggacgccagggaaggccggcggggtgaccgcggggccctggggcaggacgcctgccacgaagggccacccgtggaggctgagtctatgctaaaggcagccttaaagtctttaaaaaatacttttataaagcagaaaacaaaatgacacctt

SEQ ID NO: 9306 - DNA, 6000 bp, Homo sapiens
ggaggatcccttgaacccggaggctgaggctgcagtgaaccatgtttgtgccgctgcactgcagcctcgatgacaaagtgaaacccggtctaaaaagaaaaaagaaaaagaattttaggttacagggatttttttcttgcagtactttaaagatattgctacactatcttcttgcttgcactgtttccaacaagaaatctccttcttcttgattcctctgcacacaatgtgtctttttcctctccatgcttttttttgttttgttttttagacggagtctcactctgttgcccaggttggagtgcagtgacacaatctcggctcactccaagctccgcctcctgggttcacgccattctcctgcctcagcctcctgagtaggtgggattacaggcgcctgccaccaagcccccggctgattttttgtgtttttagtagagacggggtttctccatgttggtcaggctggtctcgaactcctgacctgaggtgatccgcccgcctcggcctcccaaagtgctgggattacaggcctgagccactgcgcccggcctttcctctccatgcttttaagactttctctttagcaccagttttacgaaatttggtttatgatgtactttggtggacttttttttttttttgagatggagtcttgctgtgttgcccaggatggagtgcaatggcatgatctcggctcactgcaacctctgcctcccaggttcaagggattctcccacctcagctacccgagtaacggattacaggtgcgtgccaccacgcccagctaattttagtatttttagtagagacggggtttcaccgtgttggacaggctggtctcaaactcctgacctcaagtgatccgcccacctcggcctcctgaatggaattacaggcgtgagccactgcgcttggcctggcttgccattctatagaacccttgacccttcgtggatcacaccagagctccctgccccccactccctcacccgctggggaagttaaagccacagtgacctccaattctgactaacagccagcgatgactaccctgaggggtgcggctgaggttggatgagctgtgaaggccctgggagcctgggtggatggcactcaggaaaggcagaagagaaccgggactggcatcggcctcccctgcagcctcgcagcctccaccattggggggcttcgttaccagtgaggaactaaggcagagaggccacctcactagtccagaaagtttcttgcttgcgggagcgaatctgactccatgcctgtgtttaaccacaaagagtaacaacaatgcccgcaaaaccgccgagtctggcactgtccactctggatgctgctcacatcgtcacagccgcccaggggccccacacagggtgcctcgggcacctggtgcagtggtcagggatgcaggaggaccccagctgctgctctcggcctgcaggagtactggcttgtgtcaagaaagagcaccaggccacactgtgcttggaggctctgcaaacatttgcggaaatagaaggacacatccttaactgtttcaaaactgaaagatagaagaaacgctgttcttcacttcccctgaaatcaaatctgttaactaggagtttcccaaacccaaatccccaggaatcttgagcctaaatttagcttatccttggaaggtcacgggattaccctggggcagggtcagccagcagctgctcaagataaacttggcttttctgcagactcaggctcttctcacacacaattaatgagatcctgccattcttcccctgggaaagcagaacaatggctgggggtgagcaggtggccttggccagtgctctgccccaagggccctttaccagagatcaggggtttgtgtccctgcctaaccaggacacctccgatctccacctgcaggccctggaccactgtggcactgtggacacaaggccgcttctgccccttggacgccgagccccttcccacctctgggatcttgcactggctattgcttctgctctgcctggaacttcttccccggatccctgtgaaatgtcacctcttcagagaggccttcaccactgtctttcctgcccagttcttggttgataggttcctgtcagctccttctgggcaggagcttcttgtgctgtgtgctctgcctagagacagtgcttgccacgaagtaggtgagcagaccctccatgagtggcaggaaaggtgggtgcaccctcatgcccctccggagtctggcctgggctactcagaggccagcctccatctgaggtgggtttgtctggggtggcgtcagcccctgcggccctctctgggcctctctgcattggcattgttccactgcagcctggggcctcgaccaacatagtggggtcagggtagaaaccagattgtgaaaggtgaagcctgagactcctctgccacgtccctgagatgctgtgaggctgccgccaaagaaacatgagcttgctggggccaccctagggtgacagctaggagagaagaaaaacaggcagccaggtgagaagggagagccttgggctggctgcagctccaagctggctagagggcaacaggcagcctcctgtgcaggacagacgcatgaagacagccaccctgtggaggttattcctggatactaggtgggaaagtcggcaagcaaaaggacaggtccagctcaagcttctaaaagcaatgctgggggacggtgcagcaaggtgttcctggaaatgacctcggcaacacatcttagaagatgagcaggacccaacctgacagatacacgctgcgggcagaagaggccaaggtaagagacggcccatgtgaggcccataggcaggtaagtctcctggggcagagtgtgtgctcagggccgcaccaagactggtggctggactggccagtcctagcgcatgcaggtacacatcaatccagctgctctgggagtcggctcttcgtccatgggcaatgtgagccatggagggtcttaggtagggtgaggcccaggagaggggcctggtggggtgggtggcctagctgggcaagggcaggtccctgatgacctgaggaggccgcagcagtcatcccaggaagatggtggcatggaagggctgggagtagggggatctggggaagttccctgggcttgggttagggggtagtaagagtgagagggtgggtgggtcagctgtacccctggagtacacagaggaggagatgtccaggagggtctgtagaggaaggggcatggcccatgggtctgcagcaggaggaaggcagtgactaaagtgatagctgggagaaggcagtggtcctcagagccatacctggtggggagaggccacgtggggctgagcaaagagggtatgatttccttccagcctcagggctgggcacacttgccttcagaacctccccacactaggtgagccagacgctggccttatctcatttaccatctcagagccatctgaagggggagaagggaaccgggccccaggagggagaaagtcatcaaacctcccacatctgtgaccagcctcagtgccatactttttctatggagggccctgtccaatggaactgagcacagaccagataaaagaactgggcacccagtggcctcagtccagggcctggagttcaaactttactggaaacaaaggggccgagagagactggggaaagaactactagaaaggggctggtgcccccatggggctgtgggttttggagccgcgtgcccccacctgagcctcagggggcccggagtgtccacaccagtggacctttcgagaaatggctgggccattgtgcagaagaatgcccggaaatcccgcgcctccctcctccagcaaggatgggggctcttcctcctggccaggaaactccaagttggcttccggagggtggcctgggggctggggtgccagggacaccatcgccactggtgggagggcagggcacagcccctccgtgtccctttgtctctcctgtctgaaggccagagcaggctgctaggcctggggccaccactgcccctgggtgctacacccagtgtgctgggtcactgggaacttcctgaagtggtgtcacctgaactgggcccccaaggatggggtgcgggcagtaccgcaggaagaggagcagcccctgtgaagattgagaggtctgggaagcccctgcggcttgggagagtgggggtcgccaggcagggggaaagcccctgtgccaccgctttttgccagagactcaggctccagagaggcagtgagtggcatggggggtgaggctggggccctgggcctgacctccacacgcctgcctggcctctctgtttgccatgggatgagagagacagtgctgggactcagagcggggctggagagtgagagtgcgagaaagggcctgggtggggcttggaccccggggcgggctttctggagagcccccctacgagggcctctacggcggtgacggggtggggggcttctgcaaaccttggtcagggaagtggagctggctcgagtggaagagaccacccggctcagtcggggatgtgggagtggactgggtggtgcagactgggggtcgagcgccttctgaagtgacggggccgggacgcgcagggaggcggcccaagaagcgcgccctaggccagcccagaatgcgctcggccgcgactaggacaacggcgggtggggctgggggcggctgccgggcggggagcggtcccgcgccctcagctacccctcaagagccgttgtttccctaacttcagctgccagaggctctgtgattggctgcggcacgatgacccgcgcacggattggctgcttcgggccggggggccgggcccgggggacagaatccgcccccgaaccttcaaagagggtaccccccggcaggagctggcagacccaggaggtgcgacagacccgcggggcaaacggactggggccaagagccgggagcgcgggcgcaaaggcaccagggcccgcccagggcgccgcgcagcacggccttgggggttctgcgggccttcgggtgcgcgtctcgcctctagccatggggtccgcagcgttggagatcctgggcctggtgctgtgcctggtgggctgggggggtctgatcctggcgtgcgggctgcccatgtggcaggtgaccgccttcctggaccacaacatcgtgacggcgcagaccacctggaaggggctgtggatgtcgtgcgtggtgcagagcaccgggcacatgcagtgcaaagtgtacgactcggtgctggctctgagcaccgaggtgcaggcggcgcgggcgctcaccgtgagcgccgtgctgctggcgttcgttgcgctcttcgtgaccctggcgggcgcgcagtgcaccacctgcgtggccccgggcccggccaaggcgcgtgtggccctcacgggaggcgtgctctacctgttttgcgggctgctggcgctcgtgccactctgctggttcgccaacattgtcgtccgcgagttttacgacccgtctgtgcccgtgtcgcagaagtacgagctgggcgcagcgctgtacatcggctgggcggccaccgcgctgctcatggtaggcggctgcctcttgtgctgcggcgcctgggtctgcaccggccgtcccgacctcagcttccccgtgaagtactcagcgccgcggcggcccacggccaccggcgactacgacaagaagaactacgtctgagggcgctgggcacggccgggcccctcctgccagccacgcctgcgaggcgttggataagcctggggagccccgcatggaccgcggcttccgccgggtagcgcggcgcgcaggctcctcggaacgtccggctctgcgccccgacgcggctcctggatccgctcctgcctgcgcccgcagctgaccttctcctgccactagcccggccctgcccttaacagacggaatgaagtttccttttctgtgcgcggcgctgtttcc

SEQ ID NO: 9307 - DNA, 6000 bp, Homo sapiens
gactggcttagggccgggtggcctagaggaagggctgggctggagcaaagccagagagaataggatcattctaggggagggcccaaaagacagcctcctgcagactcggccatccctgggtgagaaagcagcagcctggcccatggacaggatgtttcaacactggccctgtgccatccttccagggggcctgacctgtcagaatggtgggtaactgttgccaccttggtcagtgggcttgtgggggagctggcagcctcgtcccagtgggtgctgggctttattctagccttggctttgcaggtggcctgctacagctgcacgtctggacagtggtcatctgtctgcccactccctgctgggcacggtgagcctggcattgctgtgctggacaacaggatctatgtgttaggtggccgctcacacaaccgcggcagccgcacaggctacgtgcacatttacgatgtggagaaggactgctgggaggaagggccccagctggacaactccatctcaggcctggcggcctgtgtgctcaccctgccccgctccctgctccttgagccgccccgcgggacccctgaccgcagccaggccgacccggactttgcctctgaggtgatgagtgtgtctgactgggaggagtttgacaactccagtgaggactaggctccctgtgcctggcatcagagggaagggaggctggggctgcagggcagtgaaacccacgcagcctaggccagagcactttactccaggcagggcccctgcccctgttggccacagcttatgggccctgccctctttcttcacaccagccccttggccagcctgccgcaggcatctcagggccatgcagatcccaggctgtggattacgtcactgcaggaactgcttctgaaaggctttggccttcctcagtgagccctggaggggttggccttctctcctccctgcctagatcagtccttctccaaaaggacctgggagctggcagcctgggcaggggggctgaggcacgtggtagccctctttctgtgaatggggtggggctgtgggggcagctggggttggaggatgagagctcctgaggggcagaggagcagagatgcatcagctcgcctgggactggctctgtgataaaaagacccctcccgctgggttttcagaccccatgttgttggtcaatgaaataaagcatcttacagaaggtgttaactgtttttctgtagccacagcctcagttcctttccacagtgcacccaagctgcgtccccaggaagcgtggcttctggggtcagagctgccatctgggagaggctgtggaagcccaggccagaagccaagtggcactgggaagaccctgcctgagagggaagcacagtaaactccacaagctaacagggcactcagtgggaaagctggaactcgccctggtctggtgacaggtggttgtgcagccacttgagtgtcttctctggtgtggaacttgtctcccaaccagggcagcacgcagagtttcagcccagctcgttaggagtctctcagcctgagggtcagggaaccagagcttcagcacctgggagcggggcagcatcagggggtcggtggggggggcccctctggcctgtgcccggctcctcccaacctcctgaagctgagtgtgctggggaggggagctgcatgtgctacaggtttgccaggtaacccttaggcacccagtctcaaggaccacactggcacagcagctgggaccctcccctgttcacctgtccccatgcttttcttgccctcttgagactgccaggcttagcctgcaccctgcatggatgggctgtgagcccacaccagcctcactgcagggctgcaccacacgaagctttcttccatcctgatgccctcatagggtctgcacctgcagactcctactatgagccttgtgcccagagccatcccgcagacagggctgtaacttgccaaggccccatcctttcccagttgactgggcagagcatggggacagccatgtgttcctgctggcatcctgtcccggaagagaagggggcagtgtgtgctccttgatgggaggagaggggatggggacgggggactatcagtcactctgggctctcctaaatggataccccaaggattcttgagggtagagacaaagccctcagagttggcctgtgcccccagggctgtggtatgtgggtgtgtgtgtaacctgaagaccttcctcactgtcctgggccctgagtacccctgaggaaacatgacattgccttggggtggcagacccagtgttgagccctagtggggcgggatggctatacactccagtgtcatctccctttctcctgagggtgaggcgcaagagcatgggttcagagtaggaaccccactctgtgggtctcagacccagcacttcctgtgtctctgctaccacctggcaggccagggcaatagctcctgcagacctcagaggtttctggaaaggaggagcaccagacatgccccaccactctccagtgcgtcctgacaacatgctggctggcaacatctcacctgagccaccagccacagccacaggtttgcaggaggcctctggtctgcaggggcaggaagggctcactgaggtcctgcacagcctggggaggggtggagagtgccttggagttgggcgcagcctggccctgccactgtcagccttggggctaagctgggtttctaagggttacacctgataccccggagctgaggcagcccaacttgtgctctccagtgtggctaggctcttggtccctgctttcatgcaaaaccctcctcagccttcaaagtccacttccttctggcagccatcctggccaaaaccagcaggccagggctccgggctccagcagtttgcctgcgtggtggtcaattgtctgtgggttccttctacatcctagtgccatgtggatgatccttcattcctcccatacttctcagtcttcccctaggggtgcagtggtggttgggagaaatgagggctctgcccatgacacccaaagttgccatctactgcaagggatgtatgtaccgggtcgtgaggtgagactggggatggtcctcatcctgagagcagtggtggatagccacatgtgagattaaaaagactactctgggtggcagacaggggtgggcagagatctaagacatttaggaggtcctgggggattggggggcaccatccaggtggtgccctccctggacaggtctgggggaaggagaaaggtgatggaatttgatatgcctattcatgacctccatccagctgaggtgagtgtcccctccagcccagggggtcagtgcctctaaagccaggagctgggctgggacagaccttgcagccactgggacctctgctggcctctattgggagccgcaatccggatcctccgtgggaggggccccagcactgggagggcattgctgaggtcagggctgtgcccaggctgagctgcccagaagtggttggcctgtttatttgtccccaggtagttgcattcgtgtccacactagttccacttctctttcagcccaccccacctccctcctgcaccagcatggctgagtgaggggcctgctcctccccatcccactctctgcctgtgccagcctggtgatgcccatggccttgggcctttcagtggctcctcctccaagccccctcctccagccccacccttcggggctatctggccacacctggacagagtctgcctgccctccctcagtgagcctgtgggccgcatgtggcctgctccccaaagaacggaggtgcccgctccctgcttaggccttctgccagctctcaagtccccaaaagacaaacatcctcactaggacctggctacacacgggacatttgtgctccctgcccaacttccagagtcggtctgccccagttgccccccggggacccgcaccctgctgcctcccagtccaagtccagcttccccgctggctccctagggcctgtccctctgtcttgctcccttcccacaccttccttctgctctgtgctgttacccaccttacctgatgcaggagttcccactctctagccccagcctctcctggaaatccgacagccagcagaatccaccgcccaggctcccccagcccccttcactcctcaactaggactgcagggtttccatcccgggggtctccttctgtctttacctctacttcctaccgcagtccacagcctggccattctacttcctctgtatctctcccatccgtccctacggagaccccttcccccaggcctctggtccggaccgagtctaccacaggcctcaagcatcctgctcggtccgccccttgcgagctctgagtgcgcaggagtgcgcagggggagctgaccgcacaccccagcactacaaggacttcgcggtggggtgctgtggagttggctttcggcctcgacctgggctgtctgcgggccccactcccttggccggttccgaggcgctgggagcgggggtgggcttgcggagtcgcgtccgtgtccccgatccgccttcccgtcccgggcctggcctacgcagtgggcgcgcaggggcggctgcttcggtagatgtctagggagcggagggaaaggcgcgggaaccggggattcctcgggcggaccctccctccaccagcgctcggcgggcctcctccaagttcgcccccaagtttgcgagcggccaaatgggggcgggggctgcgcggaggggcggtggctaggccggagggtggggtctggagcgcggggcgggcgctgccgcctggccggccgcggctggcccgggatcagggagccgatgtggaatttcctgcccggctcggcgcccctcctgccgccccccgcccggcctcgcactccgcttccggccgctctcgctgcggccgcacccgcgcccgtgcccgccccgcgcctgccccgcgcctcatggagggcgcagggccccggggggccgggccggcgcggcgccggggagccggggggccgccgtcaccgctgctgccgtcgctgctgctgctgctgctgctctggatgctgccggacaccgtggcgcctcaggaactgaaccctcgcggccgcaacgtgtgccgtgctcccgggtaggagccggcctggctgggggagggggcgagagggacgctctgggcagtggtgtggcggcgccgggcattgggagggggctaccggaaccttcctacgccaagtgtgggccccttcggctccctagccagcgcggctccgttccaggcccagcctcggccatgggccacgacagtgcatcccagggaaccctggacgagaagtcacctgaggggaggatggagtgccgtgggcacccaggggatgacacgcgttgtccgggatatcaggaaagacctggaaaaagggacccttgaccgagttgtgaagtccacggggaaaagctggggaagggcattcaagccaaaggaactgcatgtgctaaagccccgcactagtccgactggagccgggagtgggagtgaggaggaaggtcaggggaggaggagcggtgctagccggggaggtcctggagcaagccagacttggaaagacagattcgcgtcttagagcgggcgcgggtgggagggtggtgacccaggcgagcgtcgaggagccggcgctcgaagtggaccagaagcgggaggcggaaggactatgacaggcacaggggaccggaggatgtgggaaccctggcgacaaccaggtggggattctgggtgcaagaaggggccgcgcaaatgtggggcgccggctggggaagccagtgtgggacaggcaggcgacaggcccggccggtgggggggcgagtccgggagtttgcacggagggcagagaggtgagccccggacgccaggagttaggagctggggtcgggggagccggtgggctggccaaaggccacaaggtcaagggcatct

SEQ ID NO: 9308 - DNA, 6000 bp, Homo sapiens
gtcataactcaaagaatcaattcttaccatgcttttctcctgccagtttgaatttagaaagggacaaggaaaaattttactctcctctttcaaccaggcattacagacagagatccagaagagttcactttgggctgggcgcagtggctcatgcctgtaatcccagcactttgggaggccgaggcaggcggatcacgaggtcaggagattgagaccatcctggctaacacggtgaaaccccgtctctaccaaaaatacaaaaaaaaattagccgggcgtggtggcgggtgcctgtagtcccagctacgtgtgaggctgaggcaggagaatggcgtgaacccaggaggcagagcttgcagtgagccgagatcgtgccactgcactccagcctgggctacagagcgagactccgtctcaaaaaaaaaaaaagagttcactttggtaagaattcctacctgtgcccgcttttatttgttctcccaggatcccatctttaggcttgagaggatcccatccttgtcaccagaaactgtaggggtggcaaaactccacttccatccctagagtctcagctgggcccaagaattaaattgacataggacaggttaacagaagaaaagcacataaatttatttatatgctattctacatctgatttctgttctttaatcttgcgaacagagtccctaaggctagccattatatttatttataaataaggggtgctggagtgcagtggtgagatcacagctcattgcagcctcaaactcctgggctcaagctatcctcccacctcagcctcctgagtagctggaactgcaggtacatgccacccaccacaccaatctaattaaaaaaaaaaagtgttgaaccgggatctcactatattgcccagactggtcttgaactcctggactcaagcaagcccccctcggcctcccaaagcactgggatcacaggagtgagccaccacacagtcccacaaatttattgagtacaagttttacatgggttgggaaccctcataaggacatttgaagacccaaagaagaagttagagtctgttacttatacactgaattggacaaataataataagttatgaagaggcaactaaattatatggggaggcttaaaagataacagtgttttaacaaggtctgtatagaattctctcatttcaacttctcatccttgaagataagaatgttgcatctttcacatggcaacttcatctcctgcattttagaaatagcacaggcctggttgggtggctcacgcttgtaatcccagcacattggggaggttgaagcaggtgtatcacttgaggaaatgagtttgagactaacctggccaacatgggaaaaccccatttctactaaaaatacaaaatttagcctggtgtgacagtgcacgcctgcagtccccagccattcgggaggctgagacatgagaatcgtttgaatcctgaaggcagaggctacagtgagccaagatcactccacttcactccagcctgggcgacagagtgagactctgtctcaaaaataaaaaataaaattaaaacgagctattcagccatgaaaagtcatagaggaatctcaaatgcatattattaagggaaagaagcctgaaaaggcaatatactctataatcccaactatataagattctgcaaaagtaagactagactatggagacaggaaaaagatcggtggttgccaggtgttagcagggagggacaggcagagcacagagggtttttagggcaatgaaactactgtgtgtgatacaataatggtgtgtctatgtgtcattacacatttgtccaaacccatagaatgtacaaccggaagaatgaaccctaatgtaaactatagaccttgggtgataatgatgtgtcaatgtaggttaatcgattgtaacaaatatgcccctttggtgctggatgtcagtagtgggagagggggctacacgtgtgtgggagcagaagtatatgggaactgtactttctgctcaatattgctgtgaacataaaactgctctgaaaactcaactttttttttttttagatacagggtcttgctatgttgcccaggctggagtgaagaggctattcacaggtatgatcaagctcactgcagccttgagcctcctaggctcaagccatcctcccaactcagccttctgagtaactgagactacaggcgtgtaccaccattcccagctaataaagtctatttttaaaaaatcacttgacgataaatgtaactgtttatttgtggactgtcaattctattccgttcatctatgtgtctactcttatgtcaccaccacaatcttgattacagtcattttgcaatcagtttagaaatcaggaattgtaagtcctccaaaactttttcaaaagtattttgactattctggatcccttgcatttccacatgaattttgatgatttttgcaaaacaggtagttgggatttcaataggaattgcactcaatctatgcaacccctgaatctgtagaccagtttggggaatactgccattttatatttaaagtcttacagtctatgaacatgggatgtctttccatttatttatgttgcctttaatttctttctttacttttttcttttttttttgagacagggtctgactatcacccaagctggagtgcagtggcacaaacatgcctcactgcaacctcaacctcccaggctcaagaaatccttccacctcaacaccacccccgactcccagtagctgagaccacaggcacatgccaccatgcccatataatttttttacctttccgtagaggtgaggtctccctatgttacccaggcaaaatacccaagtattttggctattctggatcccttgcatttccatatgaattttttgttttttgttttttatttttttttgagacagagtcttgctctgtcacccacgctggagtgcaatggcgccatctcagctcattgcaacctctgcctcccgggttcaagcgattctcctgcctcagcctcccaagtagctgcgattacaggcacccaccacttattttaatttatttatttagtagttttggagacagggtcttgctttgccacctaggctgaagtgcagtgacaggatcatagctcactgcagcctcagactcctgggttcaagtgatcctctcacctcagcctcccaaagtgatgggattaccggtgtgagccactgggcctagccaaatactgtatttttgatcgacatttggttgaaaaatatctatgtattagtaaacctgtgttgttcaagagtccactgtgttttgctggggatttctacatctatattcataagggattttggtctgtggttttcttttcttgtgatgtctttgttgagtttagtgtcagggtaatcctggccttgcagaatgagttagaaagtttttgtttcctggtggtttgtcttcactgcatcactgtggggttgctctgtgtagctgtctcactcagtagtgagggaaatatctctggaaatgtacaatttactgcatcagccctgcttagtctcacatatccgttgtatgttggtgcctgtggcagagggtgtggtgtcacaccttctccaggtagataaaaagtcaacactccaaaacactggacaccagcaataaggcagtcattggtaaggcctttggggagctcccattacaaatctgcctaaccctctggcctgaagtgcctagacttttgtggtgacatttcaggacaagggacgtctgctcaggcaacacagggatggggtaaggaagctaccatcccaccggaagtgggagccatctgagaagttcctcaagacaataccagccaaatattagaaggtattggcattctggccgaggcagaatgttccaaattggcaccatcttgtctgggagtccatcatcctgtcaccagcccaataggctggataggctgcagatgctcctaagattccattccacaaaccacatgtaagcctgaacacatgtctagtatagcgttctggggaggccaggagccatggttcatgaatgtaatcacagccttttgggaggccaagagttcgagaccagcccgggcagcatagtgagacccagtctctaaaaaaattaaaattaaaaaattagccaggtgtattgttgcatagctgcctgcctggggcgtggggcactggaatgcagtactcaggacacagtggctgtcgctgataaacacaagtggggatctgctattggggtcccatagggccctcccggcctgccagaggtgcctaggctaggaagggctgccactggggtctgaggagctctactcccccacaggagggctgcaggctggtcccagaagctgcttgcttccttgcaggacgtggtagctgcaggctcaaaacagccagaatgcattccctcaattcgcagaactctctcaaaaggctgcagtctcttccattgtaagagtagaggtcagggaccgccccaggccactctgccagacccatgtcttcatctaactcactgtgcctgaagctcacatgacggtgctgtggggcctgtctggggcccagctgggtggggttcatgtactggggtgagggatcaagaagggtgtccgctgcagtagaaagaaggtgggctgcggactttcagacgtggcccttaacctccccgaactgacctaggctagtcagtcagccggcggtctgaccttctccatctgtgactgagtcacagtcacagggcttccctagaccccggtgagctccggtaacgaccttgcgaggtcgggcagagtgggcagggtgaaatatctgggtgtgtggcagcgggtggggccgcgcggggggcctgggatgggggcgggccctgcgctcggcgccggcgaactgggcgggctcagtgctcagagcggaggcagcggctgcggcagcagcaggtgggttgcagcagatcctgcggggacggggactgggacgggctcaggcccaagaacaggcgaaggcgcaggtgtccggggacgggggcgcggcggagcaggctctagcagcagcggcgtgtcggacatggggaggtgtgcgggcccagggcgcccctgcattccgcctggcgcgcggataccccagcctggccacgggtgcaggggcgggggtgtatgtagccgccactgtctgtctgtggccaggtggctgcctgggccacacccgccccgacgcagagccgcggctcctgttccgggtccggctcgactctggggaagcctcggtttcacctggctctgggaccccaccactgagccgttcccagcctctcaccctgctccccctggagctgctccctccccacccctcagggccaccgagcgggtgagcaggtggggcctcaccaggcctcctttgctgcctgggatgcagacagggcctccaggcttcctgtgacctcctgcccacaggttctgacacctgccccattccagctctccagcaggcccctggtgagggtgtccaggtccccaggtcagggacagagagaggactgggggtggtcagaccaggagggatggaaggctggtcaggccccggctacgcatcctgtcattcccctctggccctagcaggttccagtagctggctcggtgctcttctcggccacctgccatggcccgggggctgcccaccattgctagcctggcacgcttatgccagaagctgaaccgcctgaagccgctggaggactccaccatggagacgtcactgcggcgctgcctgtccacgctggacctgactcttctgggcgtgggtggcatggtgggctcgggtctctacgtgctcacaggtgccgtggccaaggaggtggctggccctgctgtgctcttgtccttcggtgtggccgctgtggcctccctgctggcagccctatgctatgcagaatttggggcacgtgtgccacgcacgggctctg

SEQ ID NO: 9309 - DNA, 6000 bp, Homo sapiens
cgcttgagcctaagagttggaggctgcagtcagccctgattgcaccactgcactccagcttggctgacacagcaagaccctgtctctaaaacagaaaggagggaaggaaggagagaaagaagggaaaggaaggagagagagaggaaaaaaaagaaagagagaaaagaaactgctgaataagccaacagttggggaactcaagaaacaaaattaggtaacattttaaactgaacaatgatgagaccaccacataaaaatttgtaggatacagataaatcagcacatagagggaaactggtaacttaaatcccagccctttgggaggctgaggtgggagggattccttgagccctggaggttgaggctgcagtgagctatgattgcaccattacattccagcctgggcaacagagtgagaccctgtctcaaaaaaaagactgttgtttaattttcacaagtttgtgaaatgtaaaatttaaatgttaatcccacccacaaaataatgccacagaaacatcagaataatatttgaccaaatatctggcactgtggccctgccaagttgacacataaaattaaacatcaccctggccgtaaataatggtaggtacatcatcatcctcatgtccaaggaaacctcaagacttctgggctttgaagaatattttgaagctgccaaaataacagagatcacttccagtgaccctgaaaacttgagagtttctagaaccttcacttctggttcctgaggaaaatggtcctgtatttcctctggagacagcctgagagagagggatccttggtggtgcaggcggagtctttgaggcctggggcatagagagtgggcaggggactgaccagcaggaggccagaatgggggacacccacaaacacgggagcagggcagaggtgactagatggggcagtcacctgtgctctgagagaggacagccaggcaggacccagagggctctgcagaggcaccagggaccctaaaaagggagggcactgagcaggacagcagggcccagcctcctctgcccaggcctggacacatctcagtccaggaaggggtgaggtgagcctgggtggtgagagctgcagctgcacctgctggagaggcccggcccagcccagccccgcagggtccccaggatccagccagacccagatttcccgccacagaaagatgtggtctgaggctgcctctgttgagaggccatggcaggtgcagggtcaggcagggcctgaaagggagcggctgggggcactatttaaaacagtcgcttcctctcccgagacctggggctgtccttgggggaaccacagtttctgagtcccaggcagtgatgagtgtcacactcaaggggggtgctggggagggagcagcttcagcccagacccccagtgcaggtgctgctccagccctgaaggtgagaggagccagggtcgggggcagcagtggaccaaggctcccaacaggggagaagctagactggattggggcctcccaggggcttcccctctacctgcatcagtgtttcttagggtgtccacatcccattactgctcagcaccttgcccatctccccgaggatcgggagctgtctggcatgcagcctttggcgctgaggggactctcagtgttcatgggacactgggatctgagcatcagtccatggagcctgagctcactatggctctcgtgatctctatgagataatgtgaagtcttctgtttgtctctctgtctgtctgttacagcatcccacaaccatggctggcagatgccaaggggatgtgtgagatggcccagctccaggatgaaactcaactttagggaagctggggagagcctcacagcgctggacaagccatcagatggcactgcccccagggacacacccgggggcgtggacagggatatggaggacctaaggcaaagggtggcttcaaacgtgacagcagatcagccgctggggaaataccagaggggatttgacagctgggccaggtgttccaggacagcactttccaaaagattttccatccaaacttccagcaagaagtagatcttccatcgttatccagagcatatctacgcattcaggtaactgaagcaacattccaggaaccctcaccatccctcccgttgaacagttcgctctccagctggagtcagctctgggctgcctcactttaacaaaatgctggttgcagccattggaattaattttacaccctctgagttgcagtgcaaaatttgaagactggcatttggaagctcagtatcatcaaggattcatttattttatgatggttgacaacattttccaggccacactaactgggtcagctggtaataataataatatgataattggccgggcacgatggctcacgcctgtaatcccagctctttgggaggctgaggtgggctgatcgcctgagatcaggagttcgggaccagcctgatcaacatggtgaaaccccgtctctactagaaacacaaaaatttagcatgatggcgggcacctgtagaccagctgcctgggaggctgaagcaggagaattgctcgaacccgggaggcagaggccacagtgagccgagatagcaccattgcacttcagcctgggcagcagagtgaaactccatctcaaaataataataataataataataataagcccctgaaggtattacacatgcagcactttccagtttaaaaaggactttcaaaggacaagtagtgtatggtcccatccataggaggtatccagagtacccaaatatagagatgggaactagcatggtgggtgccaggggctgggggagggaggaatgggaagttggtgttgaatggggacagaatttgagttctgcaagatgaaaaagatctagacatgccattgcactccagcctgggcaacagagtgagactccgtctcaaaaaaaaaaaagaaaaagccagttgcggtggctcacgcctgtaaacccagcactttgggaggccgaggcaggtggatcatgaggtcaggagtttgagaccagcctgaccaacatgctgaaaccccatctctactaataatacaaaaattagctggcatggtggtgggcgcctgtaatcccagctactcaggaggctgagacaggagaatcgcttgaacccgggagaaagagattgccatgagctaagattgcgccactgcactccagcctgggcaacagagcaagactctgaaaaaagaaaaatctagaaatggatggtggtgatggttgcacgacattgtgaatgtagttaatgccactgaactgtgtacttaaaaatggtcaagatgggccaggcgcggtggctcacacctgtgatcccagcactttgggaggcccaggcgggtggatcatgaggttaggagatcgagaccagcctggccaacatggtgaaccccatctctactaaaaatacaaaaattagcttgtcgtggtggtgcatgcctgtaatcccagctactcaggaggctgaggcaggagaatcgcttgaaccagggattcggaggtttcagtgagctgagatcacgccacactgcactccagcctggcgacacagcaagactctcaaaaaaaaaaaaaaggtcaagatgataaattttaggttgtgtgtatgttactgctttttcacagatgaagaaaacaacactgacatgcattatctcccaacaccaacctcaacccagccctggagtgtgagcagagccagcagcatttccagccccgcctctggaggaaggagaggaacctgagactcttgggtgacctgaggcgtctctggcagcaccagcaaaagagcctggccctggccgcccagcacaggtgctcagtccctcctgactgccactgctccctcaacaccaaagcacagggtcgcgagatgttgggagagggtcggggatgctgggctgggagaggaccgggggcctgtcagaagccatgacatgatgcactcaccgctcaggaggaagctactggcctttgagtgaaatctataagaatgaactctggagatgtatcgtacaacatggagtctacagttaaaaactgtattgtatactggaaaattgctaagattagatcttccatgttctcactacaaaagcataagtatgtgagatgacggacgtgtgtgtcagcttgatttaatcattttgcagtgtggcaaagcatcgcactgtaggtggtaaatatatatacagttttgtcaattataccttcaggaagctggggtggttggtgtgtgtgtgtgtgtctgtgtgatgtgaggtcagtgaggtgctgaacatggtgcattaaacagcattttcattcttatctcatgattcctggacttgaaccgttgagtggcttctggctaaacccaaacctgtttcctgctctctaaccacacctccctctaggaccggttggaggagcctcagcccaggcccctgagctcaagccctgggggactcctgctgggcagctctctggaccccagtgagatgctccacagacccagggcgccctcggggaagtggggaaggagggaagtcaggtgcatcacctcttgggaccagccccgaggggactcaagcccatccagggcgcaggtgcctccaaaggaaagccccaagggagggtcttggggggccatggcgcatcccacctccctgtgtgacctcagctcttgctgaccctctgcctgtggtgggaggtccccaaacaaagcacccagggccccaggggcaaggccaagctgacaggtgtgggaggcagttgagccctggatcctgaccacagcagggcagttggcagatgtgcctctgggacagaaccccaggggtaacggtcatggactctggaaggggcctggctgggggcagggaccagaggatgaggatggggccacatggactggggtgcaatgggacagctgctgccagcgagagggaccagggcaccactctctagggagcccacactgcaagtcaggccacaaggacctctgaccctgagggccgatgaggccagggacaggccaggggggccttgaggcccctggtgagccaggccccaacctcaggcagcgctggcccctgctgctgctgggtctggccgtggtaacccatggcctgctgcgcccaacagctgcatcgcagagcagggccctgggccctggagcccctggaggaagcagccggtccagcctgaggagccggtggggcaggtaaggggtgagagattccaggggatgtgggggtctgggtggcagaggcgggaaaggatgaccaaggggagacgagccagaggggtgaggaggaaggttaatccctggaggggagccacagacactgactttaactaaagtgtcaagattttgtccatctttgaattaatttttattgcttaatgtcatattaaaatattatttatcttgattcctgagatttcttcccccacttacatttggcaccaaggccaatgtctccctcacctccccctagtccttggggtagggcaggactggaggcaggggcaggacgtccacaggagtggtggccgctatccctgaaggatgcccaggcctctccctcctcctcctcccactcctcctcccccccctcctcttttccccttggcctatgtcacctgtccactcccaccctcactgggcaggggccactccctggagctccagctaaggtgtgaggggcctttcctggagtccctgggtcactagacctcagccagcatcgcctcctgaaaccagcccctaggagacacaagcttatccagggtgcaagtgcctccaaagaagaagcccaggagaggctctagggaggccacaactccctgtgtgacctcagccattgccaccactctgcgtgtggtgggaggtccccagacaaagcaccaagcatcggggtccatttatgagcatttgggacacaacagcctgttcactggtgc

SEQ ID NO: 9310 - DNA, 6000 bp, Homo sapiens
ccttgcttggctaatttttgtatctttaatagagacagggtttcaccatgttggccaggctggtctccaactcctgacctcaggtgatccaccggccttggcctcccagggttctgagattacaggcatgagccaatgtgcccagccaggaaacattttttaaaaaatatttttaagagtcggggtctcactctgtcacccaggctggagtgcagtggtgcaatctctgctcactgcagccttgacctcccaggctcaagcgatcctccagcctcagccccctggctctctcccccttcccacttggggctacaggcatgcaccagcacgtctggctaatttctgtattttttgtagagatggggtttctgtatgttgcccaggctggtgttgaactcctgagctcaggcaatccgccttcctcagcctcccaaagtgctaggactacaggcgtgagccgccacacccagccttactcttttttttttttttttttttaacagaatgaatagttcagagagctgggacaatattagaggagagaacctgaggcctgaataagagttagtggtggtggtaaggcataggagagaagggaaaggactagagagttccatgggagcatcaagtgtgacatagggggccgggcgtggtggctcacgcctgtaatcccagcactttgggagtccaagggaggattgcttgaggacaggggtttgcgaccagtctaagcaacacagtgagacgccatctctacaaaaaaattaaaaaattagcggggcatggtggcatatgcctgttgtcccagctacttgggaggttgaggtgggaggatcacttgagcccaagaggttgaggctgcagtgagctgtgatcacgccactactctccagtctgggcaacagagcaagaccctgtctctaggaaaaaaaaaaaaaagtgcaacatggggctgagggtatagagctgactccaggcttgggggctgaggatggcccctcctagtgtgtgaggccagtgagggggaaagctgggtggggagagtatgcagagggcgctatcctgcctacagacactgagagggcctggacaggagatctaggtgtcctctgggagtcagcaggaagcgtcacaatgccagggaggtggcatggggagcagagcccattgtcaccttgccgaggaaccacaggtctccacccacccaccatcctcagcacaggagaaagaaggctggcccagccgacaggtctgccaccctgatgttagggtaaggcacaccctgcatctctaggaccctgggaacttgggatgcccagggcttccctctataaagaattatctggaggggctcaagggtccaaggagaagtggacctagtatttccagagtggcctgttctgggcctcagactggacaagaaagaatggaggtctgccccaggccctgttctgcatccttacgtgcctcagttcccccatctgaggatatcccggggctccggaaagggagcctctgcagtggacccagctgctgttccctggatgtcctccctcccagccctggctggcctcccccacccgccccaggctcctggcctcccaggaatgtgcttctcagcccccaatctgggcgcctgccttatcggcccccagtcgaaggggagacagacgcccctgtcgacaatgacatcccctcctgttagccccagcctgaccctgagttgagggccggccagcgcctgctaagtgcctggaggaggaatatctccccttccccacgctgacatgaaacccgacctcctgcaccggctcctttgtgcccaccgggcgcccgcccaggcgtcagaggccctgggtccccgccctgctgcacactgtggctgccagggtgggatttgctctgcctggcatgcttccaacatgaccttagcctgctttgctggaaaaccaaggttgtctgcgggggtccgctcaccctgctcccagcccccaacccctcagtgtcttggtccaacccctgctgtatgaggccagaccttctcctcacatccctccagcaaatgcacttccctccagcactccaggctctccccgtcccctccagagcagggaggaaggctcctgaacccactgtcattaggcactggtctcaccccactccccagggaacccctctcagggcccttgtgggaccctcacgctcttgggatccacctgagagccttctcagccagttctccctcttggccagttccagtctcctcgggggacctcagggccctgtccagagcatccctcgttttccacacttccctccaaggctgcactccccttgtttgttaaggcacatccatttgtgtgccttcctctccctcctgcctgccattatcctggttaccaggaaccttggcatggctgcaattcacagtcccttcccgggccacgtctccctggattctcactgcctggctcctgaagccctttcctggctcagcctcccttggcctccccagctggggctgccttccctccctggctactgcaggtcaggctacccaggcctggcctcttttctccatcaacccttgccccttgagcatctcacacacgcccaaagctacaaataccattgatctactactggatgacggcacccacatttagactgtctgctccaacccctaccccaacaccacactcagatttttccaagtgatgtcacacagatgcctcaaattcgatgagtccagaacaggaccctctatgcccctcaccttctccccacgagccctccatctcaacaaagaccaccaccatccaaccactctgcggctcaggcctctgaatccacttggactcccctctcagccctgtcccgtctgtaggcaaacccatatcccacccctccttgtcctccaggttccacctcccagccccgaaagtaatcactgtcccttaaggattccccctgctcaaggattcctctggcagtccactaccctgacagcaaacacagaggtttgttgtttttttttaaattttagtaacatatacacaacataaaatttgtccaaactattttcaagtgttcagttcagtggtattaaacattcttatgcaaccctccccaccatccatctccagaactttttcattttcccaaactggaactgcactcattaaacaataactccctgatcccctctcatataagtggaaccatacagtatttgtctttttgtgactggtttttttttttttgagacggagtctcactctgttgcccaggctggagtgcagtggtgcaatctcggctcaccacaacctccatctcccggattcaagcaattctcctgcctcagcctcccgaatagccaggattacaggtgcccgccaccacgcccagctaatttttgtatttttagtagagacgaggtttcaccatgttggccaggctggtctcgaactcctgacctcaggtgatccacccgcctcggcctcccaaagtgctgggattacaggtgtgagccactgcgcccagccttgtgactggtttatgttactgggtgtaatgtcttcaagggtcatccatgctgcatcatgtatccgaatttcattcctttaaggttgaatggtattgcattgcatgtagacagcacatttcgtctgtctcatcggtgggtgaactgatgtgaaccattgtgaataatggggccatgaacatgggtgtatgaacatctgttcaagtccctgcttttgattcttttgaatgtgtacccacaagcagcattgctggatcatacggtaattctatttttaattttttgagtcatgatcatattgtttttcacagcggatgcaccattttatattcccaccaacggtgcccaagggttccaatttccccatatcctcgccaacacttattttgttttattgttttgcttttcacagttaccatcctgatggacacagggatgcttgcaaagtgacaaactttagaggtatcccaggtcaccccacctggcactgcggacgcccacgtggccccacccctcacttggcaatattctcatcaagtgtcagcactagcttattgtattgactgcctcctggctggactctaagagacagtgtcttttattgcatgctacatccccaacatctagaacagtgtcaggcaaacagttgtttaataaacggtggaaggaaggaagggagggagggagggagggaaggagggaaggaaggtgggtaggttggtttctattttccaccaaaatattgaggacctctcctgcctgtccacttgctctggtgcgcctctcaaccctcgcgccccacctggactcaatcccgcagtcctgcctctccttccttgggcccccggggaagaaccccgacagcggccggcacatttgagtggggccctggacgtttggggaggtttggacacattcccgaatgcctccctgctgtgggttaggtgggcctgtcttgggctggcagcgaggacaacgttgtggctaggtcgtcagttagtgagccagcacggtctgagccgccacactccgcgccccgcccacgcgccccgccctttccagttttgcctcgcctgctcgggtcttcgctcctgtaacccatacgatcttagccccgcccccgtggtgtcgtgggtccacgctactggtcctctcctagaaagccgcgaaatgaccagttcctcattggccacacgttctcccgcgccaccaccgcagccacaacaaccgccacgtgctcaaccttggcgcctgcccattggccaccagcctctacccgcccactctccctttccgcccctaatttccctcttcttccttccattggctgtcgggctcaggggctctcttttcagcctggggcgcgcagcgcctcggatgcggattggccgaaggcggggctgggaggcgggttaaagagcgcgttgctggctgggccacgcgtgcttgagaaggttcaatggcgtggcagggactagcggccgagttcctgcaggtgccggcggtgacgcgggcttacaccgcagcctgtgtcctcaccaccgccgcggtggtaagcggccgggcggaccggacgtcgccttggttacagcctctggcgggaggggtgagggtcgccatggttacggcgtggctcccgggcagctcttgactggcccctggttccacagcagctggagctcctcagcccctttcaactctacttcaacccgcaccttgtgttccggaagttccaggtgaggccgccccgcgccgcgcacctgtgggcccgacccacccaccccgcacctgaccgcccgtcccccgtaggtctggaggctcgtcaccaacttcctcttcttcgggcccctgggattcagcttcttcttcaacatgctcttcgtgtatcctgcgccctgcggacacgggctgggtggagggcaggccggccgggctgggagagaggccgggacggggaaactgaggccccgcctggtggcacttcctataccgacgccgtaggttccgctactgccgcatgctggaagagggctccttccgcggccgcacggccgacttcgtcttcatgtttctcttcgggggcgtccttatgaccgtatccttcccgcaggctctggaacctcgggctagggcgcctcggcgtccagcctgtgttggtcctggggccaacacagccatgccagagagggacacagtcgctgtctccagcttagtatgtgttgagggcccactctgtgctcagctgcaggggtcagggctagatcttcagtgctgtatgcaaaatacaaagccatgcacaaaagagccaggtgggttgtcagggccactagctgagccctgaatgcgagtagccgggagaaactggggcagggacaggcagtggttgggccctgggatgaggctgtaggtgtgcagggcagatttcgtgggacctgaagcccgtggagtgtgtcgcc

SEQ ID NO: 9311 - DNA, 6000 bp, Homo sapiens
tcttctccccaccccactccattcactctttgcctatcgctcaccagcctataccacctgcctcagggcctttgcactgaccatttaggccacattccaggctcttttcacacgttgcctcctctgagaagccctccctgaccactctgcccatacctcatgcctcttgattccccttacctggcttgtggtttcagcactttccctgtgtgtgtttgtttttcttggcatgagggcaggacctaagtgtctgttccctgttgattccccagtgccaggcatgcagtgcaaactctagaaatattttttgcatgaaggaatgagtgattgaatgcagcaagggtctggaggctgaggaccaggcagacagacattcagagttgctggaacgcgacagagacagggagtcagactggtcttgcaagatcctgggcctgcccttgggtcctggggagccacggaaggttgtgggtgccagagggttgtgatcagagccacagtcaggggccttttgagacctgtgccccctccccaccctccctccccacctcctcaggccagctctggggtctcggcaggtggtccgcaacatgacctctgagttcttcgctgcccagctccgggcccagatctctgacgacaccactcacccgatctcctactacaagcccgagttctacacgccagttgatgggggcactgctcacctgtctgtcgtcgcagaagacggcagtgctgtgtccaccaccagcaccatcaacctctagtaggggctgctgggccgcctgggtgggaaagggccaggggcgggtggcccagggactgcccacttatccagtaaggtggctccgtcacctcttttcctggtgggaaactgaggcccaaccttggtagcttatcctgggcctctcagtgagtatgtttgagcctcagtgggtggatagggaccaggctgggccaggcaaggtcgggcactgtctgacctggctgggcggtagctttggctccaaggtccgctccccggtcagcgggatcctgttcaatgatgaaatggacgacttcagctctcccaacatcaccaacgagtttggggtgccccctcacctgccaatttcatccagccaggtatggggtggaggtccgggggtgggggactggggtggagaggggcgggtgtcctgggcaggcagctgacgggcatccctgtcttctcccatcggccatagggaagcagccgctctcgtccatgtgcccgacgatcatggtgggccaggacggccaggtccggatggttgtgggagctgctgggggcacacagatcaccacagccactgcactgatatgtgtcacagcttttctccctggccgtgcccaccctgcacagcccccaagccacgctgatcacactcccatgccccaggccatcatctacaacctctggttcggctatgacgtgaagcgggccgtggaggagccccggctgcacaaccagcttctgcccaacgtcacgacagtggagagaaacattgaccaggtgggccgggggttggagaaactgagtcacggtgtggggccccagggcatcctgggctggaggcctggatcatcacagagtggacaatggttggtgtcctctctctagtgcctgggccatctggagcccctgtgacatgaaggccaaaccccctgctccagtgagacccagcaggccccaacctgctcttcctgatgacctggcccgaaatggcaccacctgggctgaggcctgtgaccacacagatgtggttcaggtggcatctggagccttgctcaggcttcccctctcctcccacccccaggcagtgactgcagccctggagacccggcaccatcacacccagatcgcatccactttcatcgctgtggtgcaagccatcgtccacacggctggtggctgggcagctgcctcggactccaggaaaggcggggagcctgctggctactgagtgctccaggcggacaaggctgacaagcaatctagggacaagatactcactaggaccaggaaggggactctgggggaccggcttcccctgtgagcagcagagcagcacaataaatgaggcactggagaggcgggattcggagatcttcacgctgcggtcgctggaactagcctcagcatcttcagcatggggaaagccaggcacgtggctgggggccaggggaaggtccatgccaagccctgccccttcccaccctgatccctcagacttggggccaggccctcccttccctgggctgggcagcaacaccacctaggaccagccaccagagggtgcagcgaccccggccctttcttaggcagagagtggccagctgatgccgggaacccgggtgccttctcagacccgtaggcgtccagctcaccctgccgaggacatgggaggtgaagctgaggtctgaggagtggggattgggcaagaggctggaggaaaacatctcagtcagagccaagcccctggggggtttccaagtttaagcccagagtgaaacccaagcttgtgatcctctccagagggaggcctggttctcagggaacagcaaactggaagaggtccccagatcccagggatcagggcttggaccagccggggatgcagcccagagggagtgggtttggaagggaacaactagacacagcagccttcaccatcagcagcccctccaggcctccctcggggcctgctccctcctccaggcacagttccaacacctggggcaggattctgggaaaggctggtggagataggctggtgaggggtggtggtcacagcccagcaccaggggcactctggatatcaccaggggcactctggccagggcccaggtgaggccaggtcggggctatccttcaggagccccgaaaacctggtgataccaaagggcccacaaacagggttttgtgcctgcagagtagagtaccaccggttctgagccctggagggctgtgtctctggggctcccagttgagtgatgtacgagtcactcctcaatccttattttatttatttaatttaaaaaattatttaaacaaatagagatggggtctcactatgttgaccaggctggacttaaactcctgacttcaagcagtccccccatctcagtctcccaaagtgctaggattacaggggtgagccactgcacccggcctcaatccttatttcggcctgagaggaaaggccgtggccccatttgcaggggagaagactgaagctggaggggcaggccttgctctgggttgcacagcaggaagagaagtgggagctggccacgaggcttcctggacccgacacgctggtggggtacaccctggttctccaggtcccgtggggctcagcccaggactacctcggggggtgagggacttaaatcctctccttcattctcatcgccccttcccccatcatttcctgaggaaggacattcagggaccttcctggctgtgcctcgggtcaggaccagaatgacacccattcctttccctgggcctttgctcaggcggtccctgcaccctggcctctgcctgaccaggatggtggggagaggaggggggacgtcccccacgctgctgtctccactgttcctgctgcccaggcctctgagcttccaggactgcagcgggtgggtgggtgggctggcctaagcccaggaatgcacttcagctcctggttgagcaatgtcactgaggcttgggagtcgggtgggggcgggaggaggcatccacaggccccccaccgcgagaggcagccgtgggaacagcctgcctctaaacaatcattccagtccaggctgaccaggggctctggctggacataggggcctggcaggctgtgtggcctgtaaggacacagtctgtctctgtgcctcagtttctctgctgcccagatgggggggcccggcttccaggtgtagacatctggagcaggcagtgttcagctggggaggaagcggggaggactgtgggggccacgtgggaagaagtccagcccacatcacctgcacccctgctgagcctggtcaacagagcccctcagtgggtcctcactctcctggctgcctcccatttaggcaccctgaggcctggggagaacagagccaggccagtgtccctagagaggctgcgctgccagcacagtaatagcggatttggattcagggaagcagacccgcagctagggtgggaaagagctacaggcagggcgtggcctccacacagcctccctccctggaggtccatgctgcatttccaggacagcaagtcctggacaaatggtcccggatgccaagggctagaggcatggtctgtctgcattccccacatgggcgtcttgtagtcaccagcatttgatgctgtcaagtccccctgtcctctgtgcagactgggaagcccttggccaccctggggagttgtgggacccaggccaggctgcagaagcataaggacttgaacccaagttttaagtgacaccaccttgtgtccccctccctctgcctctgttcagctccaccttgatgctgactaggctgggccatgaggagagggttaggggatagagatgggagctggggagcagggctccactctgggaggggggcagccttgccggatccaggggagagagttgagcggccccagctctgctttcccagagctgccgggaacccggggaatggtgtggaggttccagggagccctgcccctacctggcaaccgcagtgcagcaggcaccaagttctcctgcacattgcgacagtgtgaccctgggctctggcgggcggtaggtggggcctttggacctactagcagtgagggagttaacacagcagctgactcctctaggcaaggaaaactcccctcagacgctttgctgcctggcctcctgccagcaacaagcaggagctgaaaaccagaagttgaggcgtgagtttggccactccgtagtgtgcacttggtgagggcagcagctcgccacagctgccagccatctgtccattcacccatctgtccatctggcagcccgctgttcagacctgtctgtctgtccgcccatctgtaagcccatctctgtcccattgtctatctgaccatctttctcttactgtcctctttgtctagctatctggcctatctgtcgatccatcttcgtgtctgtcttcagcccccacctgtttgtccatctgtccaattacctgtgactctgtgcatcttcttgtccattcatctgcccacccatccgtccctccgtctgcccaccagccgcccctctcctcctgggctgcagagccatggcccggggctacggggccacggtcagcctagtcctgctgggtctggggctggcgctggctgtcattgtgctggctgtggtcctctctcgacaccaggccccatgtggcccccaggcctttgcccacgctgctgttgccgccgactccaaggtctgctcggatattggacggtgagtgagacgtgggaggaagctgggtggcccttggcagccagcccctcctggagaaggcgtgtgtgtgtgtgtgtgtgtgagtgaatgtatgtgtgggtgtgtgtgtgagtgtctgggtatgtgtgattgcatgcatgtgtgggtgtgtgtgagtgtatgtgagtgtgagtgtggggagtgtgggtgtgtgtgaatgtgtgtgattgtgtgtgggtatgtgtatgtgtgggtgggtgtgtgtgtgtgtgtgtgtgcacgtgcactggcccaggaagcaggagccgtgtgtgtgtgggcttcagcacctgcaggtcttgggcgcaaggaggcagcctcagggcccttgcacagaacaggtggcagggtgtgctcgtggggcagatggggacttggggacaatggtggtgtgtgagtccacgcctggctccaggattcaggaggcccatttgcatatcccaggtgggaacctgtctggccccgcctgaccctgctg

SEQ ID NO: 9312 - DNA, 6000 bp, Homo sapiens
ataatttccagacaaataattctcaaaaaagtggtgcagacctaacatgttctggttcatgctatctgtgtaatttttttctgatgggcacaacacaagccaaaatgtaggtaactgattggctggttacatcgttcaggcactacaaaagtgagcaggcggtaagagaggaatggctgccactgcaaagaatgctggtgtccacaggcagggcctggggtgagtctggtcaggatttttacagttctgtctgctcccctttaaaccacttacctcgttctcactgagaacagtcacaccaagggtgttaaggacttcaatttcaagttggctaaacagagggtcatatacccaacagtgacttctgggaatctagaagggaagaatgagttgtttacttcaacccaaacatctgtgtgcacccatgtataggaccagaggaggaggagatgaaaatgaatccaaaaatgtacctggcacttttccaacaaaagcagcaaaaacgttagctggtttctagctacgatgcaggtggcaaagttcccaatgccgtaacacacacacttcaaatggcaggttcctgtgaccaagatctctcttgggatagaatcagtggccacatctgactcctctggcaatgagtcaagatgcaggtttccaaagatgtctgaaagagtccccacaggggccttcagttgttccagatgttttgtgagacatctattgatggtttctgaaagagcaggcccccaaatgcagttagagggcatgttctgaccctgtgaaccaaatcatccacaaaagaagttcacatatttggggagaaagagatcagggcagtaaaaggtttcaattcttcagagagagagagaagctgccagcctcattcccaaacatgcctggacatacagtcacattcaccaccaattgacaaactgtcccggcccctggactcccaaaacccaagagcatgttgcaagcagaaattgggtttcactcaagggcagtttccatctaaaactctaatgtgaactcattctaatttaacaagaccctcctagtaaatgtagactatgctctgaaatgcgtacttttaaagttgtaacaaaccaggtgctcacgcctgtaatcctagcactttgggaggcctaggtgagtggatcgcctgaggtcaggaattcaagaccagcctggccaacatggcaaaaccccatctctactaaaaatacaaaaaattagtcaggcgtactggcgcacagctgtagtcccagctacttgggaggctgaagcagaagaatcacttgaaccagggaggtggaggttgcagttagccgagatcacaccgctgcattccagcctgggcaacagagcaagactccatctcaaaaaaataaaataaagttatactctgtttaagtcttctcatgtagaggtaggttctcttgtctctccttttattgtactggtactgaatttagcaaaacaaaaaaagccgtgcattccaataagataccaacttttcacttaagataccagcaaagggccaggcatggtggctcacacctgtaatcccagtaccttgggagaccgaggtgggcagatcacttgaggtcaggagttcgagaccagtctggccaacatggtgaaaccccatctctacaaaaatacaaaaattagccaggggtagtggcacacacctgtagtcccagctactcaggagactgaggcaggaggattgtttgaacccaggaggtggaaattgcagtgagcagagatcacacccctacactccagcctgggtgacacagtgagactccgtctcaaaagaaaaaaaaaaaaaaaaaaaagcagcaaagacatctttaaacaagaccccaagccaggaaaaactggctcttcaggtcaattttgataaaagaattggtgaaaattttctggataacttgacaatagatatcaagttggtcaccgcctttcatttaattctacttctgggaatatatcctaagaagatcatcctaagtttggtaaaagctttatgcataaagttactcattgcaaaattatgtataataacttaaaaaggctggttgtggtggctcatgcctataatcccagcgctttgggaagctgtaggtgggaggatcacttgagctcaggaggtacaggttgcagtgaactatgattgcatcattgtactccagcctaggcgaagagtaagacactgtcctaaaataataactgaaaaacaacagaagaaaactaaatgtcccacaataaaaatgatacctatggtatgtccactccatgcataaatattatgtcgccacccacacactatgtttaggaagagattatcactgcacgaggaaaaggctacattgtaatatcatggaaaaggaacaggataaatataaatttcagcaataataatgacaacatttattgccttgtatacagcaggcaagcatttaactaaacagcttcaattctcaaaactataggatatacacattatctccatttcacagataaagaaactgaggatcagaattaagtgccaaaagacatacagctgtaaggggcgggcggcgttagaacccagcaagttatccctctgtgaagcaaaatgtcctcaaatgaggactgattctcttttctgccccacaatccctaccattggccaagtggtacccacctagtgctgaactccagaaatcagagataaacaggtccttcctgttgagaaaaaaaatggcacagtcatgtcccacccatctcagggctgccccaacagtaactttcctgatcatgacctgaatgcttacagaatgaggtgccctgcaatgcagggcccacccttaccaagtgataggagggggatatatgttgaatatgtccagagccagagcacatactgctggggctcagagactgcaggagagagtatgctggaggaggtccttgattcccagagagagatctgggtctattctcagtctacaacagagcctagcatagaattgcagctcaataaatggttgttaagtgctcagaattagcctttctgagctttagtttcctcatctctaaaatggggataaaaatcattcccaacacggaggagtttagaggcataaaatgggttaacattcttagcccagtgtctggcacatagcaggtactcaacaaatggtatttgttattataaatagttttaaggggaaagtaaagagacaaaaccaagtgtctgggctttctttattcaagtcaactggttttacagacccagagcaaaagaaagtcaacagtgaattaaaatgaactggatttaaactgacaagccacagccagagacagtgattatggggttcagaaaggagtacagagaattgaaagtcggcccagaggctgctgcacgtttctcacagagggtagagagttctgatgtacacaggaatgctttatgaactggtaaatgcgtacacagatatgcgtgtaaaatgctggctcaatctctactcagagcgatggtgattgcaccacacttgggtgttgggagaagcaaggagctcctggggaatactgaagcagttgaggagatcgtgacagtgtcaagggatatgaaaaatgccttgagttttccaaacccctaggcacattcactctcactggcatcctctgagagcttaaaaataatcgcaggtgctttttattcaggctgagccaaatggtcagcaactttctcttcagaggtaaactctgggacattactgcctcttgaccctaattctaggggagaggagcacacaaaattaatctaatttctccccttgtgacggcccttcggatgctgatcttaagtgctaactaaagctgttatttattgagcctaaacaaaactgcgaataaagataataatactaaataacaataataagtaacatttattgagtgtttcctctgtattaggcactctctatgtactttctaaggtacagagcaaggtatgtgagaatctgggctgggataagcaacaagcataatggaaagctggaagcactggtttttgtcacaaagacctgggtttgaaatctggttccacacattttctttgtctctttgagaatcagtgagctaccagggtcctagtatgcctgcaatgtttaacataaagtgtgtagaatgattaagctaatgtcaggcacatagcagctgcctgatgatagcagtcacgtgttcatgttgcttccctcgtgtcaccaccaccaataatatcaacatcggcataatattaatagcaaacactggcacagtgcttaccacgtgccagaaaatggtttccgtttactaattcattgaatcctcaaaacaaacctacgtatgtactattttcatccccatctcacagatgagaaaactgaggcacagagattataaattgtccaaggtcacgcagctgtaaccgtaataaaaggaaagacgacctttaactgagcgcttactataatccacatctttaatgagctcgttacctacgttaactcttcacaataactccttaaagggtgtgcattatatctccactctacagatggggagactgtggctcagaattgcccatgggcgcaaagattccatcagggccgagcctgcactcactcagcctcccagatgcgacgaagcacgactccgctgtcagactcgaactccgcctcggggccccggggcgccgcctctctcccccggggcgccgcctctctcccccggggcgccgcctccctccgccgcggccgtcgagccgcggagcgcctcttccgcggagccgccgcctgccaggattccagcgccgcagctgcggccgcagccattggtctctgacgtcagcggcgtgcggcgcactcggcacgtcatcgccgcgcgccggcttgccaggagctggagggggaggtaggcggggcggcgcgtgacctaaggcctctctgccgcgcgcgcaggtacggggcagaagtcgcaggtacccagctgctgcccacatttctggtccagagtcccgaaccccgagcactgggatgcctggctactccggtgggtgggcggcgctcggagcgcggggataccgaggggcgggcccccagcttagagcgtgacccgaccccgcctaatccttaggcgttcgcccaccatttcccagtcccgtagagctggggccagacaccgcacagccctagtgctgttaccagtcgctgcctgcgccccgggggctgcgcccagcagcttcctggcccttttccagccattagcgtccgttttccagccctgctgccccactgaggccccttcccacagcagtatcaccagccccagccccgcgttgttactattacttcccaggctaccagatccttttctgctcatgttccgacgtctcttcctactccagggccattattggtctcttctggacctttcagagataagagaggacctcggtagtgtagggcccagtcctctgggaacaagggatggggagttttaggctgctgtccttggttccagtaacagagataccccctccacaggcacccaaatatgctccatagaatacaatgagtgtggtcctgtggaggcccaatccaaaatatctagagctgagaagagatagagattttacaggccgtcaaatattcaatgggggtcgtctctagagacttttaacaaactgtattgtgtacccacagattgcagaatggtgagcaaacatttgagaccatgttgctaaagcattaagcttggagaaagtgacagtaagaattagacaatagttttgaagtgaccaagaggttgtcacatggaagaattagaccttgttttgtgttttcctgcagagcgttatccagactagcgagtgggaggcagatgtaaaatctggaacgcagattttagtttgttggaaggagaaatgtaacatagtgaaccacgcatctctggagggtgtaa

SEQ ID NO: 9313 - DNA, 6000 bp, Homo sapiens
aaaagaagcaagttaaagaaaataacatgtagtaaggctgagagtgagtgtgacttaggaaccataaacctggtgttccttccatgggtcctagtttcaacatatctctcaaaacatgagcatctcaccacctggagcagaatttcagagcttaaagataagccacacttttgccttcaaactaaaactaaggtttcatttcatcaggtgctcaaccccagaaatcatgatgagtccaagtttaatattgacggaaaccagtgaagctggacttccaaggggctatgttgccttcagccttttcgggggcttctccaaggcaattttgactgcatgggtttggctctaaatgctggctttttgtttgtttgttttggtttttgttttttgttttttgttttagctagagtctcactctatcgcccaggctggagtgcagtggcgcaatctcagcccaccacaacctccacctcccgggttcaagcaggagtgtccctaagcactggctttaaaatacaatgcctgaggaaactggggacttcatattgtttcaaagctagatagatcccagcttgtgaatctttgagtctcaggcctttggaaaggcaaagcatcttgattatgagagagcggctctcattctcatcgacaagaggcaacccgtaatcttttagacattggagcataagcccaacgccggcagtgtgtatatgtggggtggaggcaggaggatcacccagaggcattgaatgcttttgtgccagcatgagatgctgataaatacacagcaactgggctctggggaaaagacatggttccagggtgccctgcagaggttctaaagagatgagccttcttagagccaaactgccacgacagccaatagcctgggtcagatacttaggatcaacgaatgctttgtgaagcctggatccccagctaggaacaataatactacacccttccagcaggagaagaaaacctgcccacttacttttacttcctgcccactgccgagccactgccttctatcagtgtactagaaagggtgagagagacctgagtttgcattccagctctgacaattaccagctattatccttggccaaatcaaattacctgctggagcctctgtttccacatctgtaaaatgggagtaatgataataaaacaccaaaagcttggagagggtaaatgatcagcttgaatataataattataaggtgtttagcacatagcaagcacctgaataaagtgttttctgtggttgggcatggtggctcacacttgtaatcccagcactttgggagtccaagacaggtggatcacttgaggtcaggagttggagacgagcctggccaacatgaagaaatcccatctctactccaaatacaaaaattagccaggcatattggcgcatgcttgtaatcccagatactcaataggctgaagcaggaggactgcttggacccaggaggcggaggttgcagtgagccgagatcacaccactgtactccagcctgggcaacagagtgagactctgtctcaaagaaataaataaataaaataaaaataaataaaatggtttttaaaaaaattttaattaaaaaaaaaaagtagagacaaggtctcaccatgttgcccaggctggtctcaatctcctgggttcaagctatcctccctcttcagcctcccacagtgctggaattacaggagtgagccattgagcctggcctaaagtgtaattattgacataacatcaacctcatcctcttgaatgtcagagctggaaagaatttttggatcaatgtgtattatgctacatctattcttcctgcttttgataaatattcttcctgcttttgataaaacctcttaagtactgggttttgcctagatgctgggaagataggttggggaggaagacagaagaggtatctgctctaggtgttcccggctgaagatgcagacaggaggaatgaattattttgtctgccttcaaagtcacatcaaattcctgggctgcacagtctggtgtctggtccaccacgatgtcctgaggggcaattagccttcctcaaggaggtgacagacagattgagacctggaaaggttcactgagctaggggtactgagagaagtcccaacctagacaacaagacgatcattctgatcctcctccttagcctctcaactgagatctgccaattctgtcttccaaacctctccggaaccaaaacaccccctccatgcccacatcccctctctgggttcctgaattatttcaacaccctccaaaccagtttctgcctgtttcttcttcacacagcaccagagggatctttgcagaaagtcaggctccccatgcccttcccctgttgaacaccttccctgtctctccatcactgcaagagaaaagccccgactccttcccacagcccacaaagctctgcagcatccagccctgcagacacctctgatctcttctctcacctccaccacatcctgtccactctgcacttcatgcaaggccccaggctcgcttccttcctgctaggcctttgcacctgctagattctgtgaccagtgcactcttccaaggatccccacccatgcctctggcatgtatacacacgcctggccctccctccctggaccaggttaatctctgctgctcctgcctcatcagttacaggtgctcactttactgtgaaggcttgttgaaggatctagcttccccaacttggacctttgtccccctgttagctgctgaatctgtgcctagcatagagagctcaggaaatgccattgctagaatgttattaaacaaatgcccccattcacacctcttcctctgaactccatttttttcatccacaaaaggacattataaaacaccctgctggtgtttaatctatgtgtctatcaaatcagtcatatgaagtctctaacatgcacgcaataaacactatgtaatgttgttgtattgtttccagaccagtaatggctggctccatggaggcagctttatcagtcccagcattttccataaggcaagcactaactatttattggacacatgaatgaattaatgaatgaccaatgaatgaacatgtggctggccatgggcaaattacttaatatctgtgtgccctagtttctgtgtgtgtgtgtgtgtgtgtgtgtgtgtgtgtgtgtgtactcacccaggatggagtgcagtggtgcgatctacactcactgtaacctctgcctcctgggttcaagcaattctcgtgcctcagcctcccaagtagggggaattacaggtgagcagcaccatgccctgctcattttttttttttttttttgagacggagtctcactctgtcgcccaggtgggagtgcagtggtgcgatcttggctcactgcaacctccacctcctgggttcaagcgattcttctgcctcagcctcctgagtagctgggactacaggcatgcaccaccatgcccagctaatttttgtatttttagtagaaacagggtttcaccatattggtcaggctggtcttggattcctgacctggtgatccacccgcatcggcctcccaaagtgctgggattgcatttttttttttttttttgagacagagtctcacttgttgcccaggctggagtgcagtgcaatctcagctcactgcaacccttgcctcccaggttcaagcgattctcctgtctcagcctcctgagtagctgggactacaggcatgtaccaccacacccggctaatttttgtatttttagtagagacagggtttcgccatgttggcctggctggtctcgaactcctgacctcatgtgatccacccaccttggcctcccaaagtcattttcgtatttttattagaaacgaggtttcaccattttggccaggctggtcttgaactcctagcctcaagtgatccgcccgcctcgcctcccaaagtgctagaatcacaggtgtgagccatgcacctgacccagaaatttattttaaacagataatatatacatatggcaaatagaaagttaaaagagaacaaagaaccaaagttcacaatgaaaagtaagcctgcatgcctaccctaccttttcttcaggtattcaatgcacaagcatacgatgcatagatagctctattatttttccaattttacacatgaagaagcagaagcactgaaaggttatagaacttagactgtgctaagatttatcagtcaggagttttgtttcatttgtgtatatcagggcttcacaacctttacgctattcggcattttttgcagggttttttttgggggggtagtggcagggctgggggtggaaagggtgtcctatgcaccgcagaatgtttagcagcattccaggcctctactcactagatgccagtatcgcctctccacttccccagttatgacaaccaaaaatgtcttcagagattgccaaatgtcgtggtggtggagggatgtcagggcaaaatccctgataaatggagagaatgtggtatatccacaaaaactccctccaaaaccactggtgtgtatgactatacatcagaccacccctttcttttttctgtgttttacacaaacagtagcacgaatacaccccgctgcgggtctacttttcttttcttacaccactttttggtgatcattccacttcattgcttacaggcagaaaggaacttctcttaaacagaactgaccgggagaagtggtgagctgcccgtcctaggggtaagccagcgagcagacaggggcttccagggcggcggggcggggttcccggggcgagcctccgggaaacttcccgaccagcctctgctcacctcgcggtcccgaggcgcagtggaggggatggggcggggcggggcggggccgcgtatcgggcccgcccccgtacgtcacgtcgccgcggccccgcccccgcgcgggcacctcccccttccccggctggggcggctggagagccgggagtcgctgggtgcgtggggctgcctcgccgcgtctcgccacggtaggtggccctggggcggcagggggtggcctcgggttgcaaccgggggcgcgggctgggggccgtgcgggtcggcctcgggcgcctggcagccctccgtcctggcggctgcctccgggcccggcgcgactgctcgggctccggggctgggagctgggatctgggaggcaggcaggcggcgcgggcgcgcggttctgggatccgcacccgctcggcgtcccgagcgctttccgcggggtgcggcatccaccgggcccccgttaccacgcttcccgcttcggacccagcgcctgggagacgctcagcgtctgttggcggggggactgggggggagggcggcgcgtccccgcctccggagtccccaacctcgcccaggcgcgcggggacccccaggcgggcgccagggcgcgtggaagttaacttgcagcagccgtggagttgcgaggagcgtcagaagtggaggcgttgggggcggaaatcgtcggctggggaggtgggcgctgggagcactgggttggggagccctagtgaacttggaggtcactggtgaggagtggagaggaatttgacccgaggatcccaccccaacccccaacctccctccgtaaactccgcttctcggtgtgagctggatgggaggtgcccggaaagccgggactgggactggtagcaggggactgggagcatgggctcagaggctgagcacgcctgacctggcagagtcgttgttagatgggacagaggtcgaggtctggcattcccactcaaaggcccgttccctagggaaggaaccatccacctcagcagagtcattagaaagaaccgtgcctaacctcttgcccccttccccttttacagatggggagactgaggcttggagaggtcacctgcccgtgaccctaggattcacagctaggatgtggcagagctgaaactcactcacaggcctcctgacttaatgt

SEQ ID NO: 9314 - DNA, 6000 bp, Homo sapiens
gccacttactgtgcaaccactggcaagttacttaatatctatgcactgcaatgttctcctctgcagaatggtcatatcatcctcttcctttgcagaattgctatgatgaataaattcactaaatttaaacataatgaagaaggaccaagcatggaacagggcacctaacttgagaaatcatattaaaaagttataaagagtcaattatcagcttctgaatggtttcatttatgatggcacaatggagtccttcgcactcccactgtgaaagtttaaaatgcctgggtattttactattccaaacacattactcatttgttttactggataactgaaagataactggataatatactgattttacttggaggtgcagctacatgtaattattttaaagattacctgggtggtctgtgcatatccttgagtgggctgggcggtgtaagcactgtagctgcaaaagaattaaatgcaataacttgaatagagaacattcaaataccacctctacaattatagaaggctccatattcaaaaaatattaatcacacacaaaatacggttataaaagactgacttacccctgctgcgctgcagcttggctataggtactgtaatctagaggaaaacaaggaggaaaaatagtgtaaagttagcagaaacaaggagaagagaaaaaagggggaaagaattcacgtggcaggaagaattctttaaactgtagggagacctgccaacacaggtccaaatgagtcccccttacctctcaacatctaacagaaaaaaaagtctaaaccagttaaactcaacatttgactgtgggactagctaatgaggtcaagatcagctgatttggcaggtatactttttatgttcccatgaccacaaaacccatcccaatcccaactgtcatttaaaatacaggatgatcatcaatatcacagactgacaacaagatctactaacaggatcagaagtttctaccctcatataaaacggaggcatgcaacaataatacaaagtttaacactagattggttacgttagaacctacctctcctcaaaaattagttttcactcccctcactttagcaagttagacaaaccatcattccctagctcaacgacagtgaaacggaatggcagacaagaaggcagtcaccacactccagtgttttaaagggtttgctgtgtcagaactatatttgtgcagcaacttaaaagctagatatattataaaccctggtgaagcagagctaaggcagaaccctgaagactggcaaagaagaaaaagcatttagtctttctgggaaaaatttggtaacaccattgtctttcatacaactcaaaatgatttcaacttaaaaaaaagacatgaattttcatcccttatctaagtaaacctccctataattttccttttcctatgaaatttataacatgcatccaaagggaccaaaaactggtccactgaggtgtctacaagtagtaaaaacaaacggaaaatagttttcagagcgctactgcattaaagttagataaatttagtttttttttaaaggcagttaaagtaattatttttgaaaattctgcccaattctttcttctccacaagaacacatatcttgttctgtctgaagacagtactgccattaggacggaaaaaaggggtcctttattttccaatcagaaagtagtccctcatccaaaaccaacaattgacagctcttcatggcatccacttcatggaatccaaagccagcctcacaatccctcggcggcctgagagagctttgctgaatccatctcttcacgttggcttatctgcctacctctctgtactttactggactactttctttcctttgtacacactcttaactcaaaaccctgaatcaccaagaggaacaaatcaactgcccaaaggctaacctataatgaaaaaaataatctgttcatgacaatcttaaaggcattttcaatagcactacaagtcatactctctctgacattaaaactaaatgcagatcattttttccatgtggcatctacaaaataaacacagcaatgaatcatttaacatcaaatattttaacccacgttttgttgaggtctttgcttgagaagtgattgtaaatcactgtcatgtaagttcaacgtttgcaagacgacttttacgcaagagcagttatgtaaaacatcaaactggcaaagctgatatggaacaaccaatgacctcttatcagtgagaaaccacaggattcggccctatactaactggtgggctatagaaggtagcaaatttgtttcatgaacttacatttatcttcctagagcacacaaacatcacaggccctcaagcaagctattaggttgatgcaaacgtaattacttttgcaccaacctaatacaattacaaactggtcagattattcagcaaccgtgttcgtttttaacccccaaaagtgagccactgacttcactaaaaatcacttcactgtgattgagcgctgggggttctagattgctgcgagtctgcattccaattctttgttgcactggatatatatgctttacgtacttttctacatgagataacatacgaggagagaaaacttctattattaacccaaggcaacggtttaacactttagagcagtcactatggaagctgcttcacactacctgagttgagcttcacagtacctgagctgaagtcagcataggacaaatttgtggaatgcttatgctggaaggtcagaagggctcaaaagcttaagaggtctagcctaacttctgtattttacaggaaaggaaactaaggaccagattacttatgtgactctctgaaggcccccccagccaggcctaatgtgtttactttgtgtcaacagaaaccacaactgtaattctaatacagtacagcacatggtagttactggtgaacaaggtttgaacaaagttgactgaaaaaaggcacgtccagccacgcaaaaatgtcaacgcacacgttttgccttttcaggcttttgcagagcagaagagggtggatagggcacctaggaaaccacttcccaccgggaggttagctgtggtatttcagtcctctcttctaccggcactctttggtatccactctttggtatcccggcacgaacagccaacacttacctgtttattgaccacagatggggagaattcttaaactgtccttaagttgctggattctggactccaaaaactctggagtgcccagaacttttcctgtcttccttctcatcttctcccactgtctctaaggcctggaaccaggtggcctgagaatacccccggggcaaaaatgctccaccctgccaattttcgcgggttagtgtacccacagattgcgaactgcaggtgatggctaggcgacactcttaaacgctccttccatcaaggaccactctactcccattttggagttcccaaccggggcttgcttgcaagtgcctttaagattgcttctactggccttttttcccctctcctctgtcgacctacgaaatcaacaggcctgccggcctaacgcaggcgaataaacgtgcgaggccactgctgaaacataattcaaatgaaggctcggccttttgttcctcctaggtcagagagaccagaaatatctttctggtagcgtttctcgtctctcgacccaggctggccttattatacaacggatgtccctcggcgtttgcagaaaaagggccctgggaagccacttaattggttttgggggaggggaggacgtggattaataacgataaaaatggagaagcccaagaaagcggcaaactgggggccctggaggagggaagcacattctgtctaaagcccaggcgagcagaagttcggcttggggctggaagccacagagggggcagctcggcagcgccagacgccccagccgactgggtcttaaggatgacggggctcccgctcataggccggcacccctcggcccacaaatccacggtatctttatttgctttttcccctggtttctcaggaaaccctgaaaacggggagggaggcctcacagggacagcagcctgcgggccccccggcggtttcatagtgaccggcttgaggcctggccaaatcctccccttcacgcagggcctcgaaggccgcaggccccgcccacgtggcgggaggcccggagctcagggcgcgaggaccgccacacaatggaggccaaggcgggccccgcgcgcccccgccgcagcaagccccccgcgcgccacgggcgccggaagattccagaaccggcccgcccggttgggggaggggagaggaatgcggatccccgagctcgtcgggccgcggcgggtgcctcaaccccctctcggcaactccactcagtcttcccagccaagcccagagacgaacgacccccagtttgggcgttccggctaccgccggcgcgaccgcagttccaccatactcacccgtggacgccattttctctccttcctcctcgttctctcaacgtccgtctccctctcgctttccctctaggcgccgcactgcgcaggcgcaaatctcgcaaccccgggcgcgaccatcgggccaggccacgggggtggggtcaggagggatgaaccaccgcttactcgttcttcgcgtccgcaactcttgtcccagtcctctctaaagagcgcccgacgtgacactcgggccaaaatagcatctaaggggccagagcgggggtgagcgggtctcagcgtgaaaccggagaggctctcagcacgagactaggctgtttggaatggttccgtccgctggctctagggacggtcgctgaagagtcggccctgcagggagacggagatcggcgggagggctgggggaagggacccggactagaacaactgctgactaatccgcgggccgcggggaatgggtggcgcgccagccggtcggcaggggtcacgcggccgggtgtgcgcggaatggattcagggttctcgggtcgcgcccgggagctagagtcctgactcccagccggggtccccgaccggcctttcggggttgccgggcgcgctctgcagtgagtacccgggacgcgtggcccgggccagcggggaagggtccccaaggccggtcggctgggtgggaggcctcgaacgccgtgcctggccccgagaccctatccccggtaacggtcgaggtggagcaggccctttaatcatccctcatccgatatccttgtttctacagaaggggaaactgaggcccaaggaaattgagtatctctgcaaagtcaccagctgagttcgaaccagacagatcctgggaccccctactctatccgccaccggaagaatctccgtccttgtctttccattctgccctcccggcttcccagtaaggtaggcagggcctggtggtgcactgccccgtttcatagattgaagaaagtgaggtccagggggctcaagtcccagttccgagtgtccacgggtaagcccttcacccttgctaaggtgcccagagctggggaatggttgtgaggtgtcgatgcaggaggaggtttacggtgggtgccttggccccaaaccctgcctccaggcaaggctgaccctgcccaccttcctggacctctagccccagccccctaggtggatgcccgggtccgcgaagggcagggttcaccttcaaatccctcggcaggaccaggagccaagctagtgtccttttttcagtgaacatatataaagcactggctgtgtgctgtgaataccctggggaatgtggggttggatcagaggagccatgagctcagaccacctgcctagggagacagactggccaagctgtgctcctaaggataagatccatgatgttagggggccagaggaggggaagggatatttgagctgggcttccaagggtgaaataggagtttgcctgctggcaaaatggagggaaggacaatgcaggcagaggagctttccacatttt

SEQ ID NO: 9315 - DNA, 6000 bp, Homo sapiens
aggtgtttttttgtttgttcgttttttgttttttcgagacagggtcttgctctgtcacccaggctgctgtacagtggtgtgatcatggcttactgtagcctcgacctccagggctcaagcaatcctcccacctcagcttcctgagtagctgggaccacaggtgtgcaccaccacgcctagctaattttttttttttttttttgagacagagtcttgctctgtcgcccaggctggagtgcagtggtgcgatcttggctcactgcaacctctgcctcccgggttcacgccattctcctgcctcagcctcccgagtaactgggactacaggcgcccaccaccatgcccgactaattttttgtattttttagtagagacgtggtttcaccatgttagccaggatgatctgtatctcctgacctcgtgatccacctgcctcagcctcccgaagtgctgggattacagcacccagctagttttttaatttttttttttttttttttttgagacggagtctcgctctgtcacccaggctggagtgcagtggcgcaatctcggctcactgcaacctctgcctcccgggttcaagtgactctcctgcctcagcctccagagtagctgggactacaggcccccgccaccatgcctggctaatttttatatttttaatagagatggggtttcaccatgttggccaggctggtctcaaatgcctgacctcgtgattcccctgcctcggcctcccaaaatgctgggattacaggcgtgagccactgcacccagccaatttttaaaattttttctagagtcggggtctcactgtgttgcccaggctggtctggaactcctgggcccaagcgatcctcccgcctgggcctccccaaggtgctggaattacaggcgtcagccactgcacccagcccaaggtgcagagaatttaagtaacttgcacagatgacacagccctggaaggaggtttcaaacccaagaaaagaaactttcagaggcttggaagcccagccctgcccagcctccttgtgtcctgatggctggaagaccagcccagccctcaagaggctgcctggctgtgattagtgggagtcatcatgaggatgtccaaggacccactacaccccaagcatgtgagctgtggaggatccctccattcgtgggtccaggaggtgagttactggtggtgtggagccatgattcgtggccaggacagaccataattagtggtgactggtgtggcctagcaaaggagtccagaactaacaccccctgggagctggatgcagtcttgggtgcctgacttcagggatgggctggaatcaggcccagttgggaagaaacacatgggtgaaggccaggtagctggtgttaggagcctgtgggcaatgaactggggaaagcagaattccccacctggtgcctgcccctgcccagccctccccactatctgtggcttgatccttcagggctcagtataagcccctcaactcccgctggactggtgcttaccctaggcctcctcatctccccaggcctgaaccagcccagagctcctgtcttcacccgtccctgcctagctgcatgtctgtctctttctccctgccacagagggtaggcaggaccaccttggccactgtgtgcctagtgccagtcccctctgctgaaggagaagatgcatgcatagttggcaggtggtccctggagccctggataggggcattcaaggagtgcccaggaggcccctggggaatagggattggaggggggcagcaggcaggaggcctacagcctttccttggggaaggaatgaggggactgatgagagaaccctgaaatccacatcccaggcagacaggcagcttcagccccccagcctgctggtctttaggaagcctggcacagggctgcacactcccattagagctcatttcagcccctgtggatggggggctccacgggacctagaggcctccccaagtccctcccgacagggggctgagtggtcactgggggctgagcttcagttgagtacttcctgagaaccctctgggtccagatgaagccaggcttctcagccaggctctggagcccaagggcctgggttccggcccctgtgctgccattttcctgctaggcaactgtggcccaatcatggcgtcccagggagccttagtgagcatgaggctgtgggtcaggcttggcacatcgcaggcccttgataaatgggcactgctgctaggaacgctgctgtgagagtctcctagggaacatggcacgtttgcagggcttcatgggagcctcaggacgttcccagtccacagtgccccttcccctcgccatccaaaaacacatactgggagccagagacgcctcacacacagctctgtttgcagtgtcggaaggagaagcaaggaaagtttttcagagaaagaatacccaggggtgggcgggagtgcgcctagcattgagaacaccttaaaaaagaccgtcctggccgggcgcagtggctcatgcctgaaaccccagcactttgggaggctgaggcgggtggatcacctgaggtcagcagttcgagaccagcctgaccaatatggtgaaaccccgtctctactaaaaaacacaaaaattagccgggcatggtggcatgtgcctgtagtcccagctactctagaggctgagacaggagaattgcttgaacccaggaggtggaggttgcagtgagccaagatcgcaccactgcactccagcctgggtgacagaccgagactccatctcaaaacaaacaaacaaaagaccgtcctggtgtcagcttttcagacttctgggttttgttgttgtgttgctgagtgccttgttatttactccttgccttgttccccgaaggaattgaagcagctcacaaaacccagaagcctgaaaagtcaaaaacccagaagtttggccagatgtggtggctcacgcctgtaatcctcgcacttttggaggctgaggagggaggattgcttaagccaggagttcaagaccagcctgggcaacatagtgagattccacctctacaaaaaataaaaataaatcagctggatgtcgtagtacacacctgcagtcccagctatttgagagactgaggcaaggaggatcacttgaacccaggaggttgaggatgcagtgagctaagatcacaccactgcactccagcttgggtgacagagcaagaccttgtctcaaacaacaaaacccagaagtctgaaaagttacaacgtgaaagaggacatcaagtgaagggaaaaatcatggtaggaaagaaagatgaagccagcagtccccactcactgagctagaagacctggaacactagacagaggtggttctgagcttcctagtggctgaggagaggagtgaaagcggaccccagcccccgatctagcatgggaggatgaaagcacagccattgttctggagacactttctggttgtcattatacaggctccctggaggatgtgcctcctcccccttcaggatttagctcctctacttcccctgggctggtgtgggcacattgtctgtgctttgacagtccctagatcccatgtgttctagaaccttctctcccaaagcagaactttttttttttttcctgttttctgttttttaaatctatctcagcctcctgacaagcaataagatttggaatatttgttgaggggataaataaatgaactccttagtcagtgcagagatctgtgcattgcggccatttcttgagcattgccgccatttcttgagcattgccatgtgcaggtcagagacgtgggagcccccacacagcggggaggagagcagaggcggaggatgggggggctgggctaacccaggctttccaagctgtgatggggcaggagcttctccactagctcgagggagggggaacttgggctctgggcgcctgttttggaggttgcatccctttgaggggcgctacgggttgcaactcacgcaggaaaggtgaccttagtagtgatggaggtggagtgggccaatttctggatctttatttagtcacctccagccttgctgggacagggatctggggctaagctgctgtggtctcggcaccctctgtccccacttcccctcgaggacggctgtttgaatattgtctagtgtgggccatttacccccgtgggcaggaggaaggtaggagggacttcaaaggagacttcaagggcccccccactgcccttctaaccttgcagattcccctctcgggcctgtttcctcttctctcaaccagcgatgccaggctgaggctgtaggttcgagaatcacgtaggtaatgggcctggcacatagtaggctctcaagaaaaggttggagcctcttgaggagtctgcctgtgatggatgcggagcgcagacccagcgcagtgcggcgattcgcccaaggtcacacagccgccccccccaattcggaccccgggcggcctgactccgggggccggggcttgtcgggagccagcgtgggggcgagcagtgtttggaagagcggccgcggcagtgggtgggaaggggcttctattttggagcgggtgagaggagcgggacacgcggaggaggtaaggaaggggtaggccctctccgggatctctgtcccccagtcaccttcctgcgacccttcctgggaggggcgtcctgggcggtgggggaaggtgggaggggcgggcggttacctcatcgccgcctccgggaggccccgctcgctcgcgccggcggctggggcggcgactccaggcgcggaagcgagagaaggatagaggcacagaggctccgggaggcagcgctgccccccgcgccccgcaccgctgcgggacccgcgccgcgagaggggcggacttcggcgcctcgcgcgtccgccggcgcctgggttggcgctgcggggcggaggcggtgtctgagcgccgctccggctctgctctctctcgagcttcggcacccgcccgagccgctcgcgcgcccgccacctgtctgcccactcggctgtctgtctgccctcccgccgccagctcctgcctcgggcctgccctctccggtctcggtgctccgaggggcgacgagaagcgcgacggggccgtggcgcaccgggcagggcgcgcggggcgcacggcctgggggcgcacggtgcggcgccggcccatgaggctttccagcgcggggagcgacagcgccggccggccatggggggtagcctgcgggtggccgttctaggcgccccgggcgtgggcaagacggccatcatccgccagttcctgttcggtgactaccccgagcgccaccggcccacggacgggccgcgcctctaccgacccgcggtgctgctcgacggcgccgtctacgacttgagcatccgcgacggcgacgtcgctggccccggctcgagccccgggggtccggaggtagcggctcgaggagcgggcaggggcgtgtgacagtgtgaggggtgtgcgtgctcggtgcacacgtgcgtgtccgcgtggaggcctcgggcgcctggctgtgctccgggatggagggatgtgtgtgcgtcctgggatacttgcgtttcagcccttcccgccgacctggagacgcccaagcccaggctggaggccgggcgattttgcccaggggcgttcccttgctcctgtgagcgcctccacctttgcctgcctcggctgggggtgtggagcagctcttggtggtgcataacggtgccttcccgagagtgtggcgttttgtgtttggggccttgagcagagctacaatgggagagactggggtcaggagcaggggtgtactttctacgggggctggtggaggggttcattctctgccctatcatttttgtcccctggagcgaagactcgtttagtaatttgtgcaaagtaaaggacagacctccgaccctagagcagtgaagaggaaagagcaggcaggattaagcagggcttcctggag

SEQ ID NO: 9316 - DNA, 6000 bp, Homo sapiens
cctggggcttagggccagggcacctagaactgcctcttctgccaaggccttggggaagatctgcatctccaatcagcccaaatcctgcagagctggtcgagtgtctgggtatcaccattcctcacccagggatagaggcaggacaccctctctgatgaaagatttagagctcaggaagtgaaatcttgccagactcatcttctgagccctggtcagatgctctgcctcctggaagccttccaggctgagttagttgttcattcttctgggttcccacagattttagataaaccttggtccctggttgtgtctcagcatctttaagccctggagtttggcaagtctgcgtatgtactccagctctgtctgccctctactagctgcgtgaccttgggcaggtgacgttacctctctgagctttggtttctttaccaggagggtagactaacaggggtgcttgatgcatcagctgtgagacttaaatgaaatgcaataggtggggcaattagccctctggcaccccagcccacctgcacctctctgtccctcactcagccttagagcctgttctgggctctctgcaggcgtctgcggttgctgtgtccttggcccaaggatacctggaatctttctgtgcccttggatgaaagagctgcttgcttgttggggtccaaagagaggtgaggactggccagagctgtccagtggaggcagaaggcctgggcaacacctgcagggtactggggtgtgccacctgctatccccaggaagcaaactcatgaatattcacaccactggagtgggagggagccagccagcttgctgctgggtgtcattggagcattcctgtctcccagtgatcgcagaggcagcctgggagttggacgtggctcaggcagtgggtagaaaggggcagccagccacagcccgaggtgagtgtgtctcttttgctccaccacaggggttacagggaaagtaggataccctgagacctgactggtggtgatgctctaagccagaaggtttaccatcctgggctgagtttccctttgtgcatgatgtgggggaataagtcctgtttctccttcattccctggagggcatcagttcagctaaacaggaggatggctgggcctggcctgctgccagctgcctgcactgatgcaggccaatgtgatgggcgtaatctagaagggcaggaatagatggagtgggctggtgacggggggaccgtccatcctgagtgcctgcagttgtcactactgtgggtggaggaggtgggagacccaggttctagtcctgtctctgctgctgctgggctgtgttaccccaaaggtatccttgccctctctgagtctgagcctccctgcctctttgtcttctgaccctgaggctaggagtctctggctacattgagatcatccctggacttggctgcctgcaagcctccatcgtgggccagtgggcacacactttgatggggttgtggctgggaccctgggaacgtaatgatgataatgatgataacaatgatggcaggccctgctgagtgactgtctgctctgcaccagcctcgggctgggtgctttccctgtggaatgcagaggatctgcacagcaccctgtgatggagggtcagctggtacaggttgagtatcccttatccgaaatgcttgggaccagaagtgtttcggatttcagatttttcagattttgaaatatatgcatatatgtaatgagatatcttggagatggaacccaagtctaaacatttaagtttagaaagaatttatgtttctttctttcttattgattttattgtttaagcttttttttttttttgagacggggtctcgctctgtcgcccaggctggagtgcagtggagtgatctcggctcgctgcaagctccgcctcctgggttcacgccgttctcctgcctcagcctcctgagtagctgggactacaggtgcctgccaccaagcctggctaatttttttttgtatttttagtagagatggggtttcactgtgttagccaggatggtctcgatcttctgacctcatgatccactcacctcggcctcccaaagagctgggattacaggcatgagccactgtgcccagcctaattttaatttttttgagatagggtcttgctctgtagcccaggctggagtttagtggcacgatcatggctcactgcagcctcgacctcccaggttcaggtgatacttccgcctcagcctccccagtagctgggactacaggcatgcaccaccatgcctggctaatttttgtattttttgtagagatgaggtcttgccatgttggtcaggctggcctcaaactcctgagctcaagtgatcctcctgtgtctgtctttcaaagtgctggaattacaggcatgagccaccacaccccatcttcatgtatgtttcttatacacatagcctcaaggtagttttatttttcccttcaggatgctaaataaacctgcgctttgactgagacctgtcacgtgaggtcaggtatggaattttccatttgtggtgtcatgtaggcattcaaaaagttttggatttagggacatttcagatttcaatttttatttttattattttttaatccatttatttatttttgagaaagagtctctctctgtcacccaggctggagtgcaatggcgcaatctcagctcactgcaacctctgtctcccaggttcaagcaattctcctgcctcagcctcccaagtagctgggattacaggtgcgcaccaccacacccggctaattttttgtatctttagtagagacggtgtttcagcatgttggccaggctggtcttgaactcctgacctcgtgatctgcctgtctcggcctcccaaagtgctgggattacaccgggcctggcccatgggagcttttacatgcatgtgcctcacatgtattactttcgtctgtaggtctcctacacaggatctctcctgtgtctcagtgaggtgttgtctgcctggaccatgtcctcatccacattctctgcacgggctctatagccctggacaccttctgccctgagggtcatgggaagtcattcatcacacattcaccaggtgccaggctcggggagctcagggatgagtcactggtaggcttgcctgcagcggggcatggaagggacctcacctctggcacgccggtgaaccaaggctgggtcagagtcaatggtatgataataattaatatgagttgatctcctgggtacgtgcattatctcagtctcacagccttagggcatggcatggtggcttacacccagcactttgggaggtggaggtgggaggatcacttgaggccaggaactcaagatcagcctgcaacatagtgagagcccccatctctacaaaaaattaaaaacttagctgggcatgggtggtatgcacttgagcggccgaggtgggaaattcacttgaggccaggtgttcgagaccagcctgggcagtagagtgagacccccatctctacaaaattttttttaaaaagtagccaggcatggtggtgcatgcctgttagtcctagctactcaggaggccgaggcaagaagatccactgagcccaggatttcaaggctgcaatgagctatgatcgtgccacttcacttcagcctgggtgatggagcaagatcctgtctttttaaaaaaattatctcatagcctagtgactgttctccctcaagccaggctcctggctgccagctagctcctctcccgacctcagtctgcccaggggctctgcctgtgattacagagcgctctgtgtgccttgatcttgctgttgtgtgtccattgcacacacgaggagactgaggcttagggagggtgaggttcatagcttcatgcctaagtttacagtagctaggcaggaaaggcacaaccagccttggacccctcaggtggctggcacgggagggacggacaccagggccccctctgctttccctccccttatcctggccgcaggctcagcccacagagacgggaccctgctgtgctcccaggatagagcttcctgtccaaccccacatcccccacttcctgcaatgcaactttccctccttccttcccctgggcttgggacagggcttaggacacaccaggcaggggctgccatggacaaagcaggaagcagcacattggagttccatagacctgggctctaattccagccctgcccccgctttgctgaatgaccctggacaagttatgtcacctcctggaacctcacctttcccatctaccaaatgggggtgacagcagggtggggggtggagtggtatccactgagtggttgctgagtagggtcagttagatgctctggagaggcaggcccctgctttgggcctggctcctaacaggggctcaaaagtaaaactaggagggatagcccaaggttcagtggctggcagcacccagcacgtgtggcaggggcctggcaagctttgagaaatagcaaatgggggccaggctcagtggctcacgcctgtaatcccaacactttggaaggccaaggcgggtggatcgcttgaagtcaggagtttgagaccagcctggccaacatggtgaaaccccggctctactaaaatgcaaaaattacttgagtgtggtggtgggcacctgtagtcccagctactcgagaggctgaggcaggagaatcacttgaacccaggaggtggaggctgtagtgagccgagatcacaccactgcactccagcctgggcaacatagggagacaccgtctcaaaaacaaacaaaagagcaaatgggagaatgaaaccagtgagtgaatgagtgaatgagtgtaccagtaatggggttgggggggtgcgggtggaggaactgtcctgggcggggccaggtggagcctgattggcggggcagggaggctggtctgccccctgctgctgggcctgaacctcagcgcctccactattgcagcctccctgattccagaaggtaccttggtgagtggggctgctggggccggggtgggtccttgggatttccagagggcaagccacaggaatcctaatccctcctcatctttaagtcagagaaactgaggcccagagttttggactatgatctggtccacgactctgccctgttttctgctgggtcgctgagaagtgggaggctgacaggggtgcttgaggctgaggcaggtttgtgctttgtgggcggcccagcccctactccttttggggttgaaggcaggccccccgggcctcaggaggggtacagataacactctaagtgatgactatgtgctggttgcttgcttagaaaagttctccagagaatggctaggggcgcctccagctttctcattttacagatgaaaaactgagactccatgagggttcttggcttgtctgaaatcacagtgctggattgaaacacaggcttgagggtcccagagcctgaggttggtgctggggcccctccatggctgccgggtttattccgctttgcaagctttctgatttgttacttaaatgtgttaagtaacaaattaactaacacatttgttaacgtgttgacaattattgcctttttttgagatggggcctcactctggtcacccaggctgaagtgcagtggtgcgaccttggctcacggtaacctctgccaacctctgccccccaggctcaagcaatcctcccacctcagcataacttttccagggcatagtgtgtgtgaccctcccccagggggactgactccagggacagtggtgataatgcatgcatgtagttattagcacatgtgacttttcctggcctcaggggcccagggcgcagtgcagtgtgagccaggacagaagtggaaagttcgggacaagagtagaaagtttggggacctggttttgcagctaaggggaggtgggaaggccctccaagccgcagctctctcctggactccagttcctcagcctgaactgcccc

SEQ ID NO: 9317 - DNA, 6000 bp, Homo sapiens
ccagctcctcctttcccctaggcaggtgtgggggagattcctgttgtgactgaatgtaagcacccccacctctgctgcagccaatgtagaggaagtggggcacccttcctgtctctttctgctctttacctccagctaagaagctttggaattagggggcccagggacctggagaggccttaaccctgtgaggaagtatagggggacccctctcccaccctcatccccttctgagagtggtcaatgtttacaagcccctgagtcccccagcccagggaccctgttgctttctttcactagcctcaatcttcctgggccttcgctgctcccctgcccttcctggggttggggtcggggcaggcatcgccctgtgttcccctgtctgccttgtacccacaatcatcccaccgctccaccctgtgtgacttccctttcttttacctactcctgtgaatactcccttctcccaataaaacttggtgtgtattctcaaaaaaattgaaaagcccttcaccaaatgactcactggtgaatggtacccaacaattaaggaagaattaacaccaatccaccttaatctcttccaaaaaaactgaagaggagggaacacttcttaactcattacatgaggcttgcatgaccctgataccaaaaagagacaaagacactgcaagaacaaaaaatacacagcagtgtcctttatcaatactaatgcaaaaataatctacaaaataggtaacctaatatagcagcatattaaattatacaccaagaacatggggaattttttctcagaatgcagggatagttcaacatatgaaaatcagtcaatgtagcatgccacgttaatagaacaaaggaaaaaaacacctggtgcagaaaaagcattgacaaaattcagccctttttggataaaaaacaatcaacatggaatataagaaaaatccttcaatataataaagccacatatgaaaaccctatagctaataggttaattttgtcattaatagctaataatgctgaaagactaaaagcttttcccctgagattatgatctagaccatgtggtctactttcatgactttaataaaaaattatgtgattagaacacttaacatgaactttaccccttaacaaatttttcagtgtacaaaacagtacttaattgtaggtacaatggtgtacagcagatctctgccactgattcatcttgtttaactggaactttctgcctgttaattagcaactctccatttacctccccacatgctcactggcaactaccattccactcacgaattctatgtatttgaccatttggggtacctcatataagtggaattacgcaatatttgacctcctgtgacaggttatttcactgagcataatgtcctcaaggttcatgcacattgttgcatattgtagaatattctgcctttcaaaggctgaataatattccatggatgcatataccacatagtctttatccatgcatccactgatggacattaggttgtttctgtatcttttgtgaatagtacttatgaacatgggtgtgcagatatatctttttgcgatgccaatttcaatttttttggatacatgcccagaaatggaattgctagatcacttgcaatttttaactttttgaagaagcttcataccgttttccataggagctgcaccattttgcaccctcaacaacagtgtacaagggttccaatttctccacatccttgatacttgtcttttttttcttttttttataatagctatcctgacaggtgtgaggggatatttcatactggttttgatctgcattttcccgacgattagtgacgttgaacaatttttcatatacctcttggctattggtttgtgtttttttgagaaatgtctaagtctttagcccattttaattggcttattagtttttttgtttttgccattgagttgtggggggttattttatattttggaatcaaccatacttcctctattcaacatagcattggaagtcccagccagaataagtgggtaagaaatagaaataattaaaaggcattctaattggaaaagaagtaagatcatctctattcacagatgacatgagatcaggagttcaggaccagcctggccaacatgacacaaccccatctccactaaaaatacaaaaattagctggaaatggtggtgcatgcctgtaatcccagcaactcgggaggctgaggcaggagaagaatcacttgaacctgcgaggtgggggctgcagtgagtggagattgtaccaccaccctccagcctgggcaacagagcaagactctgtctcacaaataaaataaagaatacataaagaaaaccttagctgggcgaggtggctcacacctgtaatcccagcactttgggaggccaaggcgggagaattacctgcggtcaggagttcaagaccagcctggtcaatatggtgaaaccccatccatctctgctaaaaatacaaaaaatagccgggcatggtggtgtgtttctgtaatcccagctactcgggaggctgaggcaggagaatcgcttgaacccaggaaatggaggttgcagtgagccaagattgtgccattgcactccagcctgggcaacaagagtgaaactctgtctcaaaaaaaaaaattaaaaaaaaaagaaaaccttgctgggttcagtggctcatgcctgtaatcccagcactttgagaggctgagacaaggaattacttgagcccaggtgttcaagaccagcctggacaacatggtaagacccccacctctaaaaaaatgaagttagccaggcatgggtggcatgtgcctgtggtcccagctatggtggaggctgagatgggaggatcacttgagcccaggaggttgaggctgcactgagccatgcttacctcactgcactccagcctgggtgacagaatgagaccctgtctctgagaaataaaaaggaaattctacaattcaacagcaacaaaaatacaacataaggctattctgggtacactgccaatgaggtagtcctgctccacaaggagcagtgtaaaaaagaatacaacataatttttaaatggatgaagaagttgaatatatctctctccaagaagatgcacaaatggctataagcacatgaaaaaatcaacactactagtgattgtgttagaagtgtaaatcaaaactatattgtgatacccacttgatacctactagcctgtctataattaaaacataaatgacaagtattgaagaggatatggagaaattaactctcctatgcactgtggaaagaatgtaaaatagtgcagctgctgtgaacaacagtttggcagttctacaaaaagttaaacacagaattatcacatgcaattccacttctacatatagactcaaaagaattgaaagtagggattcaaacagatccttgcacaccagtgttctcagcagcattatttataatagccaagtatagaaagaacctgaatgcccatcaacagttgaatggataaacaaaatgtggtatatatgagtattggaatattattcagccttaaaaaggaaggaaattctgatacatgctacaatatggatgaaccttgaaaatgtcatactaagtgaaataaaccaaagaggaaaatattgtatgatttcatttgtatgaggtacctagaataggcaaatttatatagtaagaaagaataacagaggttaccagggcctggagagagggagggatggggagttagtttttagtgggtacatacttctgtttggagatgatgaaaaagttctggaaatggatagtggtaatggctgcataacactgtaaatgtacttaatgccaatgaattgtacacttaaaagggattaaaatggtaaattttatgctatgtatgctttgccacaataaaaaatgaagtataaaagaagaatttctgggctttccgttttttcatgtgtgtttttggttttgtttttttgttgttgttttttttgtttgtttttgagacaggatcttgctcagttgcccaggctagagtgcagcggcgtgatcatggctcactatagctttgacctcccagtcacaggtgatcctccctcttcagcctcccaagtagctgggaccatacgtgtgcatcaccacactcagctaatttttatagagacaaagactccctatgttgcccaagctggtcttgaactcctggcctcaagtgatgctctctccttggcctcccaaagtgctgggattacaggtgtcagccaccgcataggctttacttctaacttcttcttggctgtagtccaggagtcttgtttcctgagtcctcatgatccccatcacatgcttccaggttgattcactctttgtacaaccctctgacccagcgctctccacagctctgccctcaactcaccacatatggtgcttgaagagccacttcctttcctatacaggccaccaatgtctttttgtggcacatgaaacccacttcagagaaatgtgggactttggaatccacgaaaggcataattcacttcactgtcaagggatatagctcattggtcagaaactgtatctgttctctgaaggaccattgcattcggtccctcctggctggtttctggtaccttctagtctgtccttctcccctccttgtctgtcttcatttctctcaaatcccccctccacctgggcaaatctctttaaagaccctgtctttgcactcagagaacgccccatgctccacctcaaattctcccctcatttctggccctgcatccctcattctcacactctacctaggctagcactcactggtggagggctggggtgccacagctttggagaagaggtttaaaggtctccatatccaggagctggctctgatatctcgccccacctgcctgaggctgatcattaacccagaacttatataaagatggctcatgcgtggaatgggtatagcactgcctgcagccatggccagtacggttagccccagcaccatagctgagaccccagagccacctccattgtctgaccacatccgaaatgctgctgacatctcagtcattgtcatctattttctggtggtgatggctgttgggctgtgggtaggtggaatcccagtggcttttagggtgggcacaaggtttaggagggggtatcttaaggggggaaggggtgtggttgtgacaaagcttttcacaaatgtcattgtgttatcagaatcattttcttgtgtgttgcataaataacgcttacaatgaactaatgtattctcctaataaccccatcgtgtgcacacagccagcaccgggaccttcagatttactatgcatccccaacacctggcataatggacaaagagtgtatttttattatcgcatttctttcgctttcttttgttgtttgctcactttctgatttagtgagttggactcttcatttatgttgaatttttttattttaataaatttgagactgcaaattttttttttttttgagacggagtcttgctctgtcgtccaggctggagtgcagtggcgcttgcttggctcactgcaagctccgcctcctgggttcacgccattctcctgcctcagcctcccaagtagctgggactacaggcatgcgccaccacgcccggctaactttttgtatttttagtagagacggggtttcaccatgttggccaggatggtctcgatctcttgaccttgtgatccacccgcctcggccctccaaagtgctggaattacaggcgtgagccaccgtgcccggccgagactgcaaattttattgcaagcatggctcaatgatacctcacatggttttcataagtgagaataatcagagcagttaagatagaagttaaggattatgatttttttaagttcttccagccctgggtttttacaaagcgactgtttttgaagtcctttaaaatttgatgctatagaacactttccagcg

SEQ ID NO: 9318 - DNA, 6000 bp, Homo sapiens
gattattggcctaaataaaagagcaatgtttcatgcccggtgcttaaatttttgcttgaagtgtgtcaggacagagcatctttggcagatatttatctagcattggtttaaggaaaactaggctttttcaaacctgtgctatctgaatgctgtttgattcttgactctcataaaggacatcttaactttacctactggtaagatatggaaaaaatactatgtgactgctaaggatctggaagccatgaaaatttaattgctagttaaaaattttaggcagctttctgtaggatcagacccgacatttagatgttttgataaatataacattaattaagatactgcaatccttccatactggctaagtagcccttggagtaatcacccctccactaccactggctgccattcccactataccctgtctcctcacccctgctgcaggaaccactccttcctcccaacatcaacaccaccatttcaccagaacccagcactaaagaataaatgtctggcctagcagaagccttcaggactcagctctaatgctagtgcccctgtggctggcttgacttcaattaagttggcaggtgggtgccctgctgtacaggttgcttaatcttttaaatatcctctttgtgagaattcaatcgtcttgttatgtagctcttgaagaatgtgcaaaacattcagaaaacagtcctcaaatctttgaaagaacgtcctgtttggaatggcaaacataattgtgccgactttgagacagttaagagtatttggtaaccctcctctcaaggatacaatatttcctttcttggaggtgagaaaagagttgagaaactaaattgacttaggagtcaaaattggactcaggtcatttattacataaaactagatttgcctccaaactttgcactatgtttttgtttgtttgttttgagatggagttttgcttttgtcgcccaggctggagtgcgatctcggctcactgcaacctccgcctccccggttgaagcaattctcctgcctcagcctcctgagtagctgggattacaggcgcccaccaacacgcccggaacattttaccatttttagtagagtcggggtttcgccatgttggccaggctggtctctaacttctgacttcatgtgatccgcccgcctcagcctcccaaagtgctgggactacagtgcactgtgttcttaacgtgcctttagattccccagttcctaatatcaggcacacagaaaaacggaggtgagagtgtttcctggcttcctctttgagatgcctttagggccccctagtggctgctttaagacctcaggtttcttaggattcggtctccttgaccctaataaaaaataagagacctttccgaatctcttcagtgacaggtacaataactgtgtggagataaacagataacagttggtttagatagctcatttttttttttcatttttcagttctcagcaaaagctgcgctcattctttacaaataacagatatatcactttacatattttattctgcattctcatactatatcgtagcggaaatccttttaagacatttgtatcttggttgtgtcaaaaggctataattcctggtaactacatcctacttcagggtttccatgtatatgtatatacatatttagttgcttggactggggagttgaggagctttacaattttccaacgtaatactttaaacctggggcttgatgtactaaccagaggactcagtatgtggcacatttcagtctgacaacattaatatcatttagagcattagctatgccactgactgcaggcacttgcaaccttgatttgataaaacaaagcttttccacatttaaggtgcttattgaccaatgcaagtacactttgtgaaatccactaataaggcattatgtcttcaacgtgccttactgaccagcgtgaacattgctagctcccacaccatggtcacatttttctttcttagattccatctagagaatgtactacacttgagtcattataatggagatgtttctttcccggaagcttatcttttagtttctgatgttattcaactatttctccttcgcttgtaaatttcaggtcttttcctttcctcagtcacgttacctttattaatatgctaatgtgctgtaataatgcattttacaccactaatgaagtgaagcaaagcaaaacgtaaaaagaaagtacaaattctccctttaactttacccggttccggggagggggtaggggtgagagaggaggaagagagtaggaaggaaggacattcgggcggcaaaaaaataaaaatgatccccttgttttcagcgcgttctggaacagagctgcacgtcagaggaagaactgagcagccttcgagctaaaagacttggcattaaactttgacactttaatggtctctaggatattagatagtattttttcatataatgttcttctccgacacggtaatggcatcagaaacagaatctgctatgcctgccaacgtgcacggtgaggctcatcgccgcagaggtaagacagcaggaccccagcttcgcagttaacttatcccgaagctccaaagcaaacgtcttttacttcttcgccggggacgctgctgtaccaccgctgcctccctttcgcattctgctgggctcggtcagccgctgagattaggtaaacagcgctccggagccggggcaaagcgggcgctgctgctgctggtgggggtcgttgtttcacgaggctggagggaagggggatgggagaagggtcccagctcggtaaagccaaaggccgagagtgtggttaccgaggcgggagccaggtccggagccaagcaggggccaagcctccgaagcccttgccgccccacccccccagcccgacctcgaggagtggggtcagctgggcaacccaagctcggcggccctttcccgcgcgccccctccccagcccatccttcccctgccccttccaagaactagggtgggcttcccgctgcctcgctcgagtcctggagagcggagaggcgcgcagagggaaggcaaagacccggcggcccgcccggctggggagaggtggagacccggggggaaggggaccccagaagccctgggaccgagctgcggaaaaacccgggagctggatcgcgcgcccggagctccggtctccgagtccgagttgtgcagctctcggcgtcctctttctctccctgcctctctgctttcgcctcctctgggtcttctctcgagggcatcctccttccatccattctcacacccccgctcctgtgccccgacccatttcacccacttctcctgtggctcgggaggactctccgtacccccaccctggtccctagaactgggaggctggaagtccattcaagggatgttgcgcgccgggttcttatgccaagagggaaagagcgagaataaaatcagcaggggaggggcgtgttgtgcgtgcatggggtgtgtgtttggggtggaggaaaaagaaatgtagtttcctcagaggaagaggaagccttggacaggattcttggataccgatcccagaaagatgccgtcagagcccttcggcggggctcctcacagactccggctgccccacagcatgcccacctccgagagaagctgcgacccgaggcggggaaacttcctacttctcacgacggctgttttgtgcaatttggggagcaggctgcatggtcctgcaagcctgcgagcctctctaccacggcagctgcgggcccgtcccgcttcccttccccctttttccgcgaggcacgccaagcccgaggcggccgggagccgccggggttgggggaagaagggcggggagctcccagcttgcaccctttcatcccgacccggcccgggatcccggctccgggtgttgcttccgcctgcctgccagccagcgagctgaagaagcaccggggcggagtctcgccggggggcggagcctgtgcgggggcgaactctcggtccgcgcggctgcggcgcttgccattggccggccgctcggtcacggggtcgggggcgggcgccgacgcgggcgccggccccgcccccgctcggaacccagccccggctcgcggtcccccccggctgcacagacatgacacagacacacagtcactgcagctgctgagcgagtccggcgctctgggcacgcggaggcggcggggccagcccggagcccggaccccagcgcccgcccctgccggttcccgcgcggcggcccactcctggccgggcgcgggaggcggggatcgcgcgccggctccggccagcggcgcccggctgcccgcggcggctgcagcggccgcccagctccgagcgccgggcgctccgggaagccggcgcatctcggaggcggcggcggcggccaaggccggcgagcgctcccggcggcgggggccgcccgcctcggctccccgcacccaccgcgccgcgatccactcgccgcgcctccgctcccgtgaccttcccggggcgcctcccctagccccgcgcccccggccccgcgccccaggccggggcgaggccttttccggcgcttctttcccgcggagccgcgggcgggcggcgcaggccctgggggagagcgcgccgcggccggttgcagccccccccgcgccgccgcgttcggcgcccggcccggccagtctgctcctgccccgccgccgcgccggagcccgggcgcccgaagctgggggcgcggccgcgctcgtctcgccgggctgttcgcgggcaggccctgccctgaagggacgaatcggcttggagcgcgggaggtggagtcggccccggcggtcgctccctggacccaacccgaggctgacccaggcccctgcccatgcggggcgcccctggctcggaagagtcccccgggccgggagcagctccaggcagcggccccggaggaagaggaagaagggacagtgctcagcttgggggacccggaccctcgccgcggcatttggagccgggggcagtcccgaactctgtgcttggcaccgccgctccgagtagggcagcgcctgccgggaccctgacccggaccccctgcgcctcgtaggcggcggcgccgccgcgccaccctgttcttccgtgtctccctctgcctggcggcagtcacggccaaggtaagagccccggagcgcgagagtcgccgcgggggcgccgtggtgtgtagcgccggacaagttctccgaacctgtggctggtaccccctgtactcgggatgccggcggggaggccgggcacaccctctgctgccccggccgggagccctggagaggctggaggtggaagcccccagtctccgaagtccccaggaccccctcagggcctgctcggcttctgggcacacaggctgctggcagggagcgagccaggaggagtttctggttaacaccacgagggcatgtgaccgatacccgcacccccggccctcttgttagcggtgagcacctgtggttcgcggagcctgccgtgtttggagagggccctgttgggcggtacgcaactacctttcgtggtgtgatgctgtgaataacttttcttgttccttcttgcagacagtcctgcgcaatttgggggcgagcagccacagcttgcgagtccctctttaggacagagtggttggttggcattgctatctgtaggggggaagcccagccagcatgtccttcctgttagtcaaagctgcttgtgaggagtgatcagtgtatagctatccagacattcttgtaaatgtcactgcttttgaagttttggagtgaggactccaaagtttgtgtatcctcaagttattttgttcattgccttatcctcttttaaatgttcctcttaaggaacctcagttgtacaagcctgtccttgcctgtttgaaatttattaaacctgtgagcttcccccagaacaatctgattttaaatgggtcacttcggagggaacagattgtctc

SEQ ID NO: 9319 - DNA, 6000 bp, Homo sapiens
acctctttctcattcctacatgtcagtttaaatatcctgtcctcagggaagatgtccttcagcccctaaggttgagtttggtctccctgccccatggcctcacaatatcctttgtattattttctttacttcgatgtggtcgttcttcatctgtatactcctcctgcttgtctgtaggttcttggatgcagggactacgtttgtcctgatcaccatcactaggaattagcatggtatgtcacacacagtgggtgctcaattctttgaatgaataaactctggacctgtaggaagtagaacttgaagcagtgcaaagtgttcaaatatctgctgttacatttacttgaaatatgaccttgcaacttgatagatgacctctctgagcctctgtttactctccctataggaaaagttattaatatgcatttgcaggattgttggggagttatgtgtgagaatctgtgtgaaaatgcctggctcctaggagttactccacaaatgcctggcaaatctgtggatgaggagtaaatagcctcagtgcaataccattactcagaaagctcatatcttgggtcaagacacagcagttaagacagaggctctcaagccaagctgctggactagactcccagctctgccacttactgtctggggaaccttatgccaaatacttaaaccattatgtgactcagttttcctcatctgtaaaatgggaataatgatggcacctacctcataggatcattgtgggatttagcttaggtcagttcctggcacatagcaaatgcccatcaaatgttagcttttcacatgctattaacatgtaacactgacaatcacaccataatgctcgtatctgtggtcctcctagacagatgaagagacaaatttcagagaggttaaatgactgtccaaggtcaaatgtgaggaaatggcaaccttgtgcttcaaggccaggtctgctgcactaaaatcccacgttattttcactacatcaaagaagcagctcaaaataggtctgtggcatttcagctaatttcctctaagcccttcccaagtaaccaaatgcaggcatacaaagctgctcccctaagagcatccatttagcagctactaagtactaagtatgcctggtgtgtcccaaccattcaacagggcttgtaccaagccagctcttcccaggtagccttgcatggtgagcagaagggacctaaggagaagaactaggttgggaaggggaggggtgtggtacaggaaccatatagaaacagaggctggaggccgggcacggtggctcacgcctgtaatcccagcccattttgggagtccaaggagggctgactgaggtcaggactgaggtcaggacttcaagaccagcctagccaacatggtgaaatcctggctgtactaaaaattccaaaaattggctgggcaaggtggcaggcacctgtaatcccagtcactcgggaggctgagacaggagaatcacttgaacccaggaggcgagggtgtgggtgagccaagatcatgccactgcactccagcctgggtgatacaaggagaccccatgaggaagaagaggaagaagaggaagaaagaagaagaagaagaagaagaagaagaagaagaagaggaagaaaaagaagaaggagaagaagaaggaggaggaggaggaggagaggaggaggaggagaaggaggaggaggccaatttggatgtaaaagaggggaggagaaatgagagaaaacccacacttattgagtgcatactatgtgtcaggcacttcacgtctacaatttaatccttactgtgatcactccagccattgttcatcaagtatctactatatataaagctatactccaggtcccaaagatataacagtgaacaagacacagctgttgacctcaaagaggtttcaaataagtgaaagagacaacacatacacaattatgagctatacgtgcgatggtggaggtctgaataggataggtggcttggcagtagctgggaagaacttcagaaaggaacaggtaggtgctaaactgcccatttaacatatggtaagactgaggctctaggaacttaacttgtttggagctatgccattactgagtagcagagtcaagctgtgccccaggcccattctgtctccagtagtctctgcactgtccatgctggcagcctaaaagctgttgctttcctcccccacccctttcccttttctcaatgatcatctggccagaagattaatcaaatgctgctaaagctgcagccgttgtcagtggctaagatgttagcagattctgtggacaaacagaagcttctgagcctctgttactgatttcttttgagcaaaaccttcaggggttggtctgaaagggggagagagatgagaagaatggctctatctgcagtctaaagggatttttggacaggtcaaagacaaccaaggtgacagcaataagtgagggcaaggctctttggctcatgtgactacccccaaccttctctccactccccccaaaagcttagcctatctcagaggaggacttgttgcctgcccctcacctttgcttcaaggacagaagaaaatcagccacctgagccactggctgaacttgctaggttccctgctgtatgggatcagcagattagccctctccattcctgtacccatccccatcttcacaggacaagaaaccaaagtggagaagtcttcagcctgcaaatatagctcttgctgtaccccaaaggtaccttagcagaggttgaggaaatcttggttctgttctccagacaccaggaccctctcccagataccagaagcacagcaattgcccctcatgggagcctttcccttctaagaaaagaacagagtgggagaaaggaagttttgtgctgggcgaagaaacaggtagtttttctatgtcaaaaaaaatacactggtcatacctgcagaccaactctgacctgagcgaaggaagttaggcaatggactttacaccaaagaaagactgtttttaattcactcatcttttatatacctctgataatcaccagaccactgagaaagatgtcaagcaaataatctcaagaaaaaaagtagagggagagagaagaaagtactgaataattgaattatgggattgaaacctctcaactccccctgcctcaatagactcatcatactcacatcctctccagggtcccccccgcaacacacacacacacaaaatatcaaaaacatgaacccatctcatgcctcatgtgctcttactcacttaaccataaaagtgatcagagaaaaaaatgtaatccgtagcagcaggaattaatgtgcttctttctaccagaggtcacgttaaggaaaagttgcacataagagaaatgaaaggtgacactgtaattaacccacaaacaatgattcttctgagaaagaggggagggtttcggtgttccagtgttcatggaaggaagattttttatctcttcccaaccagtttatgaatgacataggatacttagaaggattcacatttcacccacttcccctgagaacatgtttatccttgcaatgaaaatcattgcccaagccccagctacgagtcgcccttttgcacccttttccacgaataatcttcccaaaatgtctgcttgtagaagcaagatttggaatttcacggaaaactacagagagacacagagcaatgcacaccccctggtaagccagagagagacaaagagaagagagaggaaaaccgaaagaagatacatctaacggaccaacaaaataaaacaaatccccagcaaagcaaagtgaaaacaatgatttaaaaaacacataaagacgtgtttgtaattacccgtccaggttacatgttcgccgcttccaggcagagaaacggctggttgaagttttgtgcccgtctgactgtgatgggagggttgtatttgaagctctgggcacgtagagatggaatgagaaggaggctgagctggaagaaacaccaaggggggagggaaggggggagagagagagagagagagagagagaaagagagagagagagagagagagagagagagagagagagagcgcgagctatctctagctacgccttcctctaagctccgggagcccaggagagcgctcattttaggatttgggagaggggtaaaaagaggaaaggcggcccccgctctgcgctggccttgctgccccggggagggaggactctggccagcgcccccctcctggcgggcggccctgggagccagccggggagcgcgcggagcgggcggcgcagggagctgtccggttcagcaccacccgtaatgcagtaggtgggagcgcctccgcgggcgcccagccggtagcgagtggggggcaggcgcgcggcccaccctgcagcaagacgccggctccctcgtttccaggagctttgcagatagggggagggaaatccgcctcgattctccaggagaaaccccctctctcccccacttcgccaacactacccccgccaccaacaacaataaccgccgccgctgctcgtcctgctgccgccgccgccgccgcgcctgcccgccctgccgccgccgccgccgccgccgccgctgcccgggcaaaaccatggaaagcgagacccccgcacctgtgcagctgagctcaagggcttacagaatactgggaagtctggtctgaaacgaaagcgccgagaccccccaaggaagagaactggcgaagcaaaggattttcatggcgcaggccgcagagccgagaacgaagaccgaaggttgcatctcggctctcacagtctctaactgtctaggtcccgaccatgagaaatggtgttgagaattcggctgttccctggttcactgtggaagccatctccaaattaactatcacatatggaaactggagaccagaattttagaaaaagagattaaggcatctcacttgggggggtggggggtgtctttttattttttttttccttttctttttaaaaaaaaaacactgcaactggaacagtttctgatctcaaaaggcaagcctcttcccgtgtgatctttataatttacactcttttccgtgagctttcttacctccctttttttataactctccatattctctattcatacatatatccattatattagtagtggaataatttttatttttatttattttttttggctttagtacttgcaccctcacacacactctcccgagaaccagaagtcggttgggtgtttatataatgaagaattatggggctgtttgatcgaggtgttcaaatgcttttaaccaccgttggtgctttcgctgccttcagcctgatgaccatagctgtgggaaccgactattggctctactccagaggggtttgcaagaccaaaagtgtcagtgagaatgaaaccagcaaaaagaacgaggaagttatgacccattccggattatggagaacctgctgcctagaaggtacttgacttcccatctcctcccccctctccaccccacccctcccctttcactcccccctccccaccctcctccaaataagtcccctttacattccaccattttcttagttcactccttccaccaccaatcaaggttggttgggttagtttcagaggaaagaaaatcaataagcaaaacccatactctactccctcgcctccgccaccccctcatcccctcaaacatcctcattggaataatctatgacatggtgaaaacgacaagagattgtctctaaaagtcaaaggtgttctgcctgctttggagtcattaggatttaccatccgatttagcattgccatctatgagagggtaaaataattgcttctgtgtatgctgtttctcttttcgcaatgaagaattcaaaaatgctcttcccttttccctcctcttctccttactccccaaaagtcctagacacaccaccatctgcaaatctccttatttaaaaaagaatatgttgtt

SEQ ID NO: 9320 - DNA, 6000 bp, Homo sapiens
tggcacatggtaggagttcatacgcagtggttgaatccggatctgcattgctgggggagtcgcggccccgccccaaggagctcagcctccagcaggcagacccgagaccctccaatggccagaagggcaggagggagtgaggagcaggtgccagggtggggtccatggtgctcagagctgggggactgcttcaggcccctgtggcaattggagcacagtccccgcttccaggagttcaatgtgaggggcaaagagagagtgcccacaggtaagctgcacatcgcgaggggcagccgccccttctagggcactctgggagagctgcgaagaggtgaggtctgaactgaggtgacaggggctgcataagagctggccaggttgggaggtgggggcccaggcagaaggaagagtgtggggacgcctggccgtgaacaagcactgacagggctcaaggtccacgagggctcttggtgccggctggctgctcttaatccataaatgtttgctaccatcccattgttaaaatttctcaccaatggaagtccagtgtccttggggtgcgacggggaaaagagagggtgggaaaaaaggaggcaggagaagttggccaggccacatatgcacacagcaccttggacttctgtagggaggaaggagctgggaccttgtcattcattcatttaacaattactgagtgtccgctgagtaccagactctgctctcatgcagcttacagacagggaggaggcagataaatgacatatttgcatatcaggcaatttaggcctctgtaattgctataaagaaaaatgcaggagagacgggagtgcccagggaaggcctctctggagaggtgacatctgaccctttggaggaggtaaaggagggagccacgaggccagcagaaaggaaaacatcccaggcccagcaaggagcaaacctcccattcagcaaagaggacaggaaaactgagaccctgggtctttagggactgtgttctaggtggatggaagccgtgcgaggcttgtgggcagggcacatggtgacaacacgcagtggccattgtgtgagaactcactgggtaggggggtgggtgattggctattgcaggagtcgaggtgacagatgacggtggcctggatgatggtgggagtcatggggggccaagaaggggctggctttggggggcatttggaaggtagggccacaggcttttccaaaggtgctggaccctgggaatgggggagccgttgtattataagatagtaaagacaagagtggcaccgtcatcttcacaactgtccactgcccctcctcctgctgggcaggaaacccaagaggatgggaatgaggtctcttagagtcaccatgtgccaccctgtcgccaccacagagcctggcaccaagcaggtgctagacaaagatagggtgactgagcattgaacctgggaccccacaggcccacaccattgtccatgccccagtgccaggcctcacaagtcctccttcctggaggcagcaagatagaaagccctgtaccaggggcctagagacttggcagtttcattcactcattctttctgatccttcactcatgtgacgggctgtgcggcgttccatggggaaccccagaggtgagcaagatgctggccctgcctgttctgtaggggacagaggcaagacccaaagccaaggcatattcttgatctgatcaagggctgcccaggggagggggcagcttaactagccaggggcccagaacccagtgcctggcaggtcgcctggtaagagttccccacagtccaggcagggggactcagctgcacaaaggcagggtctcgtgggcctggggcaccatgtgcatgatggaagttatagccacgaggagggtggacagcagcctggccatggagggtcttggatgtcgcagcaaggggtttggatgataagtggctgggagctgtgaaaggatcctgagcaggtgagcgattgagctggggagggaggatgcgctggaagacgcaatggaggcaggggacctagtgaggaggccgccccaggggtttgggtgggaagttatgatgagcccgggggaattaatttcccactactgccatttggaccatggcttgggtttttacagagggtgtcctgaaaatgagcctctctgtgctgctcaaagtcctcccagatggatgcgaggggcatttagagggaggcaaaatctgcatagagaaggacgcctggcttggaggatgagaggggaggggaggcccaccaagcaccccaccatgagctgcccctcttcgggcttcctctaatggacccacgacctgctccgagcctcagtttccctctctttacactgattatctgagaggtagtagggctcagtgatcagggcgtcactctgaagtcaatctgcttgactttgcagcctggctgtgctgctgaccagctgtgtgaccttagccaagctgctcaacctctctgtgccttgactctcccatctgtaaagtaggagtgatcagagtacctgtccccacaggatctgtgtaaggcttacatgagaaagtgcacataaagcaacagagacaattgaaataaatgtcacctgttaccacctctatgcccccgagtccccatggctctatgactcatcccaaaatagctcctttgtgatccagactcaagagtaaaacagggccaggtatggtggctcacatctgtaatctcaacacttcaggaggccaaggtgaggggatcgcttgaggccaggtgtttgagacctggtctctacaaaaaataaaactataaaattagccaggtgtgctggtgcacctgtagtcccagctacttgggaggctgaggtgggaggatcactcgaacccaggagttggaggctggggtgagctatgatcgtgctaccatactccagcctgggtgacagagtgagatcctgtcccttaaacaaaaggggtgcgacgggaatatggtgtcctcctctggcagagggaggggacgagggactgaaagaagggcaaggagccaacccatcacctgggatcttcccaatccagcaaaccttctcagattttgaggacagccacctcagtcagaggtggccagcccaggacagacaggcagctctgcgctggggactcaaacctgccatgtggcctcatgcaagagtctcagcaccctgttactggtctgtttcttgcctgtttctcactagggatgctgtgaacatttgaggaagtgggcggggctgtcccacccgttgccggacgtttaccatttaccattccctggccttggccccataaaagccagtagggcccactccacatgcaggaatgtcctagcttagttgtggagggggatgtcatgcccagtgagggtcccctgcagtccctcccttccttgtatctgatgggggccgctcaacagagtcactgtggcttgacaccaaagacccttagctgggaacgatgccaaggggagctggagggagccaggaagctgggagaagggccagggcccttcacatccacctgggaggactttgagcattactaaagagccccgtttttggaaacccgctgtgtaaaatcccaagatacagcccaaaggaagccccgcctgcatctggggtgcattttatttatttttttatgtttttttttttctcaagcagagtcttgctctgtcacccaggctggagtacaatggcatgatctcagctcactgcaacctcccctgaccaggttcaagtgattctcctgcctcagcctcccgagtagctgggattacaggtgcccaccaccacagccggctaatttttgtatttttcatagtgacagggtttcaccatattggccaggctgatctcgaactcctgacctcaggtgatccactcacctcagcctcccaaagtgttgggattacaggcgtgagccacggcacccggccctggggtgcattttaaagctacacggtatttatggatatagtaagaggagatgaacttcgcagtagtctggagcctttgctctcccggtgggtgggtcaaaggctttctctgtactgtggggaaacctgcgtcaaaggccaaatacattgggatgtttgcttgaaagggtctcaaaatagagttggaaccctggagcgtggagaggggcgacattcagttgctatttaatcatgatttgttaattaacagctcatttatgggaggcatcttagattcgtggaaaaagcagggagtcagacatctagactcaacctccacttccctgctgtgtgatcttgggcaagcggcttagcctctctgggcttcagggtttttttaatctgtaaaatgcgtctgggagtgaatgtcaggtattcaaatcacactgggaaaatggggctaggaaaagccctagactgagttagtgctagaacactctgggtctcagtttccttatctgttcaatgggtgcagaactggaggtttaagtgagataaagcaggtgaagtacccacgtggtgtgggctggaggaagaaaacatgggacaatggttccacatccctgggtgacctgaaaattaagtgtgagatgtctcatgagggcacgaaatgaatattagtttttgttcccttcctctgccacaagactttgagagcagaaaggtgagagagacggtactctgtgaaggaaggcaggtccccggcccagcgcagtgccagctcaggggattctggggcgggggctaagtgcatggactgtgtgggcgtggtgggaagctccgtgaaccagaaccaggagcaagaaacagcattccttgcgtggacgggaaatgagggcaagaggtcagatgtctacagaagtctgcaccccatgtacttcagttctgtctgtgggtgcagcctctagggaggtgggtgtttaggtactgagacctccgtctgtcctctgaccatagggaagccagtgggaagcaaaggtggggttcttgagccagacccagtccagctctggtgcctgccctctggtgcgagctgacctgagatgcacttccctcctctgtgagctgtctcggcacccacttgcagtcactgccgcctgatgttgttactcttccactccaaaaggcagggaagtcctgcttccgtgccccaccggtgctcagcagaggctcccttgcaaatgcgaggctgtttccaactttggtctgtttccctggcaggatgcccgtggccgaggccccccaggtggctggcgggcagggggacggaggtgatggcgaggaagcggagccggaggggatgttcaaggcctgtgaggactccaagagaaaagcccggggctacctccgcctggtgcccctgtttgtgctgctggccctgctcgtgctggcttcggcgggggtgctactctggtatttcctaggtaacgttgtgggaccgcctgggagaggcacctggggaggacttggggtgactgtagcaggcacagcaggacaggactgggttccaggctcagccgtgcttagcatattgctgtgtgaccttgggcaagtcacttctgttctctgggtctccctccctgtccttccagctggagatgctgtcagaccctggctccaggtcctatggctcgggtctgcttcctgcttgggcaaagtgccccaaagctccccaccaggtggggaaagtgggccctcctagcacccagttcttgtgagccagccagcccacagagcataaacatcgccttcccttgcctgcagtcctcctgggttgcccctgaggcttggagccaacccagccctaaagaaggaggcccagaggcaccaatggtacctggtaccaattagtgcctctgctcacttgagcctagcctaggttctcctctaggctggggaccacagctctatcccctctgggtctccagggtccagcatgaatgggggacggagcaggcagctggagagcagccagccttggggccc

SEQ ID NO: 9321 - DNA, 6000 bp, Homo sapiens
gggaggggagagagagaaagagatagagggatggccggccgtggtggctaacgtctgtaatcccagcacttagggaggccaaggcaggcagatcacgaggtcaggagatcgagaccgtcctggccaacatggtgaaaccccatctctactgaaaatacaaaaattagctgggtgtggtggtgtgtgcctgtaatcccagctactcgggaagctgaggcaggagaattgtttgaaccggggaggcggagcttgcaatgagccgagatcgcgccactgcactccagcctggctacagagcaagattccgtctaaaaaacaaaaaaaaaaaaagaaaaaaaaagagagatagagggattaagagacacaggagatcataggtgagattttttttaggcctagaagtagaataaatcacttcctcccacatcccattagccagacttggttctggagccccagctcactgcaagggaggctgggaagcagacccgagctgatgccgggaggagggtgcacgccatggcctggggacccattccaccaggtttccctcctacgtgctcccacaggccatgaggtgttacatagaggatgtgaaggagaatcattctctgcgtagccccctccctgcctctccatctgaggtgttctgggctaggacccttgacaaaagaacaaaccggctccatcccctgtctcctggggtgggagactctgtatgtgggggctgcaccatcccccattctgctccccactttcctggctgctgcacatctcaggggcacgagggtggagagtggcctacctccctcccttggtcctaccccgctggcctgggctgcgcgcctcaggcttcctgtgtctgacctggtctttggggcatctggggtgctcagtaaatgtttgttgaataaataaaagaaggaaagcaggatgaggaggaagaagagtcttgggcagtatgtgccaggcagactgatgctgtctcatggatgaaatagctgtacgcagctgctccttgcaagctgggtctgtgacttctggctttggctgcggatgcatttttcttttctttgtatgtgtgtgcttttaaagttttaactgaattcatttatttgggggcaggaaatatgttcatgccatacaaaagggtctatagagaaaagcgtccttcctaacccttcctcacctggctctcctccctgagacaaccggcgttcctaatttcttgcaaagcttctgggaatatttgaggcttaataaatgttggctgttattctcatggttgtggctgttgtgtttagtatcctctcctgccgccagacagccttactctagaggagagggaagggcagtgtggaaggaactggcccttacagcaagcctgcagtgcgtggtcacattaaatgctttatacacaccttcttgtccagttctcccttcatttggtaggtctgcacactgaagcacagggaggcctaagtcacagcctcaatctccagtcctgcccctcctgggcagcagtgctccacgcttcttcttttccagcagcgggctttgcacatgggagttgggcctgattctctttttggagtcttgaattccacttttctcacatttgcagagctgccgtctctgctcttctctctcttcttctcagaagaggtggcaggctgggcgcagtggctcacacctgtaatcccagcactttgggaggccgagggaggtggatcacctgaggtcaggagttcaagatcagcctggccaacatggggaaaccccgtctctactgaaaatacaaaaattagccgggcatggtagcacgtgcctgtaatcccatctactcgggaagccgaggcaggagaatcgcttgaactttgtgggcagaggttgcagtgagccgagattgtgccactgcactccagcctgggtgacagagctagactatgtctcaaaaaaaaaaaaaaaaaaaaaaagaggccacagcttgcaataaaacccctctgaaacagggaatcaggaaagggaagaagcagagctgctgcttctgggctctgaggatggaacttcacagggtctatggggctgtgatgtagcacgtaaatagatgtgcatttttctaaagaccaatccataagtttccatcatttaaaaaaaagagccctgagctgagctcccacgccacccttctcccccgccaaaaaagggggagaagggttaggaaccatgacttgagaggaagaggaaggttctagaatgttcagtaagtgaccatcaaattgttcacaaagacctgatagtcatctctgggaagtgctagctagaacaaacagacaagagaaagaagtaaagggcatccaaattggaaaggaagaagtcaaattatccttgtttgtagacgatattatcttatatttcaaaaagcctaaaaacgccaccacaaaactatgagaactgataaacaaattcagttaagctgcagaatacaaaatcaacatacaaaagttagtagtatttctatgtaccaacagcaaacaatctgaaaaagaaatcaagaaaataactccatttggaatagctacaaataaaataaaatacctaggaataaacgtaaccaaaaaagtgaaagatctctataatgaaaactataaaacgttggtgcaagaaactgaagaggacacaaaaaataaaaagatattctatgtttatggattggaagaatcaatattgttaaaatgtccataccacccaaagaaatatacagactcaatgtaatccctatcaaaatactaatgacattcttcacagaagtagaaaaaataatcgtcaaatttatatggaaccacaaaagatgcagagtagccaaagccatcctaagcaaaaagagtgaaactggacaaatcacattatctgacttcaaattataccacagagctacagtaaccaaaacagcgtggcgctagcgtaaaaacagatgcattgaccaatgaaccattggtcagaatagggaacccagaaacaaatccacacacctacagtgaacttattttcaacaaaattgccaaaaacatacctttggggaaaggccagtcttttcaataaatgttgctgggaaaactggatatccatatgcagaagaatgaaactagaccctcatctctcttcatatacaaaaatcaaatccaaatggattaaagacttaaatctgagacctcaaactatgaaactactaaaaggaacattggggaaactctttaggacatgggactaggcaaagatttcttgagcaataccccaccagcacatgcaaccaaagcagaaatgatagatgagatcacatcaagttaaaaggcttctacacagcaaaggatgcaatcagcaaagtgaagagacaacccacagaatgggagaaaatatttgcaaactatctgacaagggattaataactggactagataaggagctcaaacatctttatggaaaaaaattatagaaatcccatcaaaaattgggcaaatgatctgaatagacagttctcaaaagaaaacatataagtttatgaaaaggtgctcaacatcattgatcatcagagaaatgcatgtcaaaactacaatgagatattatctcacctcagttaaaatgacttttatccaaaaggcaggcaataatgaatgctggtgagggtggggagaaaagggaactctcgtacactgttggtgggaatgtaaattagtacaaccactataaagaacagtttgaagagtcctcaaaacactaaaaatagaactactatatgatccagcaatcccactgctgagtatatacccagaagaaaggaaatcagtatatggaagagacatctgcattcccacatttgttgcagcactgttcacaatacccaggatttggaagcaacctaagtgcccatcaacagatgaatgaataaagaaaatgtggtacatatatgcaatggagtactattcagccatgaaaaagaatgagatcctgtctttgcaaccacatgtttgaaactggaggtcattatgttaagtgaaacaggccaggcacaaaaagacaaagctcacatgttctcacttatttgtgggagctaaaaattaaaacaattgaattcatggaaatgggaagggcagtgatggagatgggaagggcagtgggggttggaggggtggggattgttgttgggtacgaaaacagaattagatcgaatgaataagatctagtatttgatagcataacagggtgactttagtcaacaataatttattgtacatttaaaaataactaaaagagtatacttggattttaacacaaagaaaggataaatacttgaggtgatggataccccatttaccctgatgtgattattatacattgtatgcctgtatcaaaatagctcatgtgcctcatgaatatagacacctaccacatgcccacaaaattaaaaactaaaaaaaacagtcatctctgaatgctaaacggagtaaggggcttcctggaaggctgggtgaaatgggagtctcggaaagatggtgtgttgcaggctgggaggagggtgagacgctggggtcacctagagggacctgcttgtgtgaagcctacgtattagtgggtatgtgtgtgaccggatggaggcgtcagaggtgttgggtagcctgtgtgagttggcgtgggggtgatgtaggaggggagagagggagggcctgcgttcccttggctcctgtgtgcagctaggcccctatttgacaatgtgtgtctgtgtgtgtgtgtgtgtgtgtgtgtgtgtgtgtgtgtgtgtgtgccgcccccagcgtaggaggcagatctttatctggccctgggtgcttgaggagtttcaggctttctcataagcctcgtctccccgcctctccaccccaggccttgcccctctatcctctgcacaggaagtgggctggctctgggcttttagtctttgcggccccagcagccagagctcagcagggccctggagagatggccacggtcccagcaccggggaggactggagagcgcgcgctgccaccgccccatgtctcagccaggtgatgtccccctgcctccctcccggcccctgtggaccagccagagggctgggagtgaaagtcacagagaagactttcagctctgactcagttcccccagcagtttctgcctgaactcccatcccccaactttgtcttagaattcccctagggaggggttgggcccagctctcatggctcctggctggaggaaaaagcggtccccagtcccaggtcagctctccttcccaacccattcaggggaggctagggactgctgtgggatgaggggcttccctgggctctgtgtgctgggcccccaacccggagaggtggagaagggatgggtggatagcctgggtgcccggagagggtacgggatatggggtgggacaggcgggagccccctcctgacctctgtggagtggggcccatataccgggggaggcagccctgtgttgcgtgctcatcaggaggcttgtggagtaagtggggacagaagggtccccttggagagccatctatgaagtgaagttgctgcgaggcctctgggagccccaggctggaggcagagccctgggtttgagtctgggtttgtccctcccttggctgcatgactggacaggtcagaagcatctccggacattggggatgggaccctatctttggggctgcctggagctcatgctctctcctctcctgggggccgaagcctcccactcttaactgtgtttgtagcacctcgggggagggaggtggagtgaggagctgagctatccccaagggtccccttccttcccccacagccagggtcccgcacccagctggagaagcccctgaagttaaatagcaagagacaagcactgtgtatgggagcaggggggtggcaggtggaggtggccagagaggacgaggggacataggccccattgagttcaga

SEQ ID NO: 9322 - DNA, 6000 bp, Homo sapiens; identical to SEQ ID NO: 1047

SEQ ID NO: 9323 - DNA, 6000 bp, Homo sapiens
ggcagtgccccctcggggcttcatgggcagggtagtgtacggtgcccactcctgctgcaggagagaagcagcgcaggatgaatgcgtgcatgggcagagcgggtggtggctgcccacaccagcccacggatggatgagtggtcctgtgcttaatggatggtggacaggcgaatgggtggaccaggggatgtgcgtctgggtaggtggaggtctgtgtgtgcaagtggatggccttaaatggcggggggggggtcactgactgggtggttagggacatgggaggatgcgcagatgtggtggacagacactgatgggtgattggagaggtgtgagtggtgagggggtgctggatggattcgtggctacacgggggatggagtatagacaggtgagtgggggataggtgatgtatggagggactcatagttaggcgcgaaggtccatagctgggcgggtgaccacagggacaggaacggaagggggtcagtggggagagagatgactgagaacgccaacgatagggacacctgctgctggagtggctgcttcacagacccacagcagaggacggtgtgctgcagatgccttggggacctgaggatagaaccttctagatggaggctgtcacaccctcctgggatgttctgggaccatcgttccatccttgactcacatagcctgttagggaaaaggatagcgtgtgttattatcagtaggcacttgcaggtgaaaacagaagtaaacatacggaattgattgtagtctgtcaattcgaggtgaagtagcttccagtgaccctgaggggaggatgtcttcttttggtcattgtccccaggcctggcttcttttggtcattgtcctctgcctctaccccacaggagcggttggttccccgaggcgtacgtgaaggctctggaggaggggcccgtgaatcccatgacccccgtgacccccatgacctccatgacctccatgtcccccatgacacccatgaaccccgggaacgagctgccttccaggtacctgagtcatcaggggtggggcgggggtgaggacgccggcaagggtgtcactgcccagcggagaggatctgcaaggtgcaggcttgtttttttgtttttttgttttgttttgtttttttttttttgagacagagtctcaccctgtcacccaggctggagtgcagtggcgccatcttggctcactgcaacctctgcctcctgcattcaagcgattctcctgcctgagcctcctgagtagctgggattacaggcacacaccaccacacctggctactttttgtatttttagtagagacagggtttcactatgttggccaggctggtcttgaactcctgacctcaggtgatccacccacctcggtctcccaaagtgctgggattacaggcgtgagtcactgcacccaggtggcaaggtgcagtcttgagtgggcccagcccccttcagcccctggagaaccaccggccctgagcccctctctctgccctgaaggtcactgcgtccatccctctgcctcctctcaggacctccctccggtcaacagtctcctttcatgcaggtgcggggaggaagctgtcggatgcctcctgcctaaggtgccccagctactggcaggacaagggattggacaggccccaacccctttccttccccctcctttctctggacttaggtcctacccactccggggcagccacagcctcgatgacctcctggaccggccgggcaactccatagcaccctcggagtactgggatggccagtcccgctcccgcaccccaagccgggtgccaagccgtgcccccagccctgcacctccacccttgcccagcagccgccgcagcagcatgggcagcacagcagttgccactgacgtcaaggtgagcccttgcccgccctctcttggggcctccagcgggcagggaggcaggagagcagggatcccgaggctctgtcaccggctgtctggcaggggacccgcctacctggcctcactcagtctgttcctcagtgcagggaggggtggtgtggggctgagtctgggctgaaggggaagaccagggtcccaggacagggtgtggcctggggctagccagtaggacggggctgggggaggccagggagggcatctccgatggagccaccccggtcttatcctgggggcgtggttagtccttggaggtggtgctctggcctaggggtttctcacttctgcaacccacagaattctgggcttcagaacgtcagggtctcattttccaggagcctggcatggcaggggctctctggcccagtcctctgcccttgggcatggggagagggaggggaggagcaagggattgcttgcccctctccccaccaaaccagcccttccccacccccactgcagaaactgatgtcctcagagcagtacccaccacaggagctcttcccgaggtgagtcctcacatgggggcccaaacagtgaggagggtggcaggtgcggcggcacacacttgtagtcccagctactagggagactggggcaggaggatctcttgattccaacagttcaacatcagcttgagcaacactgtgagaccctatctcttaaaagaaaaaaaaagatgaagcggggcaaggagtggatggagaccaaataggggcaggaggcaggacccagctcagttgcccagctgccttcctgagccatggccaggtggggatcatctgcccttctcaccccattctctctctcctcctacaggggcacaaatccttttgccactgtcaagcttcgtcccaccatcaccaatgaccgctcagcacccctcatccgctgaggcggggtccgaggtcgtaccccacagtgcacctgcccaggggctgttcagagctggcaatggcagcgacagcagcaacagcagcagatccaagaagcgggtccctgagacggggggtggctgccctccccagaccaccccggcagcctgagcagctccaaagcactggcttggggtccgagaccttcaaagtaaagcaggcggaatggggggacaggacaatttctccccctccaggggctccaggactctccctggggggcccacctcttgccccctaacctctttcccccttttctgcccccgtggggaggagccccttgtacctgctccgtgcccaacacatgccctctctgtacatcttttgtaaatgatgagaaataaaggaagtggacgcaaagtgatgcggcagcaggactggtggtgtcttatttgggggacagggcagggggtgagggatagagactcccccattggagaatggggtctagggggtactgaggtcctggctgttccccgggaagccatctcactcccagccccttgtttgtttgtttggagaactctttagggctgccccaaagccctcgcgctgcagcccccatctccacctgctctcatttcgacctgtgggtttcctaggaagtagcggctgctcgggtcaggggagaggtggcagtggccaagggctgggaccaccagcaagctgccctcaggcggcctggacacagcaccctttgttttggcccctcccccccccacattcccaggcacaggcgtggattagcttcattctagagaaagctgccagcccctcctggaatgtggcctggggcggggggttggggcgggggcagatgaggcactgaggtgattagaaccgttggggtctcttcagggcagggctgtgcccccagcaccagactaggaccccctgggcaaggtctctgtgtctaccaccccaggctccaggaggcacagggattctcttcctccctcctggactggcttgggacagggagcccaccgccgaggcccagcctggcctggggctcccagtctcttctcccctcctggacaaaagcctcttagcaggggtgaggtgtggtgggggcacacactctaagctccaggcctggggcagggagcgtcaggcgggagtcggccagaggctcagcccaggctggtgggaagctggggtgtctggcagcccccatccgggtaagcttcaccgggagctgcggcggcggcccctccctgcaggcctcaggagatgtgaggctggacccccaaacccacgaggcaggctcaggtgagtgtgatgtgagggctgcctgggatcaccctcctgtctccaccttcaagtggctgcccctgtgacaagaggacaacaggcaggaaaagccacaacctggtcctagtggaggaggggcagagtcccggataccctgggggtggtggcactgcccagtgccaggagggacactccaggcaggagggcaggaggctatccccagcccccggctcctggtgcacctgtctctgagtacaccctcctcatctgttatgggggcgcttgtaactgctgtgagggccccgggtggagccccaggaatgagacaggctttggagccattcttttcatatagagggtttgaggtttggagggcagaaggccactctctcagtgctgctaaggttcctacctgtctggcagaagccagagacctgactcctctcccgcaagattcccagctggcctcggggtgatcaatcacccatcttacatcggaggaaagggaggttgggagaggggaggcgaccggcccaagtcagggagggaatccatggctgagctgagatgcatgggaactcagctcccctggctgatatctgttgaaagtggcttttgtccccttaatgttctaatgacaatagtcatttgtgatcactgagaaacattaggaacatggcggaaggctaaagaggaaaatcacgcacagcggccctttgcagccggcatctgcccctctgctgtttgttctgttgtcccgagaccctcacgcgtacggggcgactttggtgctggacgcccacctccaggcacatacctgctccacttcccgacgccttccacctgaggccctgaggggccagcagttgtccttcagagggagcctgcagaggtgcagagtcaggtgggacccgtcgtcctcccctcgtccttcagcgccctttgcaggagaaggagacttggggtgagagtcctacctccgtttccccttttggttcccagacctgagccaccctcacgtgggtagccctgtgcctcagtttccccatgcttcgtctccatccccctccttctctaggctgctggcccagcccctccctcttgtccccgccccctcccaacagaggcagcgatgggcgctggcggcccccggcggggcgagggccccccagacggcggctggggctgggtggtgctgggcgcctgctttgtggtcaccggcttcgcctacggcttccccaaagccgtgagcgtcttcttccgcgcgctcatgcgcgacttcgacgccggctacagcgacacggcctgggtgtcctccatcatgctagccatgctctacggcacgggtcagtgtccccgcccggccctccgcctccccgggacccctgggatccggaaccaggagacacccgagcccctgagcatccccctgaccctcggggtggcccccgaagtcccttcctgcctgtgggaaccctggcaccagaaagaggggaagagagggcgggagggagacagcggccagaggcggggccggcccagggggctgccctgcgagctcagagggccccttctaagaccacacccgcccattgtagaggcaggaaagctgagagccacagaagcactccccctccccgcagccctgacctgtaggtgggggcttgctggagttcccatcctgggaggcggggctgcggaggaatcccagtctgtgccagggcgggacttggaggctgtgaaggttaaaggggtgcggaagcccccgctccgcttggggtttgggttcgcaggatggggtgctctgggccttgccctcgcaggatgctgtctctttggcctgtcccctccaagctgtgtgac

SEQ ID NO: 9324 - DNA, 6000 bp, Homo sapiens
ggtgttgtggtgcgtgcctgtagtcccagctactcgggaggctgaggcaggagaattgcttgaatccgggaggtggaggtggaggttgcagtgagcagagatcgtgccactgcactccagcctggcgacagagtaagactccgtttcaaataaataaataaataaatataggccaggagcggtggctcacgcctgtaatcccaacactttgggaggctgaggcgggcagatcacgaggtcagagatcgagaccacggtgaaaccccgtgtctactaaaaatacaaaaaattaggcgggcacggtgaccggcgcctgtagtctcagctactccagaggctgaggcaggagaatggcatgaacccgggaggtggagctctcagtaagccgagatcacgccactgcactccagcctgggcgacagagcgagactctgtctcaaaaaaaaaaagaaggaaccaaaaggtgatatctgatttggtccttgaagggagaataggagtagctgtttgctgagttgagttcaaaggggtggagctggtcattgagaaaagcattctttcttcattagcctgtgggcagggggaaaggtgaggctgggggcctgggaaaccattataattgtccagaagttaagtcagactgaaccagggcagtggaggggaaagcggacacatttaggtggaatctttgagccttgttagaaagaataggccaggcatgctgatcacatctgtaatcccaacactttggaaggcagaggcaggaagattgcttgaggccaggagttcaagacccagtctctataaaaccattaaacattgaaaattaggccaggtgcagtggctcacgcctgtaatcctagcactttgggaggccaaggtgggcggattgccggagctcaggagtttgagaacaccctgggcaacatggtgaaactctgtctccattaaaaaaatacaaaaaaaaattagctggtcgtagtggcgcgtgcctataatcccatctactcgggcggctgaggcaggagaatcgcttgaacctgggaggttgcagggagtcgagatcgcgccactgcactccagcctgggcaacagagcaagactctgtcaataaataaataaataaatagaaaattagctgagcgtgatggtatgcccatgtagtcctagctacttgggaggcagaggtggaggattgcttgagcccaggagtttgaggctgcaatgaactatgatcaaaccattgcaccccagcctgggtgagagagcaaaacccaagaaagaaaggatgggtagttgcatggaggaggggtgagagggaagatagcaaggtaggtgtttatcttcattttggaaaacctgagtaaaggtcttgagagggcttttttcctcccacagggagcaccaactagggcccccaataccacctgctgacctgccatatcactcagaccaggtgactttctgtctttgagccccttccgggcaaccaagcctaaaaatacccaccacctgcctctgtcccctgccagcccggggcctctgtaagttgagacccaagagtgcccctaagcagaaaccaagaccctgaactgaaagccctggaggggaagtgtaagtcaggttgtgtctggtctgtaagtgtcttgtactacacattgcagatatggtgggtaattgggacaaagacttcctcctgaaggggttagtgtgtagggagggagagctgggaagtcataaacaagttacaatgcaattgataagccttactcttgttaggacagacccaggcatgtcctacctggggctggggaggaatcgttctataggattttgctattaccagatctctggtcatgttatacctacttttgcgggggcatgttctctatgccagaccctgtactaagtactgggattacatcagaaaacaaaaaggatacttgggaggcacaggcaagagtatcgcttgaacctgggaggttgaggctgcagtgagccaaaattgcaccactgcattccagcttgggtgacagagtgagactccatctcaaacaacaacaacaacaaaaaagccaaaaaggatgaaaatctttctcttcagaatttattggccaggcacacagtggctcacacccgtaatctcagcactttgagtggtctagacgggcaattgctttgagcccaggagtttgaggccagccctggcaacatagcgaaaccccatctctacaaaaaaaaaaaaaaaaaaaaaaaaatacaaaaattagcctggtatggtggcacatgcctataatcccagctaaccaggaggctgaggtgggaggatcacttgagcctgagtggcggatgttgcagtgacctgagattgtgccactgcactccagcctgggtgacagagactgtctcaaaaacaaaaaaacaaaaccgaaaaattttgtgttctactagaagaagacacacagggaaacaggcaaactatataatatgatagaaatgaagtgacagggtggctcacgcctgtaatcccagcactttgggaggctgaggcaggcggatcacgaagtcaggagatcgagaccatcctggctaacgcggtgaaaccccgtctctactaaaaatacaaaaaattagccaggcatggtggtgggcgcctgtagtcccagctactctgaggctgaggcaggagaatggcatgaacccgggaggcggagcttgcagtgagccgagatagcaccattgcactccagcctgggtgacagagcgagactccgcttcaaaaaaaaaaagaaagaaagaaagaaatgaagtgacagggaaagtagggcacggtaaagggaaatacagagtgcatgtgaggggtctggtagttttactaggggtgctcacagcaggcctcactaagtggaggacattcgagcaaacccttgaagaaggtgatggaggagccattcaggtatctggggaaacagcgatcgcagcagagggaacagctagtgcagggggctcggggctgagtgtgctcagcttgttctaggaacagcaagggatcagtgtggagggaaagggtaagagatgaatgagatcaggaatccccaggagagtagaatgtcagatcaagtgtttgtaaggacttgtaaggcttttacttagagcgaaacagtgagccaatggagggttttgagcaaaaaagtaccatgttttgacttcgattttattttattttttgagacagattctcattttgtcacccaggttggtgtgcattggcacgatcttggctcaccacaacccaacctccgcctcccgggttcaagcaattctcatgcctccagagtagctgggactacaggcatgtaccaccacacccagctaatttttgtatttttagcagagacaaggtttcaccatattggccaggctggtctgtaactcctggccttaaatgagccacccgacctcacaaagtgctgggattacaggcgtgagccaccgtgcccggcagattttaaaagaatcttggctgggcgtggtggctcacgcctgtaatcccagcactttgggaggccgaggcaggcggatcacaaggtcaggagatcaagaccatcctggctaacgcggtgaaaccccgtctctactaaaaatacaaaaaattagctgggcatggtggcgggcgcctgtagtcccagctactcgggaggctgaggcaggagaatggcgtgaacccgggaggcggagcttgcagtgagccgagatcgcgccactgcactccagcctgggcaactttgagacaaagagcgagactttgtctcaaaaagaaaaaagagaaaaaaaaaaaaggatctccctcacccctgaattgatagaatggatcagagggcaaggctggaacaagggagaggggttagcagaactctgcaataatcctgtgcaaatactggaccagggtggtagcactggaggaggagtggcagacatctgagtctagatctattttgcaggtagagccaacaggatctcctgcctgccttattgggtagcgggcagaaggggggcattcattcacagctgactccgagttctggcctggggactggaaggatggaattgtcaacagctgatggaggcaaagctgagagggagcaggtttttgtgtgtggaagtggggttggctcagctcagacacgctgactttgagatgcctgctggagctccaaggaagaggtgttgggtagacagttcaggcgaggagtctggagacataaatacatttggggatcttgagcacatcaatgccagaacttaattgcattttatcttgttcagttaacctaggtgatgtctggaccggcaaacagaaatggactaggcggcttgaaccctatctgaagacttttgctagttcggcagcctagagccagacggggcaagaaagaatcgctgctaagcggagtgggaaaaaaaggcctctttcagtgctttgccatttcatctggcctaattgcacacaacactcggtccacgttcattccacaattccacacgcatccttcactcaacaaatagccattgtatttcgtttcatcttcaaaacaggctcaaatggaggaaattagggttaaaagaagtgaagcaccagcgagggtcaggggcagagatcgcagcccagaaagctctcgcggttgggggccggtcgtagctggttttgtgagtggcaagagaacccgggtcgcgccccaacccgcggggcggcgggctggggttcggggcggcgggctggggttcggggcgcggcccctttaaggcccaggcagtgatctcagccgcgtccgccgccccgccctccccggcggcgagcccagagcgcatgcgcgccgcggctgcactccactgggcccgggacgcgccggcggcggcggagactccggggctgcggcgccgcccgccccgcccgcagagtccggctgccgcgcatcgtccgcagacgccgccaccgccatgggctcctgaggtatcccgcctggccggcctcgcccgggagccccaagggggagctgcgactcccgagcgcggggggctgcttgtttcggagaggcccgcgcgagggacgcccggcttcggccgccggctcccgggcggggagggcactacggaggccggtgcggccgcggagggagggggcatccgtctccccacccgtgcctcctctccgccccgcgaggtcgcccgtgggtgtgcccgctccctttccacgccaacgtggcgggggcagctcctggagtgtaatcggacctgtccggggggcggccccgggagagggaggcggatggaccaaggcgctttgcaagagggattgtgtgctcccgggtgggtgtgctggcgactggcacggccgagtgagtgggggaggcgtccgtgccctgtgcgggtggcagtgacctgggagggtggtcggcggggggctttcggggctgcgtcgtgagtggagggtgtacacgcccgccacacaggtccgcaggtttggaaggggatcgactgggacctggggctcgaaagatgtttgcccccaaagggaccgtggagactggttttgggtgtctgtatccttcccgtgaattgtacatttcctcctgggcacacccttggtacctcgcttggatccacttacctccagtgctgggtggctccaggccaaggcaaggcagttatgctgggggttgggcatggattcccaatacatatcccctctggaggtgttgtataaggccagacgttttactcctccctcctttccagggcattttggggcaaagcaggtatttgcatgcctgatacctgtggtgaggtgaaggccatgtattatttatctgactgctggtgcttttgtaaggaaagaagcagcaatctgtgccctggaggccctgcgctgcagagtcagccaggcaaacaagctcacctgcacctgcagaggcagcgcaggtctcagaggtgtgacttcgt

SEQ ID NO: 9325 - DNA, 6000 bp, Homo sapiens
cctgctctacagacaaaaaagccaagaccagagcaggggttgggggctgcagccctgcaggagggagaggtgggtagaccggggagtttttactggggtcgggggcactcgggttgtgctatggcgttccagctagcccaagggacagagctggaggttgcagtgacagggctggatggccagaggcggctctgccagctgtctccacgcagggggcctggttcatctggcagcttccccaccagtgagctgagcgctctcgctgctatcccctctgcctggtactcttgtcccctctgtccccggctcctcctcttgccctttctttctccagaggtctctttctccagcagcttctctgactccccaagtctggttacgagagtcagggccagaccaactctccactaggcacagcaggcccagggccagggccatgaattttcaggggccgacataaatgttttaattatttgtttaatcagaagggaaaaaaatggatataacctagccggcttgtggatactgacatagttgcaaaacacaatacttaatactttttctggaggagggggcccatgaaagtcacactgggtccctttgagccctgtgtccctcctgggcacgagtctgaagtgttgtgatgatcggctcacatgactgccttctccaccagacagtgggccccgggagggcaggggcatgtcttacattgtcagaacaggcaagcggtaagtatttgctaaataaataaatgcttataaataaaaaaaaaatagccttgattgctagttagtgacagttagcaatccttgcccagggccaggcactgtactgagctcccatgacacagacacattgatatcatccccgttttacagatgaggacatcaagacaatgaaaggttaaacctgcccacgtcgttcaccaggagtgtctgcattccaagcctgctctctggaccactggcccagaatgtccccacagaaggtggagcacctggtggatgtatgaagaggctgagtccaggaggaacaccctggacatggggcaagcaggctatgtcagcccctgagttctggcccatggatcggtgccctcgggagctccagcgctgccccagcctcccttgtgagtgtacagccagctcaggccttcctccatgtgggcagcacacactcagccagctactgtgctcagggtgttggtgacaatgacggctaattggagcttacacctaccgagtgccagctgactgcaacctctgcctgccgggttcaagcaattctcttgcctcagcctcccaagtagctgggattataggcatatactaccatgcccagctaatttttttgtatttttagtagagacagggtttcaccatattggccaggctggtttcgaactcctgacctcaggggatctgcctgccttggcctcccaaagtgctgggattccaggcattcatcactgcacccggccaaaagattagaatgtcatcaggcagagaaacaaggaaaggcgttccaggctgaggcacagcctgagtaagggctcaggagtaggagaggccttggggtgaggccccaggagtgcaggtgaggcctgcaggagatctgcgtctgcaaccacactggggagctggtgatttaagactgggaagctgcagtcaggcagtcgctcgatgaacgtttattgagcatttattaggagccaggtactgtaataggtgtgggggacagaggtgactaaggcacagtcacccataagagtctggccaaatctctgcatgcctaagactgtccccctcagtcagggacccacgttgtgttcctggcaccctagctgacccactttgtaacctggatcccacgcctgcactcctcagagtagccttcttccataaaatgagtttaactgcggttgtcacctggtgatggagctctttgagctcttaggatgaaagattctgtaaatacgcagcctttgtcaccagactgggtggggtggaatagggagcccacatcagatccccaagggtgcagagaaacagcccccgggagttggagggagggtcggtcgccaagctcccctgaggttaccgccctctgacagctgccaagcgagttcctgcagccagaatgcctgacatgaaagtcccccgcccccgccaaggcctgcctgtgatggttaaatgacagacgccgacaccctggctgctgactgatgctgacagcagggagggagatgtggagctggcctgggttgcaggcaggtgactggaggctcttccttaactcgtgttcataggacgctgaacacccaccacgacctgtcactgtccagtgtccatgggggaggcagacaggcacacagcacattccaccatcacgtggggtgttagaggggaggccctgctctctggcagcacagagaagcccacctgacagatgatgggtccaggacaaaccaagggcccaacctcctcccgtctccccgcaaagatcatggtgataaaacccctttgggatgaagtagttcagaagtcctttgcccatgtgaccctcatgcaagagaaaatgaaggccagagagccccattgacttgtccaaggccacagagctcattggtgtggcacacaggacacttattattattctgattccttggcttgtggcttcatcactccaatctcttcctccatggtcacattgccctctgctcgtcttctctgcctctctttggttttttgtttgttttgaaacagagtcttgctctgtcacccaggctggagtgtggtggcttgatcttggctcactgtggccttgacttcccaggctcaagctatcctcccacctcagcctcctgagtagctgggattacaggtacacaccaccatgcccagctaattattttctttttttgtttttcttttttagagatgggtggtggggggggggggtctcactaatttggccaggctggtctcaaactcctgagctcaagcaatccacctgcctcagcctctcaaagtgctgggattacaggcgtgtgccacagtgcccagcccctatctttctcttaaagggttacttgtgttacacttagggcccaccctgataatctaggataatctcatttcaaaatctttagtcacatctgcaaagtctttgcatgtagataacagtcacagattccaagcattagtaccgaattcctgtagcgaccattattctgcctgctcccagcccccagaggatgcagagtttaagaggggcctgccttcagtcagcctgtgggcatgagcctcacatatccactcagcacatcctgggaggggacctggactcccccccgaccccagcaaggccagacccccctgtctgccaggacccccggagagggggaagcaggctgtgcaatggaggaggtaggatgtggcaactccatagaagtggttaggacagaattctggagttgcgcatcccagagatgaggagtcagagaggcccttcccctacctggatgctgcccctacgtctgatttgaattctcctttcattgctccatccagcagacactcagaccagagccaggctcggtaccaggctctggagagcttgtccatgtcctcaaagagcttgcagtctaaacctaggagtgataatggccagcaccgtggtctccaggagggtggaagagcaggagactcttctctttccagagcaggcaatggaggcccaggaaaggggactgttcttgtctggagttgggctgaagccgctttagcatgagggttttgcctttcctcaatcctccgaccccacagccttcctgttcctgcctcggtgattttgtcattcttgtctcgtttcctcttggtactttaaaagtaaaataacgactgttcatctgcccttagaagggctggcacagaaagagattcatcccaagctgtgcacctgctctatctgtacagttggcggatggggagccaaggaacaggacccccggagtcaggcagcattttactcaaacgctgagcactcgttccaagtctgagtaaggtagaagaatgagtggccagccctgccttcccacagctcaagtgcagcaagcaccgtccttaaaacagaagagctggccgggcgcggtggctcatacctgtaatcctagtactttgggaagccgaggcgggagaatcactggagctcaggagttcgtgaccagcctaggcaaacatagtgagatctcgtctctatttaaataaaatagaaaatctgtttaaaacaaacaaaaaatagaagagctgtcgtgaaacttgggtgctctgggtaaagcttgggaagaggcagggcctcccagcatgtctggaatccccaaattagcaacctgtttccttgtctgaaaaatgggtgtagaaatggccggctaagaggacaacggcactggtgccgggtgttgagcaagccctcgacagcctcaccgagagtgcaccaagggccacccgcgcgctgccgctcccagggctcccaccctcccctcggacgccggcctggtgaaccaggctgcaggcgcgcgtgggagcgctcagagctgtctcaggtgttctgagccgccagatcgggagtccagtgccctgctgagcccgagccccagcacaggctcccgtcgcgtcctcccgcagcccggggtccccgcccgcccagcgcctcccacgcgcggactcctaggctgagcgcgcagggcagcggggcccacgcgagggcggggcgagccggggctttgtgttcaaaccggccaatgggtggcggcggtgggcggtgacggccggcggggcctgaccaatgggctgcggcctgtcagcgttgactgacaggcgcacacatacagagtcggccacacgcgcgccgcccggccccactcgcgcagcgcgggcctccgccggccgcattgtccgcccgcccgccttgtcccgcgtcgccgctcttcgcgtgcccgcgcgccccgggcccggccgctgtgtcgccctgagcggagcgccgcccgcgggatccccacgcggaaagggggcgcgccccggcggcggcctggcctcggacgcccccggccgggctagaagccgccgcggcagcaggtgagtgcgggcgagctcaggagagggttggggggccgcggcccggcctgaccccgggtcaccgtcgggccactcgggcggggccgcgccgccaggcctgcttcctcctctccgggacgtgctgggccggatccagcctccacccgggtccgcggcccgcgccctgactcacctcctggcccccgccccgcctgccgcgccactggtcagccgggagggcggtgtctgcgggcgggacttcccgggcagcctcccgggaggaggagggcaaaggccgactgccccaacccggccccgggcagcgcctacgggttttgtgccagacaggccgtttccagggacaggcagttcccagcctctgcctgtcagaactcagggcctcagaggaaggcccgttttgttcagttctaaaacaaaacaaaacaaagcaatggggggcgcggtgtgacttagagagccaggaggcgcgcctttggtgacaatttctgcaggtttggcctgtgggaatgagggcagagggagttagcaccgggcgtttggcaggtcccacaagggcgtgtggcctggctgtgcccagggagtggaaatgtcacgaggaagatgccccagatctggtttaagtctgaagatggatggagatgtttgtgatggggaagggcggaattgagaaaggaagtcgcccagctgagaagtggggaaggatgctttccgatgagcgtttcctaactgattgttagggaggaggtggggcgggggtggtgtctattatgattcgcagtagtagatttcagctcccagaggctcacttcttgttttggagaatggggcctcgacctttttcatcttgtgaaacccagactca

SEQ ID NO: 9326 - DNA, 6000 bp, Homo sapiens
ccaggatgctagcatttcagtgctgacactgggaaaattccaggccagatgggatgagttcgtcaccctaagcctgtgttcaaatcctggctctgccatgtgcctggtgaaaccgccagttacctaattagcatccaatcacccatcttttagaaatgactttattacagtctaaaggccttccctgtgcaattcctctttctccctcctccccccttttaaaagtgtatctcagttcaaaaaacttttatttttatttttgtattgagacggcatctcactctgtcacccaggctggagtacagtggcacaatcacaacttactgcagccccgaccccttggactagagatcctcttgcctcggtctttcaagtagctgggactaccggtgcgtgccaccacacccaggtaatttttgtattttttgcagagacggggtttcaccatgttgcctgggctggtcttgaactcctgggctcaagacattctcctgccttcgcctcccaaagtgctgggattacaggtgtgagccaccatgcctggcctcaaaaaacattattgagaaaataccacgggctttcctaggctccggggaatgaaagaatgttctttccccttttatcagcagagacaatgactgggagaatgattagatggacaggggaagaatccatgatgcctcttgcagcctgaggccaactgcagtagcggacactggtgttcttcccactaacctcccccttccaggtgtccctaaggaagagaggccacgggcaccttggagggactactcctgaccgtgtatggagaactggaccttggtgtaaggaatggaccatggcagccagggaggggcccccttagctctccattcaacaacaactttgccactcagcagcaggtgaggcagttagcagacgctctccaacttcatgatccacctcagcttctgagctgaagccttgctcttctggggcaacttccagccaatgactcagggtgaaaagggcaccatagagacaggccatttgtgcctgatgcaaaaactccctcgtgggcagtctcggccccagagctccctgtcggggtggccaacactttgttagatcagcaccgaagtcagaggttctccctgcccgattctgtttctggccctcttatctttcacaggacatcacccccaataaagcacttgcacttccaaccccatctcagtgtccgcttcctggaggacccaactgacaaacactacctgtaaaacagattcatccacgtctctccaccaccaccaattccaagtcaccattacttggagaagcacctggagggaggcatagccctccaattgtaacccccctacttcctcttgttttgtttgtttgtttttgtttttgagacagggtctctgtcgcccagactgcagtgcagtggcgtgatctcggctcaccgcaacctccgcctcccaggctcaagtgattctcttgcccagcctcccgaatagctgggattacaggcgcgcaccactaccacctggctaatttttgtatttttagtagagacggggtttcaccatgttggccaggctggcctagaactcctgacctcaaacgatccacccgccttggcctcccaaagtgctgggattacaggcatgagtcaccgctcccggccctctgttatctctttgtaacccagtctccagacaactgccagagtggtcttttaaaaacacagtccaggtgatatcacttccgtgcttcagccctccagttgggcttcgagtcagacccactcccttcccggagcctgtaaatctctacacggcccccaccttcctgtccagcttcctccctcccctacatctcactctgcctctagccccactctgttccttctgttcctgaaatatattacgctcctttctgccccagggcctttgcactagcggttccctctgcctagaacacaccatctttccccagacttctgcatggctggtttcccaggtcatttaggtctgagctccaatgcaggccttttctgaccaccttataaatactgcccacctcccaattcccccttcctacttcctgtaactttctataacatcacttgaagatttttctttgtcattctcatcattattggaaattaacttgtttacttagttattcatttgtttactgcctgcctccccactggaatataaactgcgtgagcttgtcttgttcccagctctctccaatgcttggcactatgcctggcacaatgtaggtctcaaaacatattttctaaaatgaattcctatatttgttatatatggcagaattcccttggcctaagaatggaatgaaagtgaagaaatttaaaaaaaaaaaaactaggagtcatgacaattcagagggaaaatataggaactattccagttttagggaagttcccctgagaatacttctctgcccatcccttgaggaatcctgtgttaggattaaggggggtctctcccaggacccaggagagacgagttttgggacttctctgtcctctcctccttcctctgcctccagcagtggcattaggaactagttcagcaaacattcaccgagaagcttccctgggcaggcttcatgctgaatgctggggatagagatgggccaaggaagaagggagaggctgggcgccatggctcacgcctgtaatcccagcactttgggaggccgaggcaggtggatcacctgaggtcaggagttcaagaccagcctggccaacatattgaaactccatctctactaaaaatacaaaaattagctgggcgtggtggcgtgcacctgtagtcccagctacttgggagactgaggcaggagaattgcttgaacccgcaaggcagaggttccagtgagccgagatcacgccaccgcactgcagcctgggtgacagagcaagactctgtctcaaaaataaaataaaataaaaaataaagtcattctaggagatcaacagaccagtttaaacacaatttgactccagcctctggacccatttatccaaactgtccccaaagtctcagggggcagctcaggtaaaggtggcaccatttggtgcccaagtcacagtggctctgctgctcttggcagcagccctctctcttggcatctcctgtccttccctggacttcctatgacagtttctcctggggatgctatctccgtgtttctgtcttcacggcacacgtgtagatgtaccaggagtcccgatgtctcatgcatccccaggactttagcagggcctaccgctggcctttgccttccaagagcccagcccatctctctgtccatgagatgcttcctccaagcccagctgcctgccctgggttttgaggttacgacttcagtgagcaccagcacacatccacgcacacacagcactcaggttcctggcatacagcgcttgtgtttgcttctctcctctttcacaactcaggtatggatgaaaatccctggctcctagagatgggtgaacagggtggacatcatcctaacatgtgtggagagagggaggtggagcacgtgtgcctgggaacactggacaaaatccccgtggctggagagcgtcccccagggttgtggcttcctgggaaacattccggtctctccccaccaccagcgctatgtgaagtacactcgaaaccacagtggtagccgtggtggtccagagatcctggtttgcgctttcccttcaagtcaaaaatgcaggcttggaagggagacagagctgggaataaccacagccctcccaaggcccttccagccctgggaatccgtattggtcaggaaagacctcatggaaaattggagctggggataaagtgtggaggatagtaggattgtttttaagtttttaattgcaaagttaattttcaacaaaatatatatagacatttttgacagaagaaagtaaaacgctcctctgccacccccacagcacagcccactcccattcctgctgttccttctgggcctggtccacatgcccaccaggcacgtggcaccgcttgccaacgaaggcagactgcagtgggggtggggggtttctctggacctgtgaggctctaagcccccaaggattcagaggagagaatttccatcatcctctgagatcacaggaagattctgtaatgagggtggcggggagtgaactctgctccttcagaaggttggaggtgggggtgacgggcaggtggccacagtataaacagaagttaggtcaaaatccgagcctccccccaacccccaacactggcctcttctccacctctaaccgctcccactccagccccatccacagtctggtccggtgaaacgtgcctaagctcgcaggcggctccaacgcagccacccggtgaccttggacagaggcctgacctcaggtgtctcagtttcctcatttctattgtgagcctgtccacggcaaggctcaattgcgaccgagcttgtggcgcgcccagtgcacagccccacccggaagaaagctccctcccgggtggatgtgaacataaccggcttggggagggggcccgagcacgggagggctgggatgggggtcacccaggagccccgccgcgcggccctcgggtcgccggcccctgcgctgtgaccgcggcgagataaggtcccaggcgctgccctcgctcctcgccgcatccccggcggcgcccccagccgggcgcccggcactgaacgggtgcggggctgggccggggccagggccggcccggggaagcgagtggggcggggccgccgcgcccgctccccctccccgccgcctgccgtcttctcctcctcccgccgcccgggctcagagcggcggcagcagcggccgcggcgacagctccagctccggctccggctccggctccggctccggctcccgcgcctgccccgctcggcccagcgcgcccgggctccgcgccccgaccccgccgccgcgcctgccgggggcctcgggcgcccccgccgcccgcctcacgctgaagttcctggccgtgctgctggccgcgggcatgctggcgttcctcggtgccgtcatctgcatcatcgccagcgtgcccctggcggccagcccggcgcgggcgctgcccggcggcgccgacaatgcttcggtcgcctcgggcgccgccgcgtccccgggcccgcagcggagcctgagcgcgctgcacggcgcgggcggttcagccgggccccccgcgctgcccggggcacccgcggccagcgcgcacccgctgccgcccgggcccctgttcagccgcttcctgtgcacgccgctggctgctgcctgcccgtcgggggcccagcagggggacgcggcgggcgctgcgccgggcgagcgcgaagagctgctgctgctgcagagcacggccgagcagctgcgccagacggcgctgcagcaggaggcgcgcatccgcgccgaccaggacaccatccgtgagctcaccggcaagctgggccgctgcgagagcggcctgccgcgcggcctccagggcgccgggccccgccgcgacaccatggccgacgggccctgggactcgcctgcgctcattctggagctggaggacgccgtgcgcgccctgcgggaccgcatcgaccgcctggaggtgagcgccgcgcgccgtcgggggagccgcccgggtggtgtgaggggccgcccggccgcggtcgtccggcggtccccgagcctccggtctcccgtctgtgttccggggacgatcgcgccttcctcgctggcgaggcggggggatttcgatagggaacgcgggcaggcgtctggcacggtgactgaggcacagagggcgcgccagaaagattcgctccccacccttttccgtctccaggcacctctctgagcctcagtttctgtgtctgtaaaataggtataacagtgtccacttgtagtggaaattgaatcaaatgtaggtgtgtgaaaatgcttggcacgtactagga

SEQ ID NO: 9327 - DNA, 6000 bp, Homo sapiens
cccgtctctactaaaaatacaaaaactagccaggcatggtgttgggcacctgtaattccagctactcgggaggctgagtcaggagaatcacttgaacctgggaggcagaggttgcagtgagctgagatcacgaaacacagtctcaaaaaacaaaaactagtttttaatttccccccccacccccgactttttgtagcatatgttctattttatgtctctggtactcaggttatttactaggtatattaggctgcagactattaagtgctgcaaacaagaacccctaaaaaacatgtactttattttgggtagctgttcagaggcaggcattctgccatacttagaaggtagcttccatttctagtccaaagttgcttgctctggtgctcattctccaattgaggaaataggagaagggggctctgggaaacacgctgagatactgaagataatatatgatgttaacattttattacttctaatatcccattggtcagtttgtgtgttcaggctatgtttagctgcagggaaagccagtttgtcatccataactgtgtgatcacatgctcaagaaaaaacttaagagtagaaacaggaaagacgacttggggtgacacctagcagtctaccatactaggaaatactagtttgataagataaaggagaaacaatttcattttagagatttgctgatgactaaaattaatgcacctgagtaggcacaggtaagtagtgtttgtgccaagccctgttataatcagtttgcaagtattggatcaattctgataatgaccataagggtagatactgttagcaccactttacaattttatagataaggaaactgaagcacttaataagtaaattgcccaggataacacagctgattatttgtaaagctgagattcttgaatacagaggtttgtggcttcaaagggctttctcccaaactctgtactgtgctgcctctgtgtacaaggttgattcttgcagaattgtttaaggaactgaaaactaaaatgtacatttgaataaggttggttaaataaggagtgtcacacacttgatgtgctgatgtgtacatccagggggtttcttcctaatagtaagggacacagcataattgaagtgcatgacgagcccccaaataagggcaagaataaactaagtaaaaattatagtacagtaattataaaaagttcaatatgtgccagtatttacaaccagtatataatgtacttaatagagctcatacagtttggagaggaaaatgtcctaaagtaaataggcaacaaaagtgagtaactgagctttaaaaagcaaatttaaatagtatgtcaagttggcaatttttcagtgagacctttcatatagtgctggtggaagtgtaagtttatggttttctataaagttgtttagcaataaataaaaactttgacgtttggtgaaatcctaattttaaaattacggctctaagaagccaggaggtaagtagaactaatgtaaatgtctgtggtgctctgaaaatctaggcatctaatacataattaagtagtttactcacacagatcactgggacatttttagattgcagggtaagtaacctgaccatacttaagccagtgtaaaagcaacatacacgaaatggcaagtactagctaggttcctttaattcttatagcatgggtgtatatagaatggccctaaattttttatatactttatgtagtgtcaaggggtatgatgcttatataattcaaaggaccctctttaaggaaaagaatgtaattatgaacactaaattggacacacaagtagatacttgtttagaacgaaaaaagcagccaaaaattacaatccttaggttttttgaaacagaatctttctctgttgcccacactggagtgcagtgatgcaattgcagctcactacagccttgacctgggctcaagcaatcctcccacctcagcctcccaagtagatgggactgcaggcatgcaccaccatgcccatctgtttgtttttaacagcaatgaggtcttactttgttgtccaggctggtctggaactcctggtttcaaataatcctcctgcctcagcctcccaaagtgcagggattacaggcatgaccccctgtgctcaactaagttataatttttaaaaattatgtctcaaccgggcacggtggctcacgcctgtaatcccaacactttgggaggccagggggtgggggggggggtgaggtcaggagttcgagaccagcctggtcaacatggtgaaaccctgtccctaaaaagtacaaaaattagccaggcgtggtggtgcatgcctatagtcctagctactcgggaggctgaggaaggagaattgcttgaacctgggaggcagaggttgcagtgagctgaagttgcgccattgcactccagcctgggcgacaagagcaaaactgtctcaaaaaaaaaaaaatatatatatatatatacgtatatgtgtgtatatatatatatatatatatatacgtatatatacgtatatatatatacgtatatatatatatatacgtgtatatatatatgtatgtatgtgtgtgtctcgaacatcacagcttcatagttccagttaataactgatgtagctatgcagtgtctacgtttttcagtgcatactgattatatgaaaatgactttggctgggtgcagtgctcacacctctaatttgagcactttgggaggccgaggtgtgtggatcacctgaggtcaggagttcgagaccagcctggccaacatggtgaaaccctgtctccactaaaaatacaaaaatgagccaggtatgggggcgtgcacctgtagtcccagctactcgggaggctgaggcaggagaatcacttgaacccgggagatggaggctaacatgagtcaagatcgcgtcactgcactccagcctaggtgacagagcgatactccgtctcaaaaaaaaaaaaaaaaatactgttttcagtatgtcagtcttcagttgatcatgctgggcgctgtggctcacacctgtaatcccagcactttgggaggccgaggcgggcggaccacgaggtcaagagatttgagaccatcctgaccaacatgatgaaaccccgtctctactaaaaatacaaaaattagctgggcgtggtagcgcatgcctgtaatcccagctactcgagaggctgaggtaggagaatcacttgaacccgggaggcggaggttgcagtgagccaagcctgggccacaagagtgaaactccatctgaaaaaaaaaaaaaaggttgcaaggcccggtacagtggctcatgcctgtaatacgagcactttgggtggctgaagcaggtggatcacttgagcccaggagtacaagaccagcctggacaacgcagagaaacactgtctcaggtttaaaaaaaaaaaaaagctgatcaaaatgtttttggtatgtaagatacaaaaacgtcaaaacaaagtattaacaatgttttcataactatgatgcataatccagtatattcttgacagcaagctcccaatttgatcaggagtcaatgagaactgagttctcaagttttacagccaactagtttctatgttcccatgccaaaataatctttttttttttttttttaggagtctcactctgtcccaggctagagtgcagtggtgcaatcttggctcactgcaacctttgcttcctgggttcaagcgattctcctgcctcagcctccctagtagctgcagtttcaacattgtaatttctacaaggcgcgtgccaccatgtccggctaattttttctatttttaatagagacagggttttgccatatgggccaggcttgtctcaaacttctgacctcaagtgatctgcccgctacggcctcccaaagtgctaggattacaggcctgagccgctgcgcccagcccaaaatcatcttcgcttcacttttggtccttcactttcacgtcatgattctatggcgtgatgggaatgttcctggaagcagtatcttctgcaaattttgtgaaaacggccaggttaaactttgttagacccctctcccagggattaagtgtgatgatgggcataaaacactaagcctggcatgtagtcagcactgaggagttatcacgaggatattctaaaaggaaacatggtaaagacaagtggtgatggtgtctcaggaaagaatccctgagtccctgaggagcatcctgaagcagaatctcacagtatgacaggttaaagctgaatgtggctgctttagttttgtgtaattttgttagtcactttgcaacatggaaaaaaatttttttccttcagtattttatgaagtactactacataaattggctttcgtaatcctcacagcagatggggattgttggtactagtacattgtcatttcacagaggaaacccaagaggttaaatgacttccatagttgccaactagggggaggctcccactcgcgtcttgtattttgggctcctgatgctcaacatctcttcccaccacactcaagggtttttctggaggaagaagtttccaagtccacaagtgagtttttttcctcttggccaaaatgtgactttcagaatagaaaagagctcaggcgcagagaaacagggagactggagtctcattgagtttccccatctttgtcaccagagtaaaagaaggccattaagacttctgagatggaggaactggtcagggcccgggaacgccagagaacgtcggaggaaccgggagccgggtacctggtgtcaggccgccttgcgccttggagcccagccccgcgaacacctcgctgtcccgccccgcgcccacaggggccaatcagcgttcaggggcgttcttagccgcccccccccccccgctttcccgccccgcgacccggaagtggttctagggcaggcgggcgggtttgagagggcggggattgcgactctcacaccctgagctccggtgctcctttcctaactccactggctgcggcatctgtgggaaaagtgtggctgggtcttcgaggagccgcaccaatggcttccgtgctgtcctacgaaagcctggtccacgccgtggccggagccgtggtgagacggggtctttacgcccgggccgcaacgggttataaggcttctcgggggccagtcccgggatatgcctgagggatgggtctgagagggaggtagtgtgggttggggtccactgtcatgactgtggggcagagaggaatgggccattggcggaaagttgttggaggaattcggggtaagggccgagactccgccacctcctggtctcctagagactgcggggtagagagccgtgttcacacgtgcccgctcagggtccgcatctttgccgtgggaagtttaaggtcaggctaccaccgcacactcacacactttgctttactggcccggaggagaacgtaggtgtgaagccgtgttgcttagtcacatgcttccctacagcctgtcttcacgcttgccgcgggcaagtggcaatacctagtaggatagctctgggcaccgttattggcaggagaagatagatccttttttttttttttttttttccggacagggtcttgctctgttgcccaagctggagtgcagtggcgcgatcacgactcactgcagcctcgatctcccgggctccagcgatccgcccacctcagcttcctgagtagctgggactgcaggtgtgagccaccacacccggctacatttttaaaaaaaatttttggggtctggcagtgttgcccaggctggtctcgaattcctggcctcaaacgatcctctcgatttggcgtcctaaactgctggcatgagccactgtgcctggcttttttttctttctttctaaatcaagatctgggttcctgtctaccacaagtgtggtttgttatgaggtatacgcttgattcttgggcttctggtgtctaggttccacttgacacttcccctctccc

SEQ ID NO: 9328 - DNA, 6000 bp, Homo sapiens; identical to SEQ ID NO: 3723

SEQ ID NO: 9329 - DNA, 6000 bp, Homo sapiens
caccccactccaggggaagaggagtgccagcccttacccacctgagtgggcacagtgtagcatttattcattagcccccacactggcctgaccgtctcccctgtgggctgcatgacaaggagagagaacaggctgaggtgagagctactgtcaacacctaaacctaaaaaatctataattgggctgggcagggtggctcacgcctgtaatcccagcactttgggaggccgagatgggtggatcacctgaggtcagatgttcgagaccagcctggccaacatggtgaaaccccgtctctactaaaaatacaaaaaattagctgggcgtggtggtgggtgcctgtaatcccagctactcaggaggctgaggcaggagaattgcttgaacctgggaggcagaggttgcagtgagccgagatcacaccattgcactccagtctgggtgataagtatgaaacgccatctccaaaacaaaagaaaagcctaattccccaagaactgtcagtctttcacctgtctgctagctcccagggagaccccacttgccagggctgtctacatttgtcctgagatctcttctggtgggaacagcactttcctcaggaaagtttgttgaaagtcatcagatccatgattgaaaatcgaagctgcctgtggtgatggataacagctggggttaaaaagcagcagctggggcatgagcggtccacagtgagtttttgttgttgtttttgtttttttgggtgggggatggggtcttgctaggtctcaaactcctggcctcaagtcatcctcccattacagccttctgagtcactgacactacaggtgtgagccaccatgtccagcttgtagtggttttgaacagctcttgccccttcttgggaatctaggtgccctgcacgtgggtaaggctgtctgcagctgtgcccatattcaggaaggccggcaaggccctgagccctcacccgtgactgacctgaggtgctgtgcagacagcaggtgacggctaagggaaagttgagcactgcctagccgagcactgaagccacgcccggcacacagagagagacccactcggcaaagacttcgcttccaggcacctaaggaactctctgaccagtcattagctgaccactgccgtaactgaagagcggcttcagtggccacagctcgcagggaatggagacattaatgcttagtcagaattagttcagaaaagtcacccagcaaagaaacagctccaacaggcaacaacaacaacacatccttggcagggaagagaatctgacttccggagttgccacattatcgcccgtgaaatgtccaggttttaacaaattatgagacatggaaaggaaaccgaaaggacgacccagacacgggaaaagtcaccaatgggaccagcccgatgctgcaattgctagacaaagacgttcagtcagctcatttaaatatgttcaaagacctaaaacatgctgcatctgaggctgcaccggctggaacctgctgatctcggaagctaagcatggtcaggcctggctagtacttcaaagggagaaaccacgtgtaggcctggtgcagtggctcacacctataatcctagcactctgggaagctgaggcccgtggattgcttgagcccaggagtttgagagcagcttgggaaatgtggtgagacccccatctctacaaaaaatttaaaaaattagctggctgcctatggtcccagcctctcaggatgctgaggtaggaggatcacttcagcccaggaagttgaggctgcagtgagccatgactgcatcactgcactccagcttgggcgacagagagaccctctcccaagaaaaagaaaagaaccatgtcaaaagaactaacgaaagtgtgggaacaatgtctcaccaattagagaatatcaataatgggatgaaccttataaaaaggggctgggcatggtggctcatgcctataatcccagcactttgggaggctgaggcgggcatatcatgaggtcaagagattgagaccagcctggccaacatggtgaaaccccgtctctacttaaaatacaaaaattagccgggcgtggtggcacgtgcctgtaatcccagctactcgggaggctgaggcaggagaatcgcttgaacccgagaggcagagattgcagtgagccgagattgcaccactgcactacagcctgggtgacagagcgatactccaaaaaacaaaacaaaacaaaaaacaaaaaaaaagttgaaaaaggaaccaaataaaaattctggagttgtagggtaaaataaatgaaaattcatcccaggggcccaagagcagattggaacaattggaagaaagagcctgtgactatggagagaggccacctgaggtagtcccctctgaggaacaggaacaagcatgaagagcaatgcacagagatccagagacctggagacgccgtcaagctttccgacatacacgcaatgggagtcccaggaaagaagacagggagaaaggagtaaaggaatagttgaagaattaatggctgaaaaacctcccaaatctgatgaaaaatattaatctgtacatccaaaaagctcatcaaactccaagtagggtaaactcaaagagatcttcagccatacgcatcatcataatcactgtcaaaagacagatttttctttttttagaattttaaatgtaccttttaatttgctcctggggcaaagagccaggactggtactagagcagtgtctgggatgagaagaatttaataaaatgggattaggtccaatggttgggttaggggaggcaacctgctcgggaggatcagcctcaacctatccatgcagcagggcctccacctgtccctctccgtagtcccacacctggaacccagagccatctgcctcttcccagatcatggccgacagcactccaccggactgctgctggagcaggcacaggattcacttattgagggctgtggcctggcacagatcatagcctatacccagggacagttgtgtcacttctgccaccaccacatccgccttctgcagccacatcaagtaccactcatggatgagcccgtcacccccagcggacttatcaaccccgcgtccagctccacagccgccacgtgctcggtgagcactggctccaagcatggcagctgccatacaatccacctgtagagggcccggtcctcctgtcctcagtggatgatcccatagaagtccagagctcggcagctgccctcccacaaaagacaggattttgaaagcagcaagagagaagagacgtatcaggtagtcacagtggctcaggcctgtaatcccagcactttgggaggcccaggtgggaggatcgcttcaccccaggaattcaagaccagcctggacaacttggaagaaccgggtctctacaaaaaatacaaaattagctgggattgggtgcggtggctcatgcctataatcccagcactttgggagcctgaggtgggtggatcacctgaagtcaggagttcaagactagcctggccaacatggtgaaaccctatctctactgaaaatacaaaaagctagacgtggtggcacacacctgtaatcccagctacttaggaggctgaggcaggagaattgcttgaagcctagaggtgaaggttgtagtgagccgagattgcatcattgcacaatggaggggagccaccagcctgggcaacaagaggaaatctccgtctccaaaaaaaaaaaaaaaaaaaaaaaaaaaggattaggctgggtggtgcctgtagtcccagctacttgggaggcagggggtccacttgatgtcgagactgcagtgagccatgatcctgccactgcactccggcctgggcaacagagtgagaccctgtctaaagaaaaaaaaaataaagcaacatatcctgaacaaaggatcctccataacgttcccaccagatttctaatcagaaacatggaggccagaaagcagtggaggaggacgaccctcaggcagcccgggaggatgttgtcacaggctggggcaagggccttccggctaccaactgggagctctgggaacagccctgttgcaaacaagaagccatagcccggccagagcccaggaatgtgggctgggctgggagcagcctctggacaggagtggtcccatccaggaaacctccggcatggctgggaagtggggtacttggtgccgggtctgtatgtgtgtgtgactggtgtgtgtgagagagaatgtgtgctctaagtgtcagtgtgagtctgtgtatgtgtgaatattgtctttgtgtgggtgattttctgcatgtgtaatcgtgtccctgcaagtgtgaacaagtggacaagtgtctgggagtggacaagagatctgtgcaccatcaggtgtgtgcatagcgtctgtgcatgtcaagagtgcaaggtgaagtgaagggaccaggcccatgatgccactcatcatcaggagctctaaggccccaggtaagtgccagtgacagataagggtgctgaaggtcactctggagtgggcaggtgggggtagggaaagggcaaggccatgttctggaggaggggttgtgactacattagggtgtatgagcctagctgggaggtggatggccgggtccactgaaaccctggttatcccagaaggctttgcaggcttcaggagcttggagtggggagagggggtgacttctccgaccaggcccctccaccggcctaccctgggtaagggcctggagcaggaagcaggggcaagaacctctggagcagcccatacccgccctggcctgactctgccactggcagcacagtcaacacagcaggttcactcacagcagagggcaaaggccatcatcagctccctttataagggaagggtcacgcgctcggtgtgctgagagtgtcctgcctggtcctctgtgcctggtggggtgggggtgccaggtgtgtccagaggagcccatttggtagtgaggcaggtatggggctagaagcactggtgcccctggccgtgatagtggccatcttcctgctcctggtggacctgatgcaccggcgccaacgctgggctgcacgctacccaccaggccccctgccactgcccgggctgggcaacctgctgcatgtggacttccagaacacaccatactgcttcgaccaggtgagggaggaggtcctggagggcggcagaggtcctgaggatgccccaccaccagcaaacatgggtggtgggtgaaaccacaggctggaccagaagccaggctgagaaggggaagcaggtttgggggacttcctggagaagggcatttatacatggcatgaaggactggattttccaaaggccaaggaagagtagggcaagggcctggaggtggagctggacttggcagtgggcatgcaagcccattgggcaacatatgttatggagtacaaagtcccttctgctgacaccagaaggaaaggccttgggaatggaagatgagttagtcctgagtgccgtttaaatcacgaaatcgaggatgaagggggtgcagtgacccggttcaaaccttttgcactgtgggtcctcgggcctcactgctcaccggcatggaccatcatctgggaatgggatgctaactggggcctctcggcaattttggtgactcttgcaaggtcatacctgggtgacgcatccaaactgagttcctccatcacagaaggtgtgacccccacccccgccccaggatcaggaggctgggtctcctccttccacctgctcactcctggtagccccgggggtcgtccaaggttcaaataggactaggacctgtagtctggggggatcctggcttgacaagaggccctgaccctccctctgcagttgcggcgccgcttcggggacgtgttcagcctgcagctggcctggacgccggtggtcgtgctcaatgggctggcggccgtgcgcgaggcgctggtgacccacggcgaggacaccgccg

SEQ ID NO: 9330 - DNA, 6000 bp, Homo sapiens
atcacttgaggccaggagttcgagaccagcctggccaacatggtaaaaccccgtctctactaaaaaatacaaacatagccgggtgtggtggtgggtgcctttaatcccagctgcttgggaggctgagacaggagaatcacttgaacctgggaggaggaggttgcagtgagccaagatcgcaccactgcactccagcctgggtgacggagcgagactccatctcagaaaaaaaaaaaaaaaaagacaaaaagaaaaaatcatgccacctttgttttttgtttcttccagatcttgaagattccttttggtgtggcggggttggggagttggcactagctccttgctgcctcccagaaactgagcatagcagggggaccatggtatgtgtccagtagaaaagcccgggtcccctctgtgacctcaagcaggtgagtcactgtttttctccctcactaaatatgtcagctgaggcgtataatatctgccctgattaaaggaccaggtgaattgcaggagagcgcagtggttaaagccaggtcccgggagctggagcccttgttccactgcgtcttcgctgtgtggccttgggcaagtggcttgtgttctctgaactccagtttcctcatctgcgaagcaggagcagtcataacacctcccatacaaggtttctatgagggctgaagtacaagaaaagcctttagaactgtgtctggcatcaaacaaatgcttaagagccaaaaatacaagcagctggaactgagaggggattctggagacaagccaggccaggcttccagcccgggcagcctgcgggcagatggcctccaggtgggtctgcctgcctctggtggggtcagcaccacccagctgcagggccactgcgaggcacaagacggccccagaggtaaacccggctgctcctaggatggaggctgccctttttgatagtgagggtgtttgagagagagggtggatcggcccctgagtaccctggaaccctttttgcctcagtgaagccagctcagagggtcattctgaggggtccctcctgctggtcggctcagctcctcttggtgctggagtctttggggaggaaggaagtgattttcgcagccgcagcggggagcagagggatctccttcccacggcacttctgcttcctgtgcagaaaggaaccatgaagagctcaggacctcactgtgtcccggctggaggcctctcagctgccacttgctggctggggcatttgaaaatcctggattgaggccgggtgcggtggctcacgcctgtagtcccagcacttcgggaggccaaggcgggcagatcacctgaggtcaggagttcgagaccagcctggccaacatggtaaaaccctatctctactaaaaatacaaaaattagccaggtgtggtggcaggcgcctgtaatcccaactactcggaaggctgaggcgggagaatcacttgaacccgcaaggcagagatttcagtgagctgagatcatgccactgcactccagcctagtggagtcttttttgagcctgtctcaaaaaaaaaaaaaaaaaaaaagaagaagaaaaggaaatcttggaggtggtcgtgggtaggggatctgtttttctccctggacagggagcgccttgagggcaaaaccatgacttatgttttgtctgcccaatgcctggcacgcagtaggcacataataagtgtttgtggaactaaactgaaaacagagaccagctgggcaaagtggctcacacctataatcgcagcactttgggaggctgaggtgggcggatcacctgaggttgggagttcgagaccagcctgaccaacatgaagaaatgccatctctactaaaaatacaaaattagccgggcgtggtggcacatgcctgtaatcccagctactcgggaggctgaggcaggagaatcacttgaacccgggaggcagagtttacggtgagccgagatcgcgccattgcactccagcctgggcaacaagagaaaaattctgtctcaaaaaaaaaaaaaaaagaaagaaaagaaaaagaaaacagaggccagtaattgtggtctcatttggaaagccttagtcttggtgtcgaggaggcccctggggactgcaggggacacctgggctcccccatttccccacccagcttccacctccttcagggctgccactcagaaattactttaacctccctgttcctcagtttcctcatctgtacaatggaggtgattagagtgcctgccccatagggctgcagtgaggattaaactggcaaggagagcaggtcccctggagcagtgtcaggcgcttggaagcttcccggaactgctctattattgcttcactctgctgaggttgccgtgcccctaggcttcccagggaggctaggctctttcacttctacagcctccgtgaggccagggcccagggcagggcaggtgttcagtatactgtgaggcatagatgcacggataaacggggaatggacggaggtctgggcaaaagccagtggctgagacgtgtggtccccagggacctcacctgcaaattcagctgccaaggcctagctcgaaggctgtgccactgaagctgcccctgggacacccacagagcctcctcattcctctgctccgccttcagcctttggggcctttactgtttattcacagctctggctgagggcacaggagaggaagcacatgagaggtgctagaaagttttggtagaaatgaggctcctggatgcgctgcggttttatttctatccccctggctcccgaggaggatcagggccagacacgaggccccgacagcgcagccagggctgctgggctccttgccaaggtgcgtccctgcctctccccaggaggctgcgtggctgcagagcgtctcagaaactgggcaatgagctgggaccctcagctgcttcttgtccagtcatgtctgcgctccacagcccagggcctgcctggggagtatgcacgcctcctcccaccctgcctcccagaggctaccccttcccttgaggcctcttgtgcaccagcgtggtgttgggcacctgccttcatatcaagcctggaggaaggcttctccctgccttatgctcacccatccgtccattcctgcaccccctgggccaggctcaagaaggagaggggaggaagacaggcagctcaggcaggcaagcgtggaaaccaggtgtgcagcaggctagacccagactcagaggcggcagaactcccgggagtccgaggtacagagttggggtgtggggggcaccgtgacaggctgagaggtagggtcagtgagctggcacaggggcaggagcggaggcggcaccagggctggaagagcaggctcccttgttccgaggcagtttggcattcagctgcctcccagtgccaagtcgtaatgagacttgtagaggcacagaccgatgcttttccaatgctccccgtgtaccctgaggcattgacacgaggtctatcaccatggcatcaaggtgcttagacaacctgctactcccaggagccaggaatagcgtgaagcagcgggtctgcatctcactgtgacatatgtgagcatgtatcactgtgatggatcaacagtcaataacactggggtccccgcctgccccctgcgcggtaggaaacttctcctgttcatatgtcttcctcccctggtgggcggcccctgctcttgccagcctcccagtgctcgtggcattggtggaaacgtctttaggctttcactgttcatgtttggagcagcccagggaaaagcatgtgtgcaaagaactgaaatggatctcatgatgccgtcaccgggggctgcagctggacacacctgagcaggcagtagcagggtgggagaaggctcggacatcataccactggcagttcaaatgcccgccccacagacctgccctgatcctaggcatgttgttttgcctcctggggccgaggtcttctcttttgtacaactgggatcatcacatttatctggtgagtgaagggacacctgcagagaagggaggtaagcgctcagcatgcgctgaaactcagccaccttcccgcctgcgtcttccatgtaccaggtgcctccagctccaccagccatcaccacaccccagcccctttcctctgccactccagacacgcaggcagatgtgtgggtgccaagggtgaggggctcccagtctgctggggaagggggtcccggcagcaaacaattcctgtccccggctgatgctgctagaagtgagagcaggggctgtgacctgcagccaatggggaagcagttcgagggtctcacagttgggaggccgagtgagctaagctttagggcagccacagggaggagctgacgttagagatggaccagagaggaggcgtctcctgggcctctgcaggggacccacagaggttctcgctgggtgaatgatgggcagcctgcctttcacctgccctgggtgtttggccctctctagggctgggaacatgaggctcctgcccttcaccccagcctccctaccacccctcaccaaaaaacctacctttggtaaacacattattaagggattctcagaatattttagagaagtttgtgtgaacatgcttgtggtcgttttaaaagtgtttcagaagtgagaggctaaaccaaggcccgaagtcactcatggaaatcccatgatccctctgcacagttaccagtgtctcctggacggggcccctgctggaaaggggccgagacagggtgaagcccaccaggggttggagtggggaggcttgggtcccgtctccagctcttcttctggttgtgtggcctggaccagtctcagtgccaggttcctcatctggcggccaccctgctgggctgttccagctttgcttctgagcggaaggtcaggggctgccagggaggagcttcgtggggaaagcaaaggggaagctgtcagcgccggccgtcccctcctgtgaactaaagagtcgccgcagacaagcaggcccccagatggagaaccagcctgtgaggtggcgggccctgccaggcctcccacgccctcctgggctccccgcagccccctggctcctccttggcgtgctgctgctgcccgggaccctgcgactggcaggtagtgtctgtcttcctccttctctctactctctcgctccagaacatcagagcggctttcatcccgcccggcgcagctaattcccagggacctgtctctggggatttgctggttgtcgtttgaacgctgcagacttcacaggggaagccttctgggaccgagaagatgtttagctaatgccttgccaaggtggcttttgaaggggagggggacagcgctctctccctcgctgctgtgacagctttgccccagcagtctggcctcctggcccttaaacaaggagggtgggcgctgtgtggctggggccaggggcggggcaggggggagggacagctccccatccgaggaacctcacgtggctgctgcgggggacactgcgttgaacctggcaagtggtggggctaccctctgggttgttgctggcattggccagggagagcggggagaggggggagggggggataccagggccagccacagggctctgcgcccagaggcacaaaactgtcagtcaccagaaagggtctcacctcccagttcctgaaacacaaccagaggccaagtgttttaggatgcaagtgtgtctttccacgccagcggcgctcctttcctggttccaggctttcttggaagctgggtggccgggatccgagccaagctgtggggtaggtagcctcagggccagttcatcaggccagggacggcccaggagggtcccattccagggctgccagcacgagggctcagtgaattctgccagattctctctgcccctccttggccgggcagcagccaaccctccctctggccaaaggggtggcctccactgtggagacagggtgccttcctttct

SEQ ID NO: 9331 - DNA, 6000 bp, Homo sapiens
aaagaatagctagaaaggactttatggggtaattgggaatatggacagataatagcatcgggtcaatgttaagtttcctgaatttgataatcacacaatgtaggagagcgaccctgttcttgggagaagtatggggaagtgtttaggggtgaagggtcaagtgtctgcaactaattgtcacatggttcaccaaaaccaaatagagagatagggagatagagagaaaagcagggagaaagagaaagagctgaaatgataaccactggtgaatgtgattgttgtatttatactattcttgcaacttctctgtacgttaaatatttttcccgaacaaaagtctgagggagaataaatataaaatatcagaagcagaaggagctttaaagacctcgaggtctgcccaccctctctcagacaagtgccctgagaaggaaaggtcttggcctgcggtcactccatgagccgtagcagagctggccagacccaaccttgctagctgcaaacacgagtccccagcccagggtctgagagctcccaagaacagcaggcgagcctctagtcaatgtccttcctgtttcgtctccctgctccccggggctgcctcacagtcagcaccttgcaggaggtgagcagcccccatgagcttcaggggagaaacctacccctccctttccaaagaaactggacccccaacttccctcaacctgctctgctgaccacactggggagacatccctacctccctgggtgcaggcaggattagacctcagggtaaaaaggagggctcagagcaaaaacgatatgttattttattttatttttttattttattttttgagacagagtctcgccccgttgcccaggctggagtgcagtggtgcaatctcggctcacggcaacctccaactctcgggttcaagcaattctcctgcctcagcctcctgagaagctgggactacaggcgccctccaccatgcctggctaatttttgtatttttagtagagacggggtttcaccatgttggaccaggctggtctcgaactcctcaggtgatctgcctgccttggcctcccaaagtgctgggattacaggtgtgagccaccaagcttggcagaaaaaaggacattttaacagtgtcccctggaaagcagcaagttctggggcctcacttggctgttgcaagcagatccaaaccccagaaaggaaatgtgttgggagctgaggcccagatcaataaatgggcaaaataaacacccttggcacagtcctgtgccagggttgggggcagccagaggacaggattgctggaactggggaccaagccagctggagggtatggacaatgaggggtctccagtgaccccatctttttttttttttgagagagagagagaaatatgcaactggacaatttgttagcttttcttttcttttttttttttttttgagatggagtctctctcagtggcccaggctggaatgcagtggtgtaatctcagctcactgcaacctccgccttccgggttcacgccattctcctgcctcagcctcccgagtagctgggactacaggcatccaccactatgcccggctaattttttttgtatttttagtagagacggggtttcaccgtgttagccaggatggtcttgatctcctgaactcatgatccacccgcctcggcctcccaaagtgctgggattacaggcgtgagccaccgtgcccggctagcttttcttttccttttttttttttttgagtctcaaactcctgacctcaggtgatccattcacctcagcctctcaaagtgctgggattacaggcgtgagccactgcgcctggcctgtgtgtttttcttttcctctttttgttagtttttcaattaaaaaaagacacctaacccatgtagtgtcatctttctacaaccagtgttcccatgggggtaaaactattcagattacttgcacgtaaaaaataatttaacctttagcatgaaaatatgtggcaaaacccagaaagatccatcatgaatccaagatactttcagcaaaaagttataccaaaataaataaaataaaattgaaataatgcttagctgatcccaagtcaagatttacgtttgtattctatggcagtaggtccctccctccacactgcccccagagttccctctttaaaaccagtaggtgagctgggcaccgtggctcacgcctgtaatcctagcactttgggaagcagaggcgagtggatcatgaggtcatgaaatcgagaccattctggccaacatggtgaaaccccgtctctactaaaaatacaaaaactagttggacatgctgggcgtggtggctcacgcctataatcccagcactttgggaggccgaggcaggcagatcacctgaggtcaggagttcgagaacagcctgaccaacatggagaaaccctgtctctcctaaaaatacaaaattagctgggtgtggtggcgcatgcctgtaatcctcgctactcgggaggctaaggtaggagaatcacttgaacctgagaggcggaggttgcggcgagccgagatcgcaccattgcactccagcctgggcaacaagaacgaaactccgtctcaaaaaatataataataataataataattagctgggcatggtggcacgcacctgtagtcccagccactagggaagctgaggcaggagaatcgcttgaaccccggaggttgcagtgagccgcgattgcagtgagcctggcaacagagcaagactccgtctcaaaaaagaaaaaccaaccaaccaaccaaacaaacaaaaaaaacagtaggtcaggtgggtgggtaggcagacgggcatggtggctcatgcctgtaatcccagtgctccgggaggctgtggtgggaggatggcttgagctgcagtgagctgtgactgcatcactacactccagcctgggcatcagagcgagatctcttctctgggtaaataaacccagtgagtcactccctcagctacctagatcctgcagggctccccattctccttgacattccagttctttccacccggggctccacattgcctccccaacgtcacatcacaccccagctcggctgtatcagcccctctaaccttgcccatcaggcctctgttcacctgtctccacctccaggccctgccagcaaggcgcttctccctttctctgcctggtctgtgccacgttgcctgaacacacagcccaccccatcccctcagagcaccaggagctcacatctgggtccaagaccctaccaggagagcaaggcaagagaatgacgctaaggcccagcatgagcctacacagagaaggtgcccactgtctgtcaaattcatccattcaacaagtatttaggctgctcatcgtggctcacgcttataatcccagcactttgggaggccaaggtgggaggatggcttgaacccaggagttccggaccagcctgggcaacatagtgaaacccgtctctacaaaaaaatgcaaaaatggccgggcgcggtagttcccacctgtaatcccggcactttgggaagccgaggcaggtggatcacctgaggtcggaagttcgagaccagcctcaccaacatgttgaaacaccgtctctactaaaaatacaaaattaggccgggcgcggtggctcacgcctgtaatcccagcactttgggaggccgaggcgggcggatcacgaggtcaggagatcgagaccatcctcgctaacacggtgaaaccccgtccctactgaaaatacaaaaaattagccgggcgcggtggggtgcctgtagtgccagctactcgggaggctgagaatggcgtgaaccctggaggcggagcttgcattgagccgaaatggcgccactgcattccagcctgggggacagggcgagactctgtctcaaaaaaaaaaaaaaaaaaaaaaaaaaaaagattagctggttagccagatgtggtggcacatgcctgtaatttcgggaggctgaggcaggaggatctgttgaaccctggaggcggagtttgcggtgagccgagatcgcgtcaatgcataccagcctgggcaacaagagcgaaactgcgtctcaaaaaaaaaaacaattagccggacgtggtggcatgtgcccagctactcaggaggttgaggcaggaggaacacttgagcctgggaggttgaggctaaagtgagctgtgatcaggctcctgcattccagtctgggcaagagtgagaccctgctttaccaaaaaaaaaaaaaaaaaaaaaggtatttattgagcacctactatatgctaggctctgtgtggctaggctctggggatgtacgggacttcaaaccagatagggccttgccctccgggagcgcacagtccactgggatggggtgggagtgggggaaacacgcaggaggccttcagctaagtgggacaaagatcactccacagtgggacaatggcgtggggagcggaggcgccgccggcgaggaggctccgggcgggccgtgctgagaccgcagcatttaacccggcccgaggcagctgggaacagtgctgcccagggaactacaaattcaaaggcccggggaagggccgcgctgagcagctgcaggcacaggcccaggccaggccaggcaggaccggcccctgcagtctcggaggccgggggaagattccgcctcttattctcgctcccatccggggggcgccatcttgcttcctttatggcggcgaacgaggcccagagaggccaccgtcccgcgcggggcagcacagcggcgggagagctcggagcgcagagggccgcatccccagttcccagtctccatccccggcagaagcaggcggagcgacccggtccccgcccccgcgcccgccccgccccgcgcgcccgcctggcccctcggccccgcccctgctccggagtgacgcgggcccgggcgcgacggtctcggcggcggcggcggcggcgacagagcgagcgcggcgcggggccaccatgggggcccagctcagcacggtaggcggggagggggcgccggggccgcggggcgtcgcgagggactgggacccggcggcgagggggcgggctggcctgcgggaggtgacgcgggacccgggccgcacccggccgcacccacttcgcccgcccagcccgccgcgccccaccccaccccacaagggcctgggcgagctacgtggtgaccgctacttacgccctggcagtctgcagcggggacccagccctcctgcccggggggcgcgccagagcccagcacccgggggcacctgggccctgccctggccgccgtggggccttggctgctggagggacccgtggttgtgagcgtgtgtgccgctgagtgtgagtgtgtgagcgagcgtgtgaatggcttgagagtgaatgtgtgtgtgagtgtgaccgtgggtgtgaagggcgggcatggaaacgtgtgatggggtgtgtgtgtgtgtacgggagtatgtgaatgggcgatgtcactgactgcgactgaacgtgtgtgtgtgtgcgatgtcactatgtcagagggttttgcacgtttagcaacaaggaacagaacccggatgacacgggggcatcctcccaatgctcagtgggccaggctcccatcaaggccaggctcccactgaccctgcaagctgtgctggggacctcacactttgcggtgtcagtgctgtttgccccatttcacagatggggaaatgcaaactagtcttggccaccgtcccacaacgctgccgccggaaggagcctgctccatggggtttcaaagtccactctgctgctgtcactcctgggctggcctagagccaccttcccttccccccaggccacctcctctccccagtttctcaaaagttgaccatggtgaggctggaggcttgagtctgtgtggacatgtggaggctgcggctgcagagggcagctctcctgtcaactgtgacccgctaggcgtggggaggct

SEQ ID NO: 9332 - DNA, 6000 bp, Homo sapiens
ttgacatcctgcctttcttctctagggcccaggaaatgcctgttgaaataaattgctggaaagccaccacaccacgaaccgtgcaaattgtcagactgttctttcccatgtggatatgaaatctgctttggagcatgggcccagtggggctgcagggagcccaccaccttccaggaccactactgtcttagccaggactaagagttatggactgagacctattaactgagggcccttaggcaaggctgtgcctggctccttaagccccagggtcctcctgggtaaggggtgcccctggaaagggcttagcaagtggtaggagttcaccccaacagtaactatgccagtgctttatccttcccttattgcaggtagaccaaagtggccacaggctttctattcaacattcacaaccagatgaccagctccagtttactgatgggagagaaacccattggttcaaagagtttaagaatttcagcctagctgggcgcggtggctcacgcctgtaatcccagcactttgagaggccgaggcgggcggatcacaaggtcaggagttcgagatcagtctggccaacacagcgaaaccccgtctctactaaaaatacaaaaaaaaaaaaaaaattagccggacgtggtggccggtgcctgtagtcccagctacttgggaggctgaggcaggaaaatgacgtgaacccgggaggcagagcttgcagtgagctgagatcgcgccactgcactgcacttcagcctgggcgacaaagtgagacgccgtctcaaaaaaaaaagaaattcagcctagaagctgggcgaggtggctcacacctgtaatcccagcactttgggaggccaaagcgggaggatcattagaggtcaggtgatcaagaccagcctgaccaacgtggtgaaaccctgtctctactaaaaatataaaaaaattagccaggtgtggtggcgggcacctgtaatcccagctactcgtgaggctgaggcaggagaatcacttgaactcaggaggcagaggttgcagtgagccgagattgcgccattgcactccagcctgggtgacaagagcaaaactccatctcaaaaaaaaaaaaaaagagccaggcattgtggtgcacacctgtggtcccagctacccaggaggctgaggcaggaggatcacttgtgcctgggaggtcaaggctgcagtgagttggaatcacatcactgcactccatcctgggcaacagagtgagaccctgtctctaaataataataataataataataaatcccagcctgagtaagagtgtctcaaaaaaagaaagaaaaaaaaatctgcccacacccaccctgctaagagaggcagattcaaccccaggcagatcactctcttctttcacaagcatcccagccctctccatctccaaccagaaagccagccacgagccatgccttcccttcctctcagagcctgtgtgctcaaccttaggaggaaagggacctgccagggtgctaggagggagggaagaggggagcactgggctcagaggcggagggggtgctccgggggtcaggagagcccagggcaacatgggccaggctgtgcttccagggcagagtttcacagatgagtgaactgaggccagggcaggtcagacacataggctcttttgtcccctgcttcctccttcacgccctggcctctgaagctctccctgcagtcgggacaggtcaggctagaaaataatttggcctcaaaggctgctggggctttgggggtcaggcaaatttgaattccaacctctgcttgttttttcctttcttacctttattttgagataggatcattttatgttgcccaggctggtcttgaactcctgggttcaaatgatcctactgcctcagcctctgtgagcttaggttaatttccatcttgggctcagtatttttcttttttctgggacggggtctcgctctcacctaggctggagtgcagtggcatgatctcggctcactgcaatctctgcctcccaggttcgagcaattctgcctcagcctcctgagtagcagggatgacaggcaggcaccaccacatctggctaatttttgtatttttagtagagatgggattttgccatgttggccaggctggtcttgaacacccgagcttaggtgatccgcatgcctcggccacccaagtgctgggattacaggcttaaaccactgcacccagccaacagcctccgtttttttttgtttgtttgtttttgagatgaagtctcgctctgtcgccatactggagtgcagtggcatgatctcagctcactgcaacctctgcctcccaggttcgagtgattctcctgcctcagcctcccgaggagctgggactacaggggcacgccgccacgcccagctaatttttgtatttttagtagagacggggtttcaccatgttggccaggatggtctcgatctcctgacctcatgatccgcccgccttggcctgccaaagtgctgggattacaggcgtgagccattgcgcctggcccagcctccgtttttttcatctgtaaaatggggataacagggtgacctcagagggttgtgagattaacaagctgcaaggagaccgtttccccagacatagccaggaagagcttgtgggtctgggcacagctccagcgatggctattctaagaaagccattcccttctcaattctctttaatccctttgcttaagtccaggggcaagtctttgctgggtgctggcctgccttgaatatctctctacacctttcgaatcttccttttttttctttttttgagacggagtctcactctgtcgcccaggctggagtgcagtggcgcgatctcggctcactgcaagctccgcctcccgggttcacgccattctcctgcctcagcctcctgagtagctgggactacaggtgcccgccaccacgcctggctgatttttttgtatttttagtagagacggggtttcaccttgttagccaggatggtctcgatctcctgcccttgtgatctgcccgcctcggtctcccaaagtgctgggatgaatcttccttttaacaaggagagggcaggaggaactcagctcttggaggggcaacaggacctacccgggctttataacattgttttagttttatttttactgttgccttctagtctctgagatactggtgttccatttagggtagcaatacaaagtttctctgaaaaatacatttgtgatcatggaaaagccaacataaagcaaaagcattaaaagtattacaagtgggccaggtgccgtggctcacatctgtaatcaccacactgtgggaggctgaggcgggtgaatcacttgaggtcaggagttcaagaccagcctggccaacatggtgaaaccctgtctctactaaaaatacaaaaattagccatggttgtgcatgcctgtagtcccagctactcaggaggctgaggcaggagaatcacttgaaaccaggagacagaggtttcagtgagccgagatggtgtcactgcactccagcctaggtaacagagtgagtctcttctcaaaaaaaaaaaaaaaaaaaaaaaaaaatgagtattaccagtggagaaagggtccgcattcattctttttttttttttttttttttttttttttgagacagagtctggctcttgtcacccaggctggagtgcagtggcatgatctaggctcactgcaacctccacctcctgggttcaagtgagcatgtccagctaatttttgtattttgtagagatggagtttcaccatgttggccaggctggtcttgaacttctgatctcaggtgacctgcttgctttggcctcccaaagtgctgggattacaggcgtgagtgcttgcctggcctcttgtttccgttttaagatgggagaagtaacagcctgtgatgggaatgacccagggagaatggagagagggcagggtttcgggatcagtgttggcgtgaagggtcgggatcttctggagggggtggtcgtggccaggagctggacgggttcagcccggtcccaagagggaagggactgggtgctacctcagcgggtgggtgggggagctggtgggaattttctactgattccttcattcgaagtgtatttattgggcacccattgagtgccaggctctttctcagggctaggatagaggttccattttctcagtggcttgggcactgggtcatcagctgagtgagaggatgggcgtcagcactcaagaagtcacccaatggtttcattttttgcagtctttgttgtcccagaggagtaagaactaaaagcaccaggactgtgacatgctggaaacatggcatgttccaaagagaataaaatacagttttatgatacacgaattgtgtgtgatacattccaatttctcacattgaacaaattaccaatagcaatatgtgtgaagatggggcgaggtgagagtgaggaggaggagtagagaaaggacggggcggcgttaaggatacagcaaataactggaattccgcaaacactggggtgatgcaggcaatgcccttagcacggtcccggcaggaggcggtgggatcaggccgacccgggtcccaggggtgacagcgtcccttctccactgcagaatatcgaggtactcaaccctctgaacctcagttttctcatcagttcaatggggaaaacgggatggtaacccgtaatactggcggcgcggaggccggggagcgctccctacctgttggccggcggactggggactgtccgcacccgccccggggagcagcgagggcgcgcgggcggggtcgcggggaccccgcaagggctctggggaccgggacccgcagggtaggtcgggacgggcggggcggggcggcctgaccccgccccgggccggaggggcggtgctgcctcccgccgggccccaggcactgccctccggccgccgcgccgcccgcccgccggggccccgctgtccgccgcccgccgccgctggagctagaggtacgaggggccgcgccgatgttgcgggggacgggggctccagggggatcctgcggctcgcagtggggaggaggcgcctcgggaaggcaggggcaggggcggaggggctgggccgccgccctagcccgggccacctgttctggaggcgacatttgtgcgcgcacgaaccccgcgcggcggtcccggccaccgcctccaccccaactgcgccccgaagtggagcgcggcggcgggacccggagccccggccctcgcgggcaggacgcgcctggctccggagccctcgagggcagccccacccggttgggtcccggggctggagagagggcgtcggggagaagccgggttcgaggcaggctctgcccggccaccgtgggtgagtcgcgctcctccgtccgggggaagcctgggcgtcgggcggtgctcgccccggagcggatgcgaccggggacggggatggagagcggccggcaggagggggctctgccgggctggcagcgtcggcgccggccttagggagggtgaggatttggacctgcccagaagcgggaagggccctccccgtgcgggaaacggcctgggtacgagctgggcacggggcgagccggttggagtcgcccggcctccgcgctcgcctcggatccgcaggcgcccctccctcctctccagctggggaaggttgaggactgagcgggagcggaactgggcttgggagaggatctgccggggcacctggtcccagcgcccatcccgtttcactgccagggcgagtccccttccctcagtttcatcacctgtcatccggagggacaagttcccacctggatagtctcggctgagcctctggccctgagtgggttaaagcgccatttcccctgcacccacctttccctcacgacaccctctctgcggcttcctcccctccgccaacgtcgagtgattgttccgcgaaggccccttggggtcacgtac

SEQ ID NO: 9333 - DNA, 6000 bp, Homo sapiens
ctccacctcccaccccctggctgaatcagatcacctgtctcctgggcatcttgctattttctcactatttttttataggcctcaaatataaaaaggcaaacaagacacacccagcaagctatttagcctggccttatcagtctcaaaatcacagtttatggcactcctgagcactcatggcctctggctgtgtcctcacagcctgcgctccaggtcccgtctccccagtgatctcactccacccgaccagggtgtgcaaaagccactcagctggaccccatgcggggtcacagatgtcaccaggatgggggcttcttggggtaactcttcccccaaactcccaaggctggacattgctgtgcctccagtacctggaatgagtcaagcctgcattgcatcagtgagaaatggacaccttatttgaagacaccagaagaggcaggtgcacaccctcccctgggtgctggtaagctggcttgctctcagggcattttcagcttggagtagaaaccccgaacatggccaacagggtgcaaggcagtgaagagggtgggcttcagagtctggcagtcctgggttcattcccagttctgcccctggcccactggataaccctggttcctccagcctctctgggactcagtttccttatctgtagtagggtagtatcaccttgagggtgaaatgtgctaatgctaagcagagtgacagacatcctgttggtgcctaacagagggaggtcagccgggcaggaacctgcagggtttaggccaaaactaagcccagcctttggaggcctccccctgggtgtgatgtccccctggccctccaggggtgtgaatagtcctgatccctggctgcctttggaactatcccaggctagcctcacctccctagccttttagcttggttccactgcccgctgagggccatcctccacttcagcccaggctctaagtctgtcttctctagatgggcaggttgaggatgggcagggcagcaccgtcttcctgtaagagaagctgaggcaggacagtcctgcacgtcctggagggtggaacatactggcccgccctagtgcccagggagcagggcccacagaggctgaagcctggagcttgtgtcatctacagttcccacatttcagactctcccacggcagggagaccccaaagcctgggacaggggagcctggagtgcccctgcaacccatctaattacctttctgtacaaccggagcaggccaggttagttttgtgggtcttagttttcacgtctgtaaaaaggggtaaataatacccatttccaggggcgattgtctggatcatgtggcgaatgtagggatgtgtgttttgtaatgatcagcttactctccaaatatctgggcctcttggggcccaagacatttcttccagacccttgaggagaagcctcggattctcctttttaaggcagtcagccttaaagaggagcatgggaggcttctccttgaaggtggagggcagaggatggcattcctggcagcccatgtacagctggtgccaggatcctcccacccaacccagcattctagtttctgatgtcagatggtggtgctgacttcacgagacagggagtctcgggagataagctggaaggactggcacagcaaacaaggccaggggcccaggaagagaagggaagaatagatcagaggccatggcggggaccatgttagacggggctgctggtgccaggctcctgctggtggccagggctccgtggacaggaggggccggggcccgtggtatggatgacccagtgggtgggacactcgtgggtatggggttggaccagcttagacagaacctcaggagccaggtggcccatgggtgggacaacctggccgcccaggggaacgggtgctggccgccgctgggcaggatgtctggcttagcaggctccagggccatcaggccaccaggcagcaacccaagcctgcagactggacacaagacagggtcaggtggcaggtcagggcctgactaattaggaccagaactccaggctgctggggctgagcccatgctctctggcctacctggcagctcagggccctgtgcagagctgaccagccatgtacacagcaggctagcaacaggttggggcatcagttgttctgaagtgccacaaggagaagtgaggccctgtggcagccgggggtggaagtgccatgcagtgagctatcaggggactctgtggcagaagaaacaagatgtggtttgaaggagaaggtgagtgggggcctcccaggcagacgtgtgggaagggcattttgggcagggtctaaggtgggaaaggtgcctgccagggaagaggtgggtgaggtaccgggaggtcctcaggcagccagggctggcctcgtctacattttcaaagctcctgtgtccttcgcagccagctcctgaagggccccctgggtctgacacacagcagggacctgacggctgctctggggtggagctgctctttcctcccatccctccagtgctgtgcccagagtcatggccctggccccacacagggcctgacccccacccaacccctctcccatgcaactcaactgcaggatgtgcatcttctggaaacctgggcttcgtgacatcaccctgtctccctgagcatgagcatggggccctgcagtggccaggcccctccccagcccatcctaggactacaggtcccctgggtctgctcaggctgccataacaaaatatcacggactggatggcttcaacaacagcaatctgtcgtctcccatgaacagttggcagaggctggaagtctgaggtcaaggttcaagcccacagggttggcctcctggaggtcactctcttttgttgccccttcccatggccacccctgtgtacacacgcctcgggggtctgtgtgtgttcacgtttcctcttcttttttttttgagatggagtttcgctctcgtcacccaggctggagtgcaatggcgcaatctcagctcacctgggttcaagcaattctcctgcctcagcttccggagtagctgggattcaggagcgcaccactgcacccagctaatttttgtatttttagtagagacagggtttcaccatgttgaccaggatggtctccaatgcctgacttcaggtgatccacccgcttcagcctcccaaagtgctgggattacaggtgtgagccacagagcccggtcaacatttcctcttcttgtaaggacgcgctggatgagggcccaccctaacagcctcattgaatctcctgtgtgttttgtaactgatgttgctgtctcccccaacggagctccttcggggcctaagcacttctgagtcgtctctgggcccccacctctggctgcaggattttaagccaaggcgtgcagccgggggacagcaacgtgaatacgccgggaggggcacggggagcctaagcacagggaggcccagggaaggggtccccagtagggacgctggtgctctcgggcccctgcccatgccacccttgcctgccaaccctcttcgcatgcagcggcaccctcctgccactggcatgagcttttctttccaagtaagtttcagatccacatttcccaggcctcagagcggcagctgagggagggaggaggctgggcaggcctcgctgctgcacaccccactgtgtgccacgatcaggtactgcctgctaggactctgactgggcccacggtggctgcaggactgtcctggggccttcactgcatggcctgaacaggggctgggctcccagggaggaatgattcatggctggttcccgccctatagacaagacagtcacaaggagctggcagggtaagacctgtatatgctgccacctggtgccaggcacagcagcaaggccacgtggacctagcccacctcacctctgcctgcagcagcagggctgggtaggggagccgaggggaggggcaggcctcagacctcagtgtcacatccaggcagtgtcagtgtgagcctaggctctgccacactggagccctgtgctcttgggcaagtgacttaacctctgtgagcacagtcttcactgataaatcagggagggatgtgccctccgaaccaggttgtggctgcttcctatggggctgtgttaagcactgcggacgcagagactggagcttgcatgaaggcgcacggcgtgctctgaaggcagggctggagtccctgcaggctggtgattccttcagctgtggggtcaaggaggccttcctggggaggcggtgaattggggccacaggggccgtgtctctccaagtctggggcccaggctccggttcctagggccagctcgggggcggctgctcagctgtctgctctgtggcttcaggccccagagcagttcaaagggccagcgcccccgccccctaaaaagacctccgcctcctgaaagccttacctgcctgtcggggcccagctgcaggccccctcccaggccgacaggacgccaggatcgtagagggcacccgccgcccaaggtcacgtcgcccgtggcgcccccatccaggcccgccccccgccgcgcccgatcgccaggactgcgtttccacgccgcccggaccccgcctgaaccgaggcccgcgcggaaggcgccactgagtcccggccggccgcgggagcgccagattcagcacccggcacccgccggagaagagaggagagaaaggcagccgcctcccggccccagcgccctggcctcggccagccccatcccggccccttcctcctccctcttctccccttctcgggtccccccgtctctccctggctcccggcccctcctctacccacgcctcctcctcgcccccgccccgcccgtcccctccgcggtccccgccgcccgcgtacggggtgacgcagcgccgcctcccgccgcccgccgcccgccgcccgggccactgcaggggccgctaacggtccggcgcccctcggcgtccgcgcgcccccagcctggcggacgagcccggcggcggagatgggggcgacgggggcggcggagccgctgcaatccgtgctgtgggtgaagcagcagcgctgcgccgtgagcctggagcccgcgcgggctctgctgcgctggtggcggagcccggggcccggagccggcgcccccggcgcgggtgagtgtcgccgccgcccgggttcggccggacctggccagggagcgggggcggcttgggggacccggctggggggaccgggtgcagggagcgagcggctgtggtaaggccgggggccctgggagcgcaggcgccagggaggggtcggggcaggcgggagggaggccggggccaggggccgggctgtgcgccgccgtctgctccgggaacccgaggacaaagcgccgcgcagtggaggggaggccggcgccccatccccgcggggaggtgggacccggggcgcggggtcgtggcccccggtgcggtctgtccgcagggcacctctggacaagacggactgtggatggatcccgagggggggtgccaggcgctccccaccgcgcgcattgcagtttactccaagaacagatgcttttctttagcagggatccgaaacctgagaggcgcccttgcagggtgaggacttcctgttaagaagttaaagaaggggcccctgactttctgtggggtgtgctccctgctcgggatgggggaattggtttccgtgccacgggttggctacttgccccgcagaggccctccggatgaggagaagagtgactttggtaaacatggaggacgcatagcccaccctggagagagccctgcaggaggacagagggtttgtttttgttttttgttgttttttgtttgttttttgtttttttttttttttgagtcggagtgttgctctgttgcccaggctggagttcaatgccacgatcttggctcactgcacctccgcctcctgggttcaagcaattctccctgcctcagcctcggag

SEQ ID NO: 9334 - DNA, 6000 bp, Homo sapiens
gttcttacagaactgcgcagcgctgcagggaggcggctcggccgcacactcgtccacatctggaacagagcggcacagctgtgagcggcccaggacagcccggccagggagcggggaaggaccgatcatggcctgacacagcccgtggccagggccggctggggaagggcagggaggagggcagcccctgaggaggaatcatctcaaatgccatcctcggaggccccacgcggcaggggaggggatgaggcgatggccaggccctgtccttagacactcagtgccaaccggggcaggcgccccatgaggatggcgacacattgtgtgagagtgagacagtgagtgcccccacacctcacgcccccacctcacgcccccacacctcacgccccacctcatgctcccccacacctcacgccccccacaccccaagccccacacctcacgcccccacctcacgcccccacacttcacgcccccctgcctcccgcccccatgcctcacaccccccacgccttacgcccccatctcacaccccccacgcctcacgcaggcgccctcctccacccccgggccgctcctcacccacacaggcgccctcgtccagcacccagcccacttcacactcgccgcagtctctgttggtcaggcccgagcacgtcttgcaggactcgtcacaggctggaaggcaaaggcgggcctgggtacaaaccccactctcaggtaccagcttggggacaaggctcgtttaaaagtgaggaatttaagagggaaaagcaacacgggattttcagtgcccatgaatttaaaattctcagcaaaccaggactccaaggaatttttaataacctggagagaaggcagctatccatactctggagctgtagcctggctgggtgtgcgtgttccggccacggatccatgcgtggcccacgccacgccaacatccaagagacagacagcaaggcgggtaagaatcggagaggccggtcctgactgctgaggggcgtaagaatcggagaggccggtcctgactatcgatccacgggtctgtctgcccagaatagcctaggggctgccggccaaccacacactcacgtccgagacactcagagttttcctacatatcagtgacaaccagggagaaaacgtcctttggaaagatgccactcataacggcctgcagggatttgacagatgctgctctctgggccggtgcggggcccacacggcacctccaggacctgtgcactgcatggcccatcacaactcaaggtcggggtggaccttgaactagagagaaaggtgagtagcttctcccttctgagggctgttacgggacaggaagtgcccgacaacctctgcctctatcctctgatgttttcattcatccttctgggccctcgaagcttccttggacatctggggttaaagatcaacaggcccctgttcccatctaggcaggcagctccagcaaggggctcttgtcatcccgcctcaaccccggggccagcccaggcgtagcccgtacctgtgcagatgctgtgggtctcgttccggagcgagctgaagtagccgtccatgcagtcagtgcacagcgggccctggtaccccatgtggcaccggcaggacccgtcgccctgtctgctcccatctccgctgcagtggccattcccgctgcagggcctctgggatccgccctggcatgctttaggggacacaaaaccatgctcagagcacacctggtggtgaccggtgcggtgttctcacacggagagaacgcatggcacccaaaccctgtacgattctgaggacgtacatgagcctgaaggcttggagtgggtgtttggggaaactgatttcctgggtctgcagggctggcggtggatcgcctgagtggagcaagccacaggctcctgggcttcactatggccacgtgctgcatgatgacgtttaggtcaacaagggaccctgcatagcacagctgtcccctaagatgatactaaagctgagcggctcttattgcctagtgacatcacaatgtgcctcattacctgttctatgtttagatgtgttcaggtgacacattcttaccacgtgccaaatggcccacagtactcaggaccctcacgagccgtgcaggtgtgcggcctgggagcagcagggcctgccaggcagcctaggtgcagagcggctgcaccatctaggcgtgtggcgtgtggcgtgtggagtgcacgctgtgatgtttgcaccatgacaaagtcgcctaatgacgcatttctcagaacacgcctggtcgttacacatgactgcactttgtgtggctttgggcagcctcagctgaaacatggtgatagggacactgacgcgtcaggcgcggggactgcagggagagtgggaacattagctgcggcctccagtgcatgccagggacagcagcaggggctggcagaaggctgatggtgggcgggtggggggtctgaacctgaaacttctgctacctgatctcgcttgaccacgagattggcttttataaacagtaaaccgtgacttcagtttcaatgcacacttcttcacagaagagccctgtcccttggcacccattggggctcaaggccatgtgcccagcctgatagacacccagtgccctgcgctctctgcaatagcagccacagaagttgtggtgtggtcacctctgtgcacacagggagaagcacctggacaggtcagtcaggacagactctcaggtgagtggactcagctgtgaacaacctgagtctgtgaacccctgaattaacagcacagctgggaagacatactcagagttttacgctaaagcatgaggttagtggtgaggctgcagccagacggtgcgaagtgctccaagctgtgttggggatgggggaggcagccatccggcagggtcccagaccctacagaaagctgatgcaccccaggtcccctctgtgcttttacctcccaagaatcatgagaagaagaggggaagtgacgtaggagatgggatttccctgaggagaaacgcaccgagacagtcgggaccgtaggttcctggagagcagcacactttcagtgtcttcacacaaaaccactcgaataagtcaggatattcgctcttcctgaggatggaggaaaacattcactgaatcccagcagacacggttctttaaaacaaacatgcagctgaacgtaacatatgctctggagtattgtaaggtccaggaaacaagagtctaggtgtggacagaatcttctccttaatttcctggttttgatcgctgactctggtgataaaaaacggtaatgcaggggtaaggtgggtgcgaggcaggtgggagctccctactgttcctgtacctttctaagtctgaggttatttcaaattctaagttggaaaataaaaagtatcttctaagaggttttaaggcactcacagctgcagccaccaggcctccaggtgctcctcctgcgcctctagcatctgattgcattcgaagtcgctgctctcgcacagcccctccaggatctccagcaggcgaatctcgctgaaacacaggcccacaccggcccaccgtcagcgcctccaaggcagtgaagaaaaatccgaaccaatacgccaacctgggtgcaggggccggggagccaggactccgggcacagagaataaggggaccccactgtcaggggaagccaggagcggttcccacaagtggggctggtgttccagtttacattttgaaaagccactgtctgttgagggggtagggaccagagcagaagctggaaggccagagaggggccagccattagtcctcagggagaagccgaggtgactcggacgggtgactggtgcctcgggggctgttctgtctccctgtcattaacacaggcaccaaaggcaggacacgacttcccaggacagcgccaggccaagacccacaggggtgctccagggcacccacctggactcgtacttggacagcgtcttttcctcccaagccgtgttcccgccgccaaagttcttctttgcggtgtccaccatcccctgcgaggagacagtgcccatagtgcttggtaccacctgacccgggtccagggtgggggcgagcccaggtcgagggtgaggggactccaggcccacggtggcgtcgaccctggttccacggtgggggtggatccgggtcaagggtgagggggactccaggaccacggtggagggactctggatcgacggtgagggggatcccgaatccagggtgagggggaccccggatccagggtgagggcgaccctgggcccaaggtggggcgaccccggatgcagggtgagggggaccccgggcccaaggttgacgaccccgcccggccccttcccacctggttaaacttgtccaccagcccccggcaccggtggcagggcgtcggcttcttggcggcctccggcgcgggcggcagcagcagcagaagcggcaggagccccagcgcggcccggcgcggcaggcgcatggcgggtagcgctgcgggaagacgcagccggagctccaggtcctgcggccgtgctgctccggcctcccggccgcccacccgctcccagccgcgccggcctgtcccccaggctacttgacggcgccggcgaggccccgccccacccgccagccccgcgccgctattggttgatgggacccgccccggcctgatatggcccaatccgagttcgccacgagaggtgaccaatgggaaggccccggatcagcggccgccaggagtccgggggcggggcgtgcaggtccgaccccgcctcccgctccccgcccctcgcgcgcagcccgcggcggccatctttactcagggcacagagggtctctgcggccgtagcggccggggctgcggtagccactttagatttgggcaaggactttagattcgggctctgttctgtttccgccgtcctgcttcctgccgaggctggcccaggcagccgcgcttcgaaggacgccgccgggagctgcggaggtcagtgcgcgctgccgcgaccggggccttcaggcgggcgcgcggcgagaccagggaggaggcgggcgagggcgcgacccgagctggcgctggcgctggattcctgaggcctcaccgcgcatgtccacgcgtcacagccccgtgctccttacctggggctgcacccctcacttggggccgggctcctcacctggggctggacctgtcacctgggggccagacctctcacccgggggccggacctctcatccgggggcccgacctctcacctggggctggacctctcacctggggccgggctcctcacctggggccggacctcccacctgggggatgggtttttcacctgggggctggggatctggggtccacttagggtctctgggggctggggatctgcatttctacaggcgcttgaggtgatgaacactcgctcatgttcaggaacccctggtttaaattaggggaaataaaacgtgcagcgtctggatttcagagaactcctgcctgtggaaggaaggagtgcagataacactgcacatttaaaaaaaaaaaaagtaacatctgatttgaccagtttcttttctgtttttttgagacggagtctcactttgtcgcccaggctggagtgcagtggcgcgatctcagctcactgcaagctccgccttccaggttcctgtgattctgctgcctcagcctcctaagttgggattacaggcacccaccaccaggtccggctaatttttgtatttttagtagagacggggtttcaccatgttggccaggctggtctcgaagtcctgacctcaagcgatctgcctgcctcagcctcccaaagtgctagggttacaggcgtgagccaccatgcttagcctgatttgatcaatttcggtagaggccttaaaatctggattgatggggacaagagggtctttgcaggtcattccctaatctgagatgccattgttct

SEQ ID NO: 9335 - DNA, 6000 bp, Homo sapiens
tgctgagactggcctctctgttgggtgagctgaggatctctgcgtccgttcgtgcttccccttctgtctccccaacccctgcgctcaccccgtaaccctcctgctgacacaccatgggagcacagtcaacatttgctgggtgaataagtcgaggagtgccgagcacacaccccacaggccgatctgggagggcagggatgccttgcaggtattatttacttattttgaccagttgagggggcagggagtgtcacatttatatgttttttttttttttgagatggagtcccactgtgtcacccaggctggagtgccgtggcgaaatctcagctcactgcaaactccgcctcccaggtttaagcgattctcctgcctcagcctcctgagtagctggaattataagtgcccaccaccacgcccagataatttttgtatttgagagagggtttcaccatgttggccaggatggtctcgaattcctgaccttaggtgatccacccaccttggcctcccaaagtgctgtgattacaggtgtgagccactgcacccagtgttttgttgttgttgttgtttgtttgcttttttgagatggagtctcactctgtcgcccaggctggagtgcagtggcacaatcttggctcactgcgacctccgcctcccaggttcaagtaattctcctgcctcagcctcccaagtagctggggttacaggcgcctgccaccacacctggctaatttttgtatttttagtagagacggggtttcaccatgctggccaggctgatcttgaagtctggacctcaagcaatccgcccacctctgcctcccaaactgctgggattacaggtgtgagccaccaagcccggccaagtgtcacatttatgttgaaaggtggaggggcagccaagaaggcaggtgctggggaggcaggcagaaagggcttgaggggacagagtggatgggtgggagaaatttagcggggcaggacgggaaatgaggggctcagttcccggcgaagcccttctgtttgctgatgtggcagctgctgagggggtgggaagaggtcggggcctggacatgctgaggccgagctgcctgggggttgtccagggagaggggtctggtcgctccccagcctggcaggcatgggactaaagataaggcaggtcgagaacagttttggggtttcagggatggcgcagccatggaggatatggtgagcctcatccacagagaatgcggagaggctggccaaggatggagcccagcgccagctctggaggggcaggtagggaagggcctgagcaggggatcccccaggttcccaaatctgctgctgcggcttctgctgctgcctccccactcggccctcagccttccacactgccaccagctctgtcctttcaaaacacaagtgcaatcaaatcgttcgccccaccaataaagaaaaaccagcaaaaattccctgtcctcaagaggctttttttttttttttttttttttttttgagacggagtctcgctctgtcacccaggctggagtgcagtggtgtgatcttgactcactgcaagctccgcctcctgggttcacgccattctcctgcctcagcctcccaagtagctgggactacaagcgccctccaccatgcccggctaatttttctgtatttttagtagagtttcaccgtgttagccaggatggtctcgatctcctgacctcatgatccgcccgccttggcttcccagagtgctgggattacaggcgtgagccaccgtgcccagccctcacaaggtttttaatctgggacaggtggaggacagccccagcgaggggctgcgtttcaggccctgagatgacaggacagttgctgcccctgtgagccacagtcctgcctcccgccagcttgtggggagggtgtatcctctgccctcaggcatcagcctggctgctgcttctgcacctgcccagcccaccagagaggaggccccgtctgtgattcccagggtccctggtgcttgttgcatgtgagtccattcttagttggagaagctgcttctggggagcgacggggctgccccagcaccgcttatgatggacacaggtgaaggggagacacaagtttccaaatgtgcgagggctgggccataggagggggcggtggccttggggaatgcttgtgagaagcaaaagaagctagggtggcaactggctggacaaacagcatcttggggttttttcctttttttttttgagatggggttgcgctctatctcccaggctggagtgcagtggcgtgatctcggctcactgcaacctccgcctcccgggttcaagcaactctcctgcctcagcttcccgagtagctgggattacaggcacgcgtcaccatgcctggctaattttttgtatatttagtagagacggggtttcaccatgttgtgcaggttggtctcaaactcctgacgccaagtgatccacccgcctgggcctcccagagtgctgggatttacaggcatgagccaccacgcccggcctttggggggttttgtttgagtgttttatgatggcagaggtaagtttgactctgatagcaaggaatccatagacagggaaggatggagtttggcggcgggcactgacagtgaatgatggcctgagatgaggagtgggcaggggggcagagccctgtggtaatggagggaggggtggtgtgagaggtgtaagatgggggcttggtgctcccatctgatagcttctatttgctctctgaggagcagccaattatctcagagacactggaagtggggtgagaggttcgaggagagtgcagactgcaagacagctgaccagaaatcagcaggctgggcggtagggaggggcatccatccatctgagacactgagccactgtggatggttgttcccaagggcctggtggaagcatgacagtggagagagtgcgacgcagggtccccagagtctcagagagagtggagagtgcggtgcagggtccctagagtctctccgaagagagccagccctgggctcaagcactagcccagacttgccccgggcccctgccagcctgcacacaagctcagtggtgtggtagtgtggtgctgaggacctttttgggtacaagtgacagaaaccaacttgagccagctggggcaaaaaggaggatttctggcagggcacagtttctcacacctgtaatcccaacactttttgaggcagatgcaggaggatcatttgaggacaggagttcaagacaagcctaggtaacttatcaagaccctgtctctacaaaaaaattaaattttaaaaagatgatttctcaacctgtgaaaaccaacagtgggagaggagaggcgtagcgtggcctgtgcctgagggcagggaggggaccctggtggggcctctcagtttgattccattcattctcttgggctggctcctgcccatggatggagactggatgccagtcatttggccagttcttgcagcagccaaactcatttaaaaacagaccttcagggccaggcgcggtggctcacacctgtaatgccagcactttgggaggccgagatgggcggatcacgaggtcaggagatcgagaccatcctggctaacacagtgaaaccctgtcgctactaaaaatacaaaaaattagctgggcgtggtggcaggtgcttgtagtcccagctactcgggaggctgaggcaggagaatgatgtgaacctgggaggcggagtttgcagtgagccaagatcacgccactgtactccagcctgggcgacagagcgagactctgtctcaaaacaaacaaacaaaaacaaacaaaaaacaaaaaacagaccttcgggctgggggcggtggctcatgcctgtaatcccagcactttgggacgccatggtgggtggatggcctgaggtcaggagttcaagaccagcctggccaacatggtgaaaccccctctctactaaaatacaaaaattagccgggcatggtggtgcacacctgtaatcccagctacgcgggaagctgaggcgggagaattgcttgaacccaggagacggacgttccagtgagccaagatggtgtcactgcacttcagcctgggtgacggattgagactctgcctcaaaaacaaaacaaaacataacaaaaaacagaccttggcctgctgtgctcagaggggtttccctgctgcaccaggctggctcctgcaccttctctcccagcatgttctgctctgggctcatgctcatccctgagccacttcaggggtggccctggccagccctgcccttgagaggggtgggcactgtcagggatcctgggggatgcagctttcccagagccccctgctccgtggcctcatgtgcctcacacgcttagaacatttgctctttacagggggacatgagcgtgccgtttttaagctgtgttaaatgtctcacttggcctagatgggggctcttcagcctgggaccccaagggcagggcctgaattctctctctgttccccatcgccaggctggcagcccctgaggtgatggccctgcgcctcctctgacttctagtttggggggcccggtaggcagcgcctaggcttctcccgcctttctcccgctggacagagaggggcgggggacgaggagtctggggacccgatccccagattgggacggcccaggggtggggttcgggctcctgtgcggggagtcccaacggcgagggcagctgtggtcctggcccatgcctcccgccgacaccacagccgacccgggtcagggcgtcagacccgccggagccgtagtccaggtgcccggcccgaggggcggtgctcgggccccagagtggtcagcgatgggcggggcgctgctctcgggagccgccctcccaccctctggaccaatggagatgcgcggttgcaggccccgcccgctcagggcttgacgacagcgcgcaggcgcacggcgcgcccgggcgggccggctggctgggaagatggcggcgggaacctgggccgccgccgccgccgccgccgccgccgcggagcgaaccaggggtgtccggggtgcgcggtccagggccggggccgggccatgagcgcgccgtcctcgagtccccgagccgcggagcccgcccgcgcccctcgggccgccccgcgtccctcgccatggcgcggctcgcggactacttcgtgctggtggcgttcgggccgcacccgcgcggtgagtgccgaggccaagcgctgagggccgggggccgagggtcgagtgctgagggccaggggctgggtctgagggtcgagggccgggggctgggggccgagggctgggggctgggtcgggaggccgaggactgagggccgggcgctgagggccgaggaccgggggctgggcgctgagggccggggtcgggggagccgaggactgagggccggggccgggggccgggcggggactgaaggccagggccgaccggacagcccgtggggagaatgggcgtccgctgggggcggcgtggccgcgcgggcctggtggcggcagggagagaaggctgggcccggcctgcccggcctccttggggtgggacgggctctctccttggccagctgcgggcggctgtggctctagtggctccaggggcgcggacccgcggctcgccagcccgcctctgaccttggtgctccgtctgaagcccccggcggtcttggcggggtgcaaagagggggtggagttcgggtttggtgcatggagaagcggtgtttgatttgaaactgggaggatttgaggaggaagcgtcgagagtagagagaagagcattcctggcgactcgcctgacggtccaggccctgcacgccaagccctgggtggggtatcagcgtggcggtcggtgcccatgcccaggaggtctgtgtgtggggtcagcgcccgtgtctgagagctcttcagcccaggaggtaggagaaaacggagcctgacgatgacatc

SEQ ID NO: 9336 - DNA, 6000 bp, Homo sapiens
tgacgctgcccagaccttcaccctgaggcatctgagcccttaggggctatggctgctgaaaagaccttttcattgtcattacttggcatggaagcaccaagacagacctagatgaatcctctaagtgccagatcaatgcctgcttgccccgttacgcagcagccacgctacctcctcaccgtttatcaggatcaagtatcccctcctttgtggcctgctggtccaccagtatgaggagctgagagtaacctggtggtctttgcagattcaggctcagcagaggtatccttcctgcaaccagcaggagtgccctcgtggaagcgttcctacctgggaaacaggctctaatccagcagatcctaaggctgtggagacagaatgtacaaattctacgtgtaagcactgggaatgatggtgagaagtagctaatcccaacccttgggttcctggacctgtgtctttctgcttggatccacatgaagtatctactgggggcagagcaccatatattagactctgattcagtgtatatatcccaactcctcaggatactgtcctagaaccaggacctcagctaagcccttaagaagtcatcccatctttccagtagcctagctgcttttacgtaacgcaggatattagagaagcagtggatcccatggtcatccacacactaccatacctctttcgctataaaatggctttcttggcctgaggcgatgtgattcgtgatcccatgttggtacacggagcatgcctgaagctcctggatagtgatgctggcctgggaccctgtggatacagaagacaaacccttatccagagcaggtgtcaactccagcaaggatgaagggctgtcaccaacttgccactaagtaactagttggggtgctctagggatggtatctcagcaggggctcagcactgatcgctttcagcaggagtaatcatgagacaagccttgagaaagaaggcctgtgctggtggacgctaacctgtgctccttctgcatgacgccgccactcacagtccactgttcaagcacaggggtagccaggggcacagctgactgacatcccatccatcctgctgttcaccaactcctctgcagtattaacacaaggcagagagatgcacatattgtgtggccactcctgtaggtccatcttcccctcttgctcttttcaggtccctgaccagccagcaggacgtcacaacccagaagtccatatgcgtccctccctcaggccactactctgtccactgcctccatacaaagtggatatccacacgaactgctggaagctcagccccatggaggatttcctattgtcgtcctttagggtcaccttgaatgggactgtagtgtacctatggttcattttcagttcatatcaacacatcaaactgacctatatacgaaccagaccagaatgcttatctgctaagggagaaatatcagtgcaaagcagatgtggggccacactgccacctcttcctgtaaataactgttacccactagacacgcttgggtccaagcccaaggcttcctttttcattgtaccatcaattgctactgagcctctgacctactgacttggaggatctgacaacacctcgcttgggcagaccctgtcgcatggtcgctgatgtcccaccagcaggtgctcggtctctacctgggtctggtagtgtgcctgatactgctctcacttggcgagtagttctctgctgcagaaggcatggtcttgtccaagaactctaggacagtgtactgcaactcttccgttggagtttgccagagatgccatatagggtccttcctaccccaaataagccccccggtaacccattggatctatgcagcagggaagcccatctcccaatccaaatctttagcagagccctctttttctctgggccccactcaaagctggcagttttcccgttacccaataaaggggtcagagaggtatcctctagcgcggtgcatgctgactccaaaacacagaggtgcctcaatgctgtgcctctttcttccttgtaaggatgcaggatgcaataacttgtccctggcttgccctcaaacgctgcacccctgagaatgtcactgatatggcaggctccagaacttctgagggcttctcgctcatcctctgacatgcacggccttcttcaccatgtccaactagtatgacatcatcaatgttatatggaatatagatgataagctacctaaggactattgtgacagagaacaggagagttcagacagcaagaagcaagaccatttacagagctgtccttcccatataaatgtgaactgcttttaatcctctttaccactggcaattgaaaagaatgttcaccaagtcaataattgcattatcaagagccagaggtgcatttatcggttccagtaaagataccacacctagcacagctgtgtgatcggggacacgacttggctaagtttgtgcagggcatcatcatttacttgaatccaccaagatttagcaggagccattcaggttaattgaagggatgaaacggtaaccactgctttataagtctttgagggcgaaatacctctgcaattacacctggaatgcagcattgtttctgacttactatcttggaaaggtttcagtagggtgaggagtttcaaaggtttctactttgcgcttccttacatatggtaccaaaggcctgggatcaatgtatacgctccgccctctgctaggtaaaaacatcccaagtatgcattgagaccagagaagtaaccacaggactcgggttgggaattctgcttatcatctgatttccataagcctgcaccctaatgagagggccatgatgcttcagggctcctggaaacagtgtcagctcagatcctgtatcagcccttcaaagacctagacagtcccttttccgaagtaaactagtttttttggtgtgtttgttgttgctgttcagacagtcttgctgtgttgctcaggctggagtgcagtggcgtgaacacaggtcactgcagccttgacctcctgggcttaagtgattctctcacctcagcatccagagtagctggaaccacaggcacctgccaccacgcccagctaatcttttaatttttgtaaagacaggttcttgctatgttgcccaggctggtctcaaactcctgggctcaaacgatcctcctacttcggcttcccaaagtgcagggattaaaagcgtgacccactgcccccagccagaatcagttttcttttttttttttttttttttgagactgagtctgactctgtcgctcaggctggagtgcagtggctcgcggcaacaaggcctgggttcaagggattgtcacgcctcagcctcccgtgtagctgggattacaggcacaagccaccaaacccggctaatttttgtatttttagtagcgacggggtttcgctatgttggccagggtggtctcaaactcctgacctcaagtgatctgcccgcctcggcctcccaaaatgctgggagtacaggcgtgagccaccacgcccggaccagttactttttaaagtggctctaggtccctttagggaaggattggaggaatatttcttggtatatgctcagatgctggtattgtaagatccttcctgagaggaaccaagcctccttgtcaattaatgggctctaggtctcaaaactgactcagatttaaacagaatgatcatgattttccactgcagcaaaagtgacattagccttgtgatcaccaatttttgatttctttctggttatcaaacaatactctagtcagatgccccaaagaacaccatggttcgacagacattgccacagatctctgtgggtccagcgttcctggtcgccgctctagcctggggcagaagcagaaatgcaggaggcacgcgtttaaatcaggacgccctcaatgggaggtgcgcaggccgaggagggggctgcggcaagctgcgagtcttcactttcttcggctcttgggtttgactctgtaattggttctaggcctggaggagacgaggaggatagggggagaggggaatgaatgaagacgcgcatctcaagcggggcagcaaaagactcctcattcagaggtgcggctctaccggccagggagtccccgtgtagactgggcatttatgcaactggagtcatcggaactgtcccaagggtcacattccttcagcaaatgtttactgcgtacccaccgggtgcccgcatcccgcactctgcccgcgctgtgcggccctgcctagcgcgcgcgcctcctccaggcctcacccacgctcaggacggacgcgcgctggacggctcttccttgtcggagcgccccaggggtcggggaagagggcccggcaagggagccctcgcgccggagctgcagctgcagccgccgccccgccgccccgccggctcccacggggcagagacgcagctcctctccggtcttcccgtacgctaccgcgcccgggcagttcctcgcccgcgcacgcgccgctccgccaactgattggcctccggcgcctcggattggcccaggccgtccaacagcagccccgcccagagagagaccattggtccttgcccataggggcggggcccggcagagatctgcggaattcggccttcggaaagagcccccgggccggggcacggagagagccgagcgccgcagccgtgagccgaatagagccggagagacccgagtatgaccggagaagcccaggccggccggaagaggagccgagcgcggccggaaggaaccgagcccgtccgaagggagcggagcgcagcctggcctggggcccggtcgagcccgcgccatggcggccgaggcgacagctgtggccggaagcggggctgttggcggctgcctggccaaagacggcttgcagcagtctaagtgcccggacactaccccaaaacggcggcgcgcctcgtcgctgtcgcgtgacgccgagcgccgagcctaccaatggtgccgggagtacttgggcggggcctggcgccgagtgcagcccgaggagctgagggtttaccccgtgaggtgggaggtcaggggtcagcctctccggtgcgcggatcggggtcaggggtcagccgcggggccctcaggatgctccatgttttcgcccccctcttgcgcccgcgcctggggcggggcggggccggcctggccgggagggggccggggccgcggcaggtagggccggccgcgggctgagcgcgcctggtgtgggtctgcagcggaggcctcagcaacctgctcttccgctgctcgctcccggaccacctgcccagcgttggcgaggagccccgggaggtgcttctgcggctgtacggagccatcttgcaggtgaggggggtgtgagcgccgcagcaccagtggctttagggcctgtcgcttacgcgatgcgggtagtattgttcccgttgcgcagttgaggacaccgaggttcacggtctgagtaacacctcattacaccgaagcctgggcctgtattcccagagctttgggaggctgaggcgagaggatcacttgagcacaggagttcgagaccagcctggacaacatagtgagacccccatctctaaataaaaatagaccaacgctaaagcctgtgctccagagcctccaggcaattggatcagaagtcgcagctctggtgggaggaaggcgagccctcatgtgtgtccctgtgccactttgccttggcccctttgctgtccatcctttttcagggcgtggactccctggtgctagaaagcgtgatgttcgccatacttgcggagcggtcgctggggccccagctgtacggagtcttcccagagggccggctggaacagtacatcccagtacgggcccagtcctaccctctcctccccaaggcacctccaccccctaaccctaccccagtgcccaatgtctgcctccacatccctcaccccaagtagggaatttcccccaaa

SEQ ID NO: 9337 - DNA, 6000 bp, Homo sapiens
cctatcttcctcttcatataaagacaccagtcccattatggaggcccccaccttgatgatctcattcaaattacttcccaaaggcctcacctccaatcaacatatgaatttggggattaagtttgtaacatgtgaaatttgggggatacattcaaagaatagcaatggtgaaaaatgatttgcagtctcttctttcactgagattatatactagcagaggacacagaggaaaagtcaaataaacaacatcatttcagagaatggacacagaaagctcagtcaatcagagactagctcctaaccccatctttctcatggcaaaggatattctgtcccctctctcactgtcctggaatgaaatccgtggccatttcccttttctcatagccaaagacaccaccaagttctccaatccctgactctgattcctgacatcaatctattgctccttgtataatcagtcaatgaatcaaaaaaaatttttttggatatctactatctcctcaggatgaggctctgtcaggggaaaagtaagaacccagagaacaagcaataagcaaagcagcctaatgttgacatgcgcttggcaagtattcacagaccacctcacacccagccaagcactgcaggtgagagcaacacaggagtgaggaagccggggtacttaccatcagtgaggaccaatcttacagatagggaaaaactatatttcatccagttgaagacacccattttctacattttaaaattcctaaattaggctttatctttcaatgattttggatcattggatgaaatacagtaacaacagcacaaagcagcattgtgccctgagaggtgtgcagagcctatagcaattagaacagtggtccaaggtcaggctacacattagatgtatctgggaaactcaaaaatacttatgcccagaccccatcgcagaccaacagaatcagtgtggaagggtgtggctgtacactggtatttcaaaaagcacctcatgggattctaatacgtaggcagagttgagaaccaggatagcaatttcaaatgagagtacacattaccctgaggttacatgaagactttccaaggggcacgccttggaaagtttagggcacacatcagtaaactagggcctatggcccaaatctgttctactgcctgtttttgtaccctccggggagctaagttggtttttacagtttcaaatggtcaggggaaaaaatcaaaagggaaataatatgtttggacaaatgaaaattatatgaaatttaaatgtaagtgtccataaataaagttttattagaacacagacacactcctttgtttacatattgtcaatggcttctacaagggcagagttgaatagttgggacagaactatatggctggcaaagcctgaagtatttactatctgatactttccagaaaaaaaaaacttgctggccctggcttgaagggaatagatttgaagggaatggacctccagaatctcaacatccccatgtcctcttccagacacttgcctgccaggaaaggtaccagctgtgaagatgtcaggtgtgggtggaggctcccttccttccccacacttttgtttcctacttgtccttctcccactttcaaaagaaaggtaggcctctcatcagtcctgggtattaagtttctaacatgtgaaatttgggggacacattttagaatgtgtaaaaaagcccctgggggcccagagcagtggctcacccctgtaatcccagcactttaggaggttgaggagggcagatcacaaggtcaggagttcgagaccagcctggccaacatggtgaaaccccatctctactaaacatacaaaaattagctgggcgtggtggcatgtgcctgtaatcccagctattcaggaggctgaggcaggagaattgcttgaacctgggaggcggaggttgccactacactccagcctgggcgacagagcaagactccatctcagaaaaaaaataaataaaataaaataaaatttaaaaagcccctgggcactagacatagcaacagtaccagataccattgtgtaataggactctgatcacaggataggtatatacacatatcgatatacagagatagatagatagatagatagatagacatctatttttttgcaagtgaggtaggttccaaatattgccttactaaaattgaaggaggacccaatcaagttgtcagttgccaaatcaaaaatatttgactgggcacagtggtgcaaacctgtaatcccagctacttgggaggctgagatgagaggacctcttgagccctggagtttgagtctagcctgggccgtttagtgagaccctatttaaaaaaaaaaaaaggtgacaagatggctatgtgatctttgcatatgactgaaaacgggttcaaagaattgatgagacaaatataattatttatgtaagcaattttttaaggcttacatctaaaatatttttagcctggggtggtagctcgtgcctgtaatcctagtactttgggaagctgaggcaggaggatgacttgagcccaggaattcaagaccagcctgggtaacatagtgagaccctgtctcaatgttttaaaaagaagaaaaatggtggctcacgcctgtaatcctagcactttgggaggccgaggcgggcggatcatgaggtcaggagatcaagaccatcctggctaacacggtgaaaccccgtctctactaaaaatacaaaaaattagccgggcgtggtggcaggtgcctgtagtcccagctactcgggaggctgaggcaggagaatggactgaacccgggaggcggagcttgcagtgagccgagatcacgccactgcactccggcctggatgacagagcaagactccatctcaaaaagaaaaaaaaaaaaagaagaaaaataaaatatttcttaaatgctgaatgttgctttgttctatgaataagcaatatttgttcacagatacatcaactaattaggaataaaatgaatttcaagtaattcatgtttaattacttattaacatgtattatatttacattattttttatcaattatgtactaataatggcaatgatgaaatgaagatctcagtgtcttgcactgggcagaggcctttctcattctctgccacttgggccccagcatggcttccctaagagctaggagctcagagggaggggctgggcaagacagaagtcaggatctttttgtaacttaatcttgtaagtgacatcccatcatttttgtcttcttctattcatattctattgttagaaccaagcctctgggtccatcccacactccgcgaggaggattcagaaggtcgtgactcccagggggtgggatcctagaacacatcttagaagctgcctacgacaaccgctgatttttaagtaacagttacatcctctacatctatttagacttaggatggagaattttagatgtcatctttaaaatgcatgagaggatgcagttttccaaaattcttttagaaacagacaatttgaaggccactgagcttcaggcttcattcagctgggtcgtgtctgcgggcggggctcatagagatgtcgctgggggtcagcgggtgcttcgggcagcgaaaaaacccacctctcgagggcagtggaaaatacagggaaaagccacttgagtgtagactccgtgcgtgtcaaggccaggcagaggcgcacttgataggcaaggaaaagcggacggtggtggtcttgggaggaagagaggagaggcgaatgggcaggagcgtgtggatgcactagggcaggacgggctcgaagcaggaacctaggatagaggcagcgcgggccggcttgggagggtcctccagggtccggagaggagaggacgcaggctgcacgcgtgctaagaaggagactcatgaaatgtgtaattcgctggcgacagcttccgcggccgtggagtgagcctctgggaagtaacgactctcttaggtgcggctgggacacagtctcacagaccaggtaagttgcctgccctccaggaactcaagtgtccccgagtccgagccaggaggctggaagtgactgctgtcccatcctccctggagcccggagctgtccttgtcttgagaaagagaaagcaaagccaaggaaagcagagcgagcagaaccaggcaaaggggtggggacaataaaatgggatatggcccgcgcttccatctactcaggaggcagaggcaggaggatcgcttgagcccgggaggccgaagctgcagtgagctgcggttgcaccactgcactccagcctgggagacagagggagaccctgtctaaaaataaagtaaaataaaaaacaaaaataaaagggacagagactaagaaaacggacttcctgaaatcccaagttgggatttcacgtccagtgacccacaagagaagcaagaagtctgaacagggccaagaatcaagtgagtgggggcggaggattaaaatcgacagttgctgcggcacggccagggtggagggtgcatgtggggcaggcgaggctccagctggagttgacgctagcccgacgcgggtgcaactggaggcgcgacgggccaggcccaggagcagcgggaggagcgcacctggggcgcgcgggcggaggagggccggggagggacgccggaaggactgggtagggacgcccggaggactgagcgtagggccgagaggaggggcgcaaggaggaacggggggagggccctgtctcaccctaaacccctccccgtcccagactaaactcctcccctcggcccggcccgcccctgggcccgggctggaagccggaagcgagcaaagtggagccgactcgaactccaccgcggaaaagaaagcctcagaacgttcgttcgctgcgtccccagccggggccgagccctccgcgacgccagccgggccatgggggccgcacgcagcccgccgtccgctgtcccggggcccctgctggggctgctcctgctgctcctgggcgtgctggccccgggtggcgcctccctgcgactcctggaccaccgggcgctggtctgctcccagccggtgagactcgacgtggggagcggtagccgccaggatgctgcggacgcggggcaaggtcgcggagggccggacggtcgggactacgcgcccgggctggggaggcaggaagtccgcgccgcgggcttagaggggctcagagccttgggcacagatatcgcggcgcctggggaggaccctcggagcggtgggagttgcggtgtggaatacggggggggtgggtggcacatcgcgcggcgcgtgttgcacaacctggcccgccgtcgtgactggaggcgggagtgacacctccgcccgggccgcggagttcggggaaggagggcgcggcgctgggccaggccggaggggcggccagggctgatagaaaggggctgtggagaaggggcccggggaggagccaggacgggtctggacccagctccacgccttgcgcccctcacgtaccccggcggggcacggtcggccctcgggaggcccatcgcgccctcgggagcttccctcaagccgtgcccttcatgccgccgacggagccgggcgagcccacgtcgtccgtgcggaaggtggagtccctcacccgcggcccccagagggaccccgctgtcgtagagccacgcgggggccggagcgctgagacgcggcaccatgtttcggggagagctctgccgagggcggctgagggccacctccccagaggcgcgaagccctgaggatgggcagatggttcttaagacggcgcccttcccgccactcccacccccgactaccaccacctgggtctgggaacccggtgagagcgcagtcggagggtcgaacgtttgtagctgtcaagtcgtagccccgctgcgcccacaggaagtgacccacccgcctgccgggtagtggcctttctgtgagccaggaccatcttaaggaaaaaaa

SEQ ID NO: 9338 - DNA, 6000 bp, Homo sapiens
ctgtgcacacacatggccagaagtgggagctccagcctaagcaagcgggcaatcttatacctgccaaggtcatttatgttttatttccagttactgggagaacagtttgaaagtagcttcattcagccaggcgcggtggttcacgtctgtaatcccagcactttgggaggctgaggcgggcggatcacgaggtcaggagatcgagaccatcctggctaacacggtgaaaccccgtctctactaaaaatacaaaaaattagccgcgcgtggcggcacacacctgtagccccagctactcgggaggctgaggcgggagaatggcgtgaacccgggaggcggagcttgcagtgagccgagatcgcaccactgcattccagcctgggtgacagagtgagactgtgtcccaaaaaaagaaagtagctacattcttagaaatcagctacagtcttaagacaccagaactcctgttttgtccttaaatgcagactgtcccggtttaatgatcattcaacttaggagtttttgaaaatgagacacattctgcagaaactgtacttgaagtcctcgtgcaacaattctctttcaccttctgtacggtattcaataaactccatgacatattcaacactgtgtgataaaggaggctcagccaggtgtgctggctcacacctgtaatcccagcactctgggaggccaaggcaagtagatcatatgagctcaggagttcgagaccagcctggccaacatggcaaaagcctgcctctactaaaaacacaaaaattagcggggcgtggtggcgggtgcctgtaatcctggctacttgggaggctgaggcaggacaatcgctggaagctgggatgcggaggttgcagtgagccaagatcgcgccactgcattccagcctgagcgacaggaagactccgtctcaaaaataaaaataaaaaaggaggctcaactgtgggctagcataagtttgctgagcatgcttgaggcaggctaagctgtgatatttggtgggttaggtggattcagtgcatttccagctgacaatattttcaactcatgatgggtttatccggaggtgaccccactggaagctgaggagcatctgtaattggctgtggaagtaatcctcattccataaaaatttcaccacaattagtacccgtttccaaacccatgcttggggctgtccctttctaggcagtgatctgttcactctccttttaacctccagttgtttggtgtctgattgtccccactgatactctgttgttactggctaacaaatttttgagccttttatcctggtattattttaaaactgttcagttattctcccatgaaaagtgtttctctgataaaacattttatgccaaccgtactttcttgtttagtagttgcatttcagtgtaatttctgaaacaaaacaaaaatcaactttaaagtgaaaaatcaggctgggcacggtggctcacttgatgtcaggagtttgagatcagcctggccagcatggtgaaaccgtctctaccaaaaatacaaaaattagccgggcatggtggcacacgcttgtgatctcagctacttaggaagctgaagcaggagaattgcttaaaccctgcaggcagaggttgcagtgagcagagatcgcaccactgcactccagcctgggcaagagtgtgagatcctgtcttaaaaaatcactagtaaaccccagatcagacatgatgctactcaaattgtgcatctcgatggattctcccagtgggtggggggagcaccactctggcctggcttccttcactgttctgtcagctttcctagagcccagtccagctgcatcagtggctgggatggcgttagcaaacccactccctgtgcatatcagcagcacacccttaaaatgcatgcaaactttgattcctaactttcagatttcctcctaccgtgacatgaattctcaccaaacaaaggccagaatgctttttgacatatttagctattgataggctttagctctccctctccctctccctctccctctcctcacggtctccctctctttccacggtctccctctcatgcggagccgaagctggactgtactgctgccatctcggctcactgcaacctccctgcctgattctcctgcctcagcctgccgagtgcctgcgattgcaggcacgcgccgccacgcctgactggttttggtggagacggggtttcgctgtgttggccgggctggtctccagctcctaaccgcgagtgatccgccagcctcggcctcccgaagtgccgggattgcagacggagtctcgttcactcagtgctcaatggtgcccaggctggagtgcagtggcgtgatctcggctcgctacaacctccacctcccagccgcttgccttggcctcccaaagtgctgagattgcagcctctgcccggctgccaccccgtctgggaagtgaggagcgtctctgcctggccgcccatcgtctgggatgtgaggagcccctctgcctggctgcccagtctggaaagtgaggagcgtctccgcccggccgccatcccatctaggaagtgaggagcgtctctgcctggccgcccatcgtctgagatgtggggagcgcctctgccccgccgccccgtctgggatgtgaggagcgcctctgcccggccgcgaccccgtctgggaggtgaggagcgtctctgcccagccggcccgtctgagaagtgaggagaccctctgcctggcaaccaccccgtctgagaagtgaggagcccctccgcccggcagccaccctgtccgggagggaggtggggggtcagccccccgcccggccagccgccccgtccgggaggtgaggggcgcctctgcccggccgcccctactgggaagtgaggagcccctctgcccggccaccaccccgtctgggaggtgtgcccaacagctcattgagaacgggccatgatgacagtggcagttttgtggaatagaaaggcgggaaaggtggggaaaagattgagaaatcggatggttgccgtgtctgtgtagaaagaagtagacatgggagacttttcattttgttctgcactaagaaaaattcttctgccttgggatcctgttgatcggtgaccttacccccaaccctgtgctctctgaaacatgtgctgtgtccactcagggttaaatggattaagggcggtgcaagatgtgctttgttaaacagacgcttgaaggcagcatgctcgttaagtgtcatcaccactccctaatctcaagtacccagggacacaaacactgcggaaggccgcagggtcctctgcctaggaaaaccagagacctttgttcacttgtttatctgctgaccttccctccactattgtcccatgaccctgccaaatccccctctgtgagaaacacccaagaattatcaataaaaaaataaattaaaaaaaaaaaagaataacaagaaacatctattctctgttttccataccctaagcttggttctaagcaccttatgttcattgacttattaaattctcacaacatgaaaaaaaaaaaaaaagataggctttaatttttcttgagacagggtttcactctgttgcccaggctaggtacagtggcatggtctcagctcactgcagcctcaatctcccgggctcaagcagtcctctcaccacagcctcccaagcagctgggactacaggggcaccccaccacacccagctaattttttgtctcacgatgttgcccaggctggtctagaactgagctcaagtgatctgtctgcctctgcctcccgaagtgctaggaattacaggcgtgagccactgtgcccggcctttattttttataaggaacttagccatttagagtgcttccagatttatcttcttcgggccaaaaccagcaacaaatatatgtaccaaaagttagcatcttccactggttaactgtttcaaaacagtgcagtaggcagtgtaaatgtggctctatttttggaactgttactgtttaacgcttgttaagcatcctgggtaaatatatcttacacagataatcctacacagtgagcttcttaaaataagagcataaaagctactcgggcaagatttagggagacaggaagctatacattgttactgtagattagtctcaaaagttctgatcaactttctattttgacatttggagacatccataggtgcttctcttgttaaagattaatgtctcttgtctctaaaccaattcgtgttactggaaggaaaggcaacgcaagttttataaatcagcccctttgtgggctccattttgctatactctatgttctctgagagtgctaccaacggaattgagaaaataaccatccagacgggctatttgggggctgatctttaccctggaatcttcctggaaggtgaacggcctatgtcatgcagttgttatgcaagaggtatcatgggacctttccttctgggcgctcatggagccgcggcagagccctgggtgacccagcagcagctgcctgctgtgtggctgccttcactgtcctcccccacaactgctgttgatttctctgcattgaccctgcagatgtttccctggcctcgtggtgttcctttggacttttaagggacctctgtgcatctattttagtcccctttctgctagcaatgctcactcccctagtttccttaagcagttttataaaaaaccttcagtgaaaaatactagccaagaaggcgaaggcatctggaaaatccccagatttggctattgtgtgctgcaatcccagcccccttctacagccatgacatgcatatcaatgcaggtgcccttgagactcctgcaggttcgagaaagcatgacatgctcccagaatcctggatttggacttcattctggacagcatatgacaaggacgaggacccctattctagccagttaaagctggacagaatttttaaaagcaatgaagccagttccttggatatatccacgggctttgctttgagaaggaactgagtaggcagtgagaagagtcgagtgaagcctggcccgtgagtgcctcaacaactgagatgaacgtcgactcgcttgcaggcaagttgtcagtaagtatttattaaatacccaccgtgagccttgtactttgcctagttactaagaaaccaaaagggggaaaaatagcctcatctgctcagagttcataataaacctgtattgtgaatacagaatacagaaaaactggactctagtgaggtgctagaaagagtgtactgcttagctgagatagcagatgaaggaaaaatatttttggttcctccctgccatgcaatcgtaccgggagggtggagtgttggtgttctcagcccatttaatttggatggagctgcgggctcatcagtttggggactggcttcatcgcttgttctgtccagcagtcgcgtcttctcggactccttgttccagcttgaattcctcttttgccctggctccactctaagacgaagactgtgtaattcagaaaatgcagcgcaagtaattatgtccagtgtgatgctaaacatttcccaaaggcagcgtagatctgcagaaactgcagcttgggagaagtgatggtgttcctctccccaccacctcagcctgccctgatcattctcactcacatgatctattgtgatgttctcacaatgtagcctggccatcatctgggaacttgctggaaatgcagattttggcatcccgcctaagaccttaaactgaagaaggtcctagctctctcttgtaactagcaacagatgcaacctgcatggttctgatgcaaactgacctggaagaatggccctggcatttacattttggtccttagatgcaggtaatctgagctgaacatcttcaaacctgaggcatagcatagaaaaaagaatacaaacagtttatataaagtaaaaaaattttttagaaaggacttaagttggctggggcgcggt

SEQ ID NO: 9339 - DNA, 6000 bp, Homo sapiens; identical to SEQ ID NO: 1012

SEQ ID NO: 9340 - DNA, 6000 bp, Homo sapiens
caaatgagttaaatgtaaagcactcaggccaggcgtggtggctcacacctgtaatcccagcactttgggaggctgaggcagcaagattgcttgagcccaggagttcaagacaagctggtcaacatagtgagaccccatctctacaaaaaatttaaaaattatccaggcgtggtggcatgtgcctgtagtcccagctacttagaggctgagttacaaggattgcttgagcccgggaggttgaggctgcagtgagctgtgatggcaccagtgcactccagcctgagcaacacagagagaccctgtcttaaataaataaataaataaataaacaaataaataaagcactcagaaaagcacctagtgcatagttaatatcataccatataaattgagccatcactattattgttgtaaagtactatacaggatgattatgatggtcacttcttagatacagaagcagagttctgctgtgtctacaaggagaggaacactataggaagcattgagttctgccctgaactcctagtccaggctttaaaaaagagccataaaaatgccatcccactgatgagcctctggagcaagggaggtgtgccttgaccatcctggaaaaacatcatctccaccctacctatacttatctccttggctcgcttctggccaaaggtccacacttggtctgaacctattgcatgcagagctttgccacagatgtccctgtactgaggggctctggctggttgggatgttcgaagggacagctgtggatgctgtttattggcctgaaatgtggaaccagtgtggagaaggcaagacaggctaggttgacgtcagatgtaggcttttcatttttattttttgagaaagggtcttgctctgtcacccaggcttgaaggattgagtgcagtggcgcatcatagtttactgcagccttgaactcctgggctcaagcgatcctcctgccttagcctctcaagtagctgggactataggcacgtgccaccatgaccagctaattagaaaacatttttcaatagagatggggtcttgctatgctgcccaggctggtctcaaagtcctaggctcaagtgatcctcctgccttggcctcccaaagtgctaggattacaggcatgagtcactgtgcccagccagatgtgggcatttttgatttttgcatggaagagtcaataattggattccagggctgggcacggtggctcacacctgtagtcccagcactttgggaggctgaggcaggtggatggcttgaggtcaggagtttgagaccagcctggagaacatggagaaatcctgtctctactaagaatacaaaaatgagctgggcatggtggcatgcaactgtaatcccagctactcgggtggctgaggcaggagaatcacttgagcccgggaggcagaggctgtgagtgagccgagatcgcaccactgcactccagcctaggcgacaaagcgagaccctgtctcaaaaaaaaaaaaaaaaaaagaattggattctaggtcagaaagtaatattacagaacttcggagtgctatgagattctttcttcttcttttttttaaattgaggcagagtcttggtctgttgcccagggtggagtgcagtggcccaatcttggctcactgcaactgcggaggcctcccagattcaagacattctcatgcctcagcctcctgaacagctgggactacaggtggacaccaccatgcctgcctaacttttgtacttttagtatagatggtttttcaccatgttggccaagctagtcttgaactcctggcctcaagtgatctgcccacctcggccccctaaagtgctggaattacaggcatgagccaccgcgctgggctgagattctttcttctttcttgccttacatcagcctgaacgagtccagtgattgacaagtgttcaatgggctgtcacatggtttcttctgctcttcacagccaccctatgcagcaggtgttagtattagtgtcctcagatgagacaactgaggcacaaagaagtatggtgactttctagaggtcacctggctttgtcactgaaggaaccaggattcttttttattttttaaaaatttttatttattttatttgaggcaaggtctcactctgtcgcccaggctggagtgtagtggtgtatctcagcttactgcagcctcgacctcctgggctcaacccatcctctcacctcagccttctgcgcagctgagactataggcgtgctccaccacgcctggctaatttttgtagagacagggtttcaccatgttgcccaggctggtcttgaatgcctgagctcaagcaatcctcctgccttggcctcccaaagtgctgggattacaggcatgaaccactgtgccccacctgaaggaaccaggattctagccatgcctctcatctccagtccagtgtgctttctgctacaaaaacaacaactcatcccctgctacagcaggctgagcaaatctgcctcctcaggcaaggagccacactgagccctctgccaaatggaaggaacaaccccaagttccagagcctaggtagggctagggaaggggttgtaacgaggatactggcatctcaggtgctctgccagttttcccaaaataaaactattcaaacaatacaaatattaatatgggcctggccttatacatctgaaaggactgtccttatttccactgtgttttttgtctcaaagatgaggaaatgacagaagagatgatttcaaaggctgtcccatgagctccaacttagagacagaagtttggctaagtaaagacaatacgcatttatgttcccccagagggaatgaattcgcttctgtttaggatttctgtgtcttcgcttgagaaagtctaagtacttgtagacatagaggagatgatgtgtcccactggatgtgtgttgaggaatccatttgtgggcataatagtgctaaacagtggttacatacggactgatatgaagcccgggaatagttgaaaattgggtgaatcagaaatggaatacaatcatatttttatatggtttctagctctcctctctcctgccttaaatatcttgacctcattctggctgtctcactactaaataggcaaatttacttttagcaaggctgcttctgttaagactgtgcctccatctcctggacaaatttggaatagcaagaaatttgttaggaaagggacttttccaggcagcagccgcttagagctggccgcttctgagcatgttcgtcttcccaggcctggctcacattttcagtgcttaatgcgcatggcgctttatgcgcaatattacttaattcttccctcagccattgggagctaaggacaaactgttatcccaattttacaggtgaggaaatcagagcttatttaaataaattgccgaggtcacacaactagtaagcgacaaaatctcagtcaaaccgaggctcttttggttcaaagatgtgtattgagctctactctgctctgcagggacagaactaagtatgtttgctattcaggggatacacagtcattccatgagcaagttacacaatgtaaaataaggacattgtgaaaaacaaaaccataccgtacataatgcactttatagtaaagtactgggaacagagtatttggtaaattgtaactataataataattttaaacagatccacaaatcacacttattattatattctgtttcacccgggctttgccaagcttcccacatttgtactagatcctcttggctttagtttctccccagttctctaccctttgaattcactccaaagcttccctagaatctttgctctcctagaaattagattaaacaggcacctgctcacatcatacatcccctgcccttgtcaccagacatgcacacatccatcttctgggatttccgttctcttgcagaaaagtctgcatgggaagctgaggcagaaccaagtccaccagactccgaggaaagagaagtctggaccctgtaaccagataaaagtgaaaccaggacttcatttattccacaaatactttttgactacctatagatgacaggcactgttcaaggcattgaggttcccacagtgaacaaaagagacaaaaacgtctgcctttgtgagtttatatcatagtggaaggaaatagacaataaaaataagtaaaatatagacattggtatgtagatggtgataaatgataaggagaaatataaagacagatcggaagtgacaacagtggggaagtggaattggtatctgcatttaacgttgttttttaacagcaaattcaggatggggcagagagcagtgagaaaaatgaggcccttatgctcagcgcccccaaccccgcctcggtggggtcactattcattttggaacattgcccttgggaccaacatattctcagtggtccttgtgaaggtttccaccctaagtccctcatcctcaccaggcaatattcattaccctacagcaaactccggaggcaacgcggagaaagtgtgaatcaattcaagactaaggttgccaaaatgtttgatcagctctgcgtcagccttgacattacattacattacagatcccctgatcgccaccgtcgcagaagctctgaattaaaagcgtgcatgtagctgcacatccattgctggcacttcttccgttagcctccgctggaactggttagtgaggacccctccatttcacaagacagcttcggttttgcttcgttttgacttccgcaccccgaagctgtagcaccagtttgttttctcacggcacaggggcggcttccggggcgcggcgtgctgggggttgtagtccgcgctctgcctcctacttccattacagaaggcgatgggccgagagctgaggaactacaactcctagagtactccgcgccgccgggacgccgcgcggctgcggggctgggcgagcgcaaagatgtccgcgcccgctgccgggaggcgaggtgagtctttgatcgtaaccaggagcccggagctgaggcagttcctgcacgtgtcgcggggccggagaagctagggccaggtattccagggatgcaagaatcctgcaaatctgacgtgtaaactgcttccccagcctccaggcgagcccagcttttgcctcagataggccccttccttttccttctcggggaatcgacctcgggaaggggtgtgggcaaagagatgaggactctccctcttcgcccaggccaactcgggatatcccggagcctctggggaggcggtcactccgacgtctgaggacctgggccttggacccggactcgttatgaagagcgattcttcgacctctgcagcccccctcagggggctcgggggacccctgcgcagcagcgagccggtgcgcgcggtcccggcccgggcgccggccgtggaccttctggaggaggcggccgacctcctggtggtgcacctggacttccgggcggcgctggagacctgcgagcgggcctggcagagtctggccaaccacgccgtggcagaggaacccgcgggcacgtacgtgctgggctcggaaatgaaccgatttccgggcgctcttgtggtggggctcaaggtctcaggagttctgtccttcccagattgcccacaaggagctttacacctcgctttcatcagtggtttgtctccgagagggtggtcgctcatcgtgtgcccattctacagagaagggaagtcgtgtaacaaaaacttagtggggatcccacagccaattatttgctccttgttccaaggtacaatgacatgatgggaaggctgaatgtgtattaagtgctaagttctgtcagtaagcaggtggtaaaagtcctctcccaggtacctccgccctccccgccccgcccaaggttgtttattcctgaccttggctgatgatggggaatgggggtcatggcaggagcagcgttctggtccaattagaggactggattaaagaattaat

SEQ ID NO: 9341 - DNA, 6000 bp, Homo sapiens; identical to SEQ ID NO: 2195

SEQ ID NO: 9342 - DNA, 6000 bp, Homo sapiens
tagagccagaggtgtcaagcccagctgcctgtgtcctggccgcactgtgaggcactgaggatgccctcacacgtgcatctgcatgtggcgtgcatgtggcaagcatgtgcaggtgctgtgtgggcacgatcatgcctgccctctactgtgctggagaggtaagaccatcagccgtttcacagaggagggaatgtggacctcacgggggtctcatgagcttgcgagccgatggccaggcagccggtgcagaaggttcatccattttgatgaaccgtgaattcatctgtactttattcattttaataactgaatcatacctcattgtatggctctaccatgttttattatccattcaggtgctaacggatggaagggttgtttctacctgttggccattgtggatgatgttgctatgcatattggggtacgagtatctggtttagtccctgttttcaattcttggtatacacctaggagtagaattgctgggtcatatggtagttctattttaacttttttttatttttaatttttgtgggtttttaagaattttttaatatttgtgggtgcatagcatgtttaattttttttttttttttgagacggggtcttgctctgttgcccaggctggagtgcagtggcaggatcacagccctgtgcagcctcaacctcctgggctcaggtgatcctcccgcctcagcctcccaagtatctgggactacacgtgcggaccaccacgcctggctaatttttaagttttttgtagagatggggtcttgccatgtttcccagactggtatgggactcctgggctcaagcaatcctcccatcccaacctcccaaagtgctggaattacagtcatgagccaccaggtctgaccacatgtttaactttttgaagaactaccaaactgttttccacggcattcacaccagcaatgcaagagggttcccatttcatcacatccttgctaacacttgttattttccttaaaaaaaaaaaaaaaaaaaagccagctgggcacggtggctcatgcatgtaatcccagcactttggaaggccaagggggtggagcacttgagctcaggagactagcctgggcaaaatatcgagaccccacctccactccatctctaccaaaaaaaaaaaaaaaaaaaagctgggtgtgcggtggtgcacatctgtcgtcccagctacttgggggggctgaggcaggaggatcccttgagcccaggaggtcgagactgcagtgagctgcgaccgcgccactgcactccaggctgagcgacagagtgagaccctgtttcaaaaaaacaaaaaaaaagcacatttcaaacatacacaaaagcagagagaattcccctcggtcctccggcctgcaccccaccgccccccaccacaggggcattcaaaactgtctttttgcctctctgtaaggtaaggggggactcttgacgctccccagaccacacagccaaagtagggcgatcggatcatagggggtcccgagtcggacactgagctggcgtgcccactctcgagtcctgggaccccaaactaaaggagctgttccttttccccatggagggctgacggggcaaaatcccagggctgggaacatccgagcagctttgagtagcacaggtgggtttctacgtggctttctttaaagggaggcctgattctcggcttttcaggacccgccctccattttctcacttgcctgctctttcgtcctgcgaaactgggcagtggccggtgacagcgcagggtcagccctcggatggccaggtgggcgtgatcccaccctcctccgtggctgggtgggcgtggtcccaaagtcaattggatgtggtcccgcgtccctcccggcccagtgggcggggcctccccttctggggcctcccatcccacaccagcgagcagagaggagggtgggcggggaggccctacggggctggggcggggcggagcggaggtggttagctgtcgggaggtggggtgggcaggggccagggctctgttggtggcccggggcagccagtccctctgctcagggcttcagttcacactcacaagggaatcccagcgctcttctcctctggcggttgctggagggccttgtgaggtggccgtgggcactgtagcccccaggcactgcattgtggcctgggcgtgttggcctttgagcctttggccttgagcacttccccatcccccatggctcttggccgttggggcccagttggccgcagagcctttggccttgagcacttccccagcccccatggctcttggccattggaccccagttggccacagagccgcgggcaggtgggacaggcgggcactgggtgcctccttgcaccagccaggcccagcctgcagagtggagtgggccggtccctcctgccaggcaaaggaagggggcttcgggcccctccctgctgtggcctcctcccctctgctgcctcccactaggccctgggagacactgcctgcagatttatgaacagacagacctagagattagagattcaaaagccaaattcttacacaattcaagtattaacgcagatttggatttataatttgggactccaaggtctaccaagtaatttgctgtttcagaatagcccttttaatttggggtatatatttctaacactgttttttaaatatggagagtaaacaaaatggcccattatctgaccacacaaatactagtagtcattatagataaaccatagcagataaataatagtaaacaaagcaacaggctgtgtcataggaaatccccaccatgaagaaaggagcaaggtggaaagttctggctgcttcaggtctgcatggtccctctccaccatggttccccctgtcatcttcctgccagaataaggacactgtccttagggaagcaccatctcttgttttttccccacgagccctgtgggtcatggcacgtcctgccccgctgggaaacacagtgggccacgggtttccctgcaggcctgggacccttcccaagggtagcagcagaaggcagcacgattcccactcctgcagctgtggacaggggcacccccactgtcactgagccctgcaccgggttccatcacctgctcggggctctggcctttggccttttcctgtgagctgcatgttggccactgtgacctatctgtctcatcatctttttcttactggtttgtgtatgttcttggtaaactagcccttggtcttacacatcatttccaaggtactaaggactcttcaggggaaatacaacttgagcagagtggttccctcctcttgtggttcacaaggtgcaggtgcacacacacatagcccacagggcagtgtggacagggaccaggagactgcccctggggtccctggctgggggacactagtagggatgtcccttggcctctctgaggccttctgctgtctcttctgaggccggaaaggcgaagcactgccctcgccctgctagggaaggctcaggccaggctggccctatccggggaaggggctcaggtatctggaccttggtcatcgccaggttagggtttatgttgatgattatccaaaggcaaaattgatttccacagaaataacatctgctttgctgccgagctcagaggagaccccagacccctcccgcagccagagggctggagcctgctcagaggtgctttgaaggtgagttggccaacggaagccggggcagtgccagggtgggtacagattccggcccggtgcatgggcacaggtctgctgagcacatgtccactctgcctgtgtaaataggccacatggcctgaaatcccctagaagcctggtgtccgcatgacctccccctagggcggagcctctgcttccctgttctcttctgctctgtcctctggtgccctgaggctggcctccaggggtgtcccctctgtggccctaggcctgcctccttgcctgggtgtgcctttctaaaatggagcgtccagcagagagtgggatctcctatgccactgggagcccagggccccatcccagaaagacctctgagtgagcacaggggccctagaagaagtttccttgtgtccttcccgttttagggtctgtgacctgaacccctgggcttctgcctcaggcctcctgtgctctgctctctgcctgctgggtcccctcaccaggcttctgtctggttcccaggctacctgcctggagggtcacaccaggaggatttcaaacaggtttcaagtggggtcacttgccatcactgtgccccacgaggtacactgttgtgggcggcagggctggcctttctcatctgggacatgccacgttgctgttcccaaggggagtggtgagtgggtctgtcctggtgtgcctggcctggggactgccagtgtccttacttggacactcaatgaaaaggccacatgaatccctggggcgtccagagcatgggtgaccagcacgggctcaccacatgaggccaaggggctgcaccatacagcctctcctttggccacccgtgactacccccaactccgggccatggggcttccctacccctgggtgtcctctaagccagctgggagacaacagcctgagtccgtgtctgcttctgtattttgtgtggttttagaggatccctgggctgcctggggaagcacccagggccagggagtgtgaccctgcaggctccacacaggactgccagaggcacacacctgctctgtctacccgagggcaccagagggcacgagaaggctggctccctggcgctgacacgtcaggcaactgaggcacaaggctggcatttctgaaccttgcccctctgcaaacacaagggggcgatggtggcactccaagcaaaggggcgtgtgggtgctgcaggaggagcacagagcactggcgcccctcccctcccgccctgcagatgccggaggccccgcctctgctgttggcagctgtgttgctgggcctggtgctgctggtggtgctgctgctgcttctgaggcactggggctggggcctgtgccttatcggctggaacgagttcatcctgcagcccatccacaacctgctcatgggtgacaccaaggagcagcgcatcctgaaccacgtgctgcagcatgcggagcccgggaacgcacagagcgtgctggaggccattgacacctactgcgagcagaaggagtgggccatgaacgtgggcgacaagaaaggtggggtccgggccagcaggtgctcagctctgggacagggacccaggaccaggcatcaaagcccttacaggagaagctgttatcaccccatttccagggggctgggaaccctgggatatgcccagatagggctggggggctcctctggagtcccagggtgccagggtccctgatgacccctgcaggccctgctgcctgctgccccaggacaacaggcccccacactcacagggtctgacggtggtgcagttccccttgaactctgttctggccaccatgggacctgcctggggaccagtcagacaggttctcctgggcccgcctcccgcttgaacttcagcctggggcacaggatgtgttaccgggctcacggagtgactcagggaactagtgccgccccagggccccaaggtgggcggttcggtgattcagagagggcagctctgtgttaggacacactggggccagccaggaagggtggaaaagatagggaccagcgtgagcatagaggctaagggaccatgggagctccaagcgcgctcacagtggggaccaggtcctgggggctggggacaccagggaggtgaaatacccctccagcgggtagggagggtgggcagaggagggccagcggccaggcatttgggaggggctcctgctctttgggagaggtggggggccgtgcctggggatccaagttcccctctctccacctgtgctcacctctcctccgtccccaaccctgcacaggcaagatcgtggacgccg

SEQ ID NO: 9343 - DNA, 6000 bp, Homo sapiens
ctgcttgtgtttttagcaggatcaggcaaaaatgatcatgccgaaaaagtggcggaaaagctagaagctctctcggtgaaggaggagaccaaggaggatgctgaggagaagcaataaatcgtcttattttattttcttttcctctctttcctttcctttttttaaaaaattttaccctgcccctctttttcggtttgtttttattctttcatttttacaagggacgttatataaagaactgaactcaacattcaggttgttttttttttttgtttctaagtttttgccctattgaagatgacttcagaaaatccattccccagtcatgaaaatgtactgtgctaactttcttttccatagtggaaacacttatttatagtcatcaaaaatagtgaataaaaaacacatttggaacctgggccagatggcaggactgtgtgtgtacaggcccctgcgctgtgagcgccgctcgcctaagcctcccgggtgtatgtccaggcctgtccgcagcacaggtgggtgctgcacctcacggtagcctgggttcctgggagagacgccctggtgtctgaggtcgtgcatgtatcttgctgtgggccttgaagctgaggtgtctgagctggcgctggtgagggagcctggccaggggtgtctggtgccgggtgtggtactgatgcacgactgtgggctgggcagcgtgggctctgccgaggcaggctccactgtgccttatggcctgaacagctactgctttttttctatggtgaggaggggtgggctttctgtgttttgaggagagaaaggaagaccactggagtaccttggctttggagcagggaggcagtagccaactgagcagagtctctagcatcggccaaggctgactttggcccctgtggcagagtggcccctgtggagggaaaggccagtctggtgtgctgggggtgggggctcggccctgtagctcttcttttggaaagcctattgtaccctggccttggagaaaactggggtcttggcctcctggacttgaagtccacacttggcagtgttggagttatgggcatctgcagtaactttaaataaggagatattttccagtacgccattgggggttgtcatgtgtaatggattgtctctgcaaataccatcttaagtgtgtggtcccaactgccataacgtgccctgtcaccgtttgtcatgaacacctaccagacgtgcttactgtgaggctggctgcctgctgccatcacttgctctttcgtgccctccacctgggcctgggccctgttctctctgacctccgtgtgctgtgtcctgtctggtgactgcctgctggtttaaacaccagtcctttgtctctctggggcaggggtccccaatccctggcctgccgaccggtacaagtctggcctgttaagaactgggcaacacagcaggaggtgagtggtgggcgagcgagctttaccacctgagcgcctcccctcagataagcagggcattagattcctataggagtgcgaacgctaacgtgaactacgcatgtgaggaatccgtgttgtgcactccttatgagaacctagtgcctgatgatctggggtggacagtttcatcctgaaaccactcccccacccctggtccatggaaaaattgttttccaccaaactgatccttggtgccaaaagggttggggactgctgctctgggggatgtacttccaaagtcaactactctcaggtttgtttatttttacataaatgggaaccactttatggtctctagcatcagccaaggctgactttggtgggtccctgtggcagagtggcccctgcagaggaaaaggccagctcaggagagaaggctgtgccgactcctcatggtttccagtgccctacatgttcagagaaacgtctttggtaatgaactatggaaatggtccctgaaggtatggtctttgctctagaaaaagcccaactgatgactcctcactggcatcttgactgtgttctgtgagctgtggccctcatgctcatggactgcttgcctccagcaggttggcagggggacagtggtgcactttgcacccaagaagaggtgaagcctgtgccctatgccctgtgccgagtgaggtcctcgtgttgggagggtgacgccgtccactgcagatggtgccttgctgtgctgcactcttggtgacacccggggccccaggtcgggtacaggtgtcagttggaggctttgatgtctgtgaaagggagggccccttgcactggctggagcttccaggagagaagcccttggctaggacaggcaccccccagcacagaaaggatgtttagcattctgtatttgatttggggttccaataaaattccaggctgacttccttcatctggggatgggagaaatgtctccaagggagagtccccagcagtgagaaggcccctcggaatggctgggagacagtgccatcctgtggtggggctgtgttgcagggtgcatttgaggatgcagcttgttgacactgcaggatgcgatggtgctgcgggaagggagctgtgctgggagacagaatgcgtccgcgtgctggccccacgggaccacagggtaggctatacaaggacgcccatgtgggcactcgggccagccgtccagcccagtgtgtttccattggcttccctttggcagacaatggtgagcagaatggggtcctgccggtgctggggactgtgtgagaatgcagtgtgcttcagccttccatcccatgtctgtctgccgggctgcaggctggggagcctcctgctttctgcttcattttccttttccctgggatcttagctcttcttgaggaggaaactaggccatgggcttggcagccatgttgggtggggaggccggtgccaacctcgcttggttctctgtctccagtagtgggtctgcactacttgggacccctctgcccaggcctctgtgttaaggaaaagggatcccaaggccagatgcaatggttgacacctgtcaccccagcactttgggaggcaaacgtgggaggatcacttcaggccaggagttcaaggccagcttgggcaacatagtgagagaccctatctctacaaaaaaatataaaaaaaatagcctggcatggtggtgcacgtctgtggtcccagctacttgggaagctgaggcaggaggatcacttgaaccctggaggttgaggcttcagtgagccatgattgcaccactgcactccagcctgggtggcagagtgaaaccctgtgttaaaaactcaagggaaaagggatctcaccaagtaggcctgattccgcttcttcccactgtcagcatttggcagtttactccagggttcagctggtggaggaaggtgacagtcctggcaccctgcacagagcatgggcatggagtcagacctggatcctgaggggctctgtggcatgtgccactagaggaggcacttcatgggggaaggtaggagcaagggcaaggctggagatgggcaccaggtggcaggtgtgttgccaactgagaggctcacttgtggccactgcagagcccaggtaacgagccatctgctccagtggtgtctgctctaggctcaccattgtgccctgagacccctccactgcctcagagctaccatcagtgcttgggagcgctccaggctgcacctcctggagcagggcaccctgagaacagagcttaccactacggctgcctgggagaaagcccatcaccatttctgctgtgcagtagttagttgcattaagggctgggtcccggccccagtcctgggttcctccttccaatagccacaaccctggcctgcccaccctgaggagctgcggccgggtgcttccccaggggagcaggggcctgcaggccaaggagcctcatgcctgtgccgcagggtagggccgctcggggttctggttgcagaggagcagacactcagggctgggggcgatgggtgaggtccccccacagatctccacctagggaggggtctaatgggtctgggcttcagaacaggggacgctcggggcatgttggcgtggccgaggacaatgaccctcactggggacgctccggagcttgactgagggtctcccgctggcaccgcctcctctgccggcgtgtgtgtgtctgggggggggacccacacgaggccccgccccaccccgcccacagcgccgtcggccccggcccggtccaccttaagcggcggcggggcgggtgggatttcctgcgggaggagacgcgccgggcctatcgggcagggccggggcgccgggcttcccaaagggccccgcctcggggaggatgggggctccagccgaccgtctctcaagcctgcagctcgggccaggacgtggagggcccggcgcccgctggccgggctcctccagcccagtggcccgagggagggctgcgaggcggtcagaaggcaaacagccacgacgccgctgcggtgtcacacccgcgccccctcgtgaattccaaggggcttcagaccagaggggtcgttagggaaagggctgcgcccacagacgcccccgaggccacctgcacggctccgcggcccgggaccaggggggcctggccttcgccgtggtgcccaccacccgggccgcaggggtgcgtgggtgcccggcccccgagagccgcgggcgcccgccgggctggggtccccgaggccgcggggtcctgccccctccgaaggtcccgcgaaccggtggcggtccccgggccccatcaactcgccccgcccggtcccgccccgccgcggcccccagcgcccggtccaccttaaggggcgcgctgacataagagcgcagcagccgccgccgcccgtggggtgggatttcctccgccgccgccgccgccgccgccgcgggtcctgcgccgcgtccagcccgcccgcccgaccccggcccgaccccggccggccctgcccgcccggccccggggagggatgcggcggcgcggcgcccaggatgccccgcagccccgggacgcgcctcaaacccgccaagtacatcccggtggccacggccgccgcgctgctggtcggctccagcaccctcttcttcgtgttcacgtgagtcggcgccgcgtctgggggcacgcgggcagcgatgggcagggcccgcacagcccgggcacgggggcagcggtcgcgggggctggcggggccccgggcagtgggcgggcggggcgccggctgcaggcgatggcagtccctctccacccgctggggctgggggagttgaagcggtgtgccggcgtcccgggcaccggggtgagtcccttgtgtggggacaccagtgcgggctgggcacctcgggagtgtccaggcaggccctggcggggagcgctgggccctggcaggggaggaggccgggctgccctgggtgtggctgcagcccttccctccccatgggacccccgaggggacgtgggccacccacaaccatgagtcttctctgcaggtggccgtgggtgcctctcgggtctcctcctggctgcccgccccgggccagagtcaagttgttcccacgtaggtgtggcctggcctcgttgccacgtgcctgccccacagccactggtgacccgggcctggcccttggcctccttctcaggaagacccagtggtcatcacagctggagggcccaggccaggccacacccagggcccgatgttagcacatcacctccgtgggctggccatggtgcacaccaggacccttgaggtcctgtttctgggagtgagagcccgcgcctgcaggacactgggcccctccagcctcaacttcttcacccaagatacaggctggcttaggaccagagaggcatgcggacagcacagcctccctctgtggctgtggggtcaccccagggctccttcaggcacaaggagggttgggggctccaggcttcggttgcacagatcttcaaccacccaccccccttccaccaatctgg

SEQ ID NO: 9344 - DNA, 6000 bp, Homo sapiens
caggagctcaataaatgttttctgaaagtaattttgttttttttgagacagagtctccgtttgtcgcccaagccagaatgcagtggtgagatctcggcttactgcaacctcagcctcctgggttccagtgattctctggcctcagcctcccaagtagctgggattacaggcgtccgccaccacgcctggctaatttttgtatttttagtagagacggggtttcaccatgttggccaggctggtctcaaactcctgacctcaagcgatcagcctgcctcagcctcccaaagtgctgggattacaggcgtgagtcactgtgcccagcctaaggtaatttttttttttaagtaaagtccacagagcagtaataggcttggtttcatggactgggattagagtgagtgactagagtaagtaaacacaactgtggcatgtagagagacaaaggtagggaaggttatgtcattaatgtacctcaagtgtcactaaaaccatgtcagggctgcctgagttaccaatgtctgagctgagatgtgaggtctggttctgcaaacttagccttcgccaggtcaaccctatctagatcaagccccacgcagtcctccaatctctcaggaagaaagaagagaaaaaaatagaagcaaagagaaggggaagagggaagagagaaggggagggattgggttttaaatactcatctccccctataagtctccatctttattatctcaggtgcgtactctaaaattcctttactcttaagaacaagaaacttggccgggcgtggtggctcacgcctgcaatcctggcactttgggaggccgaggtgggcggatcacctgaggtcaggagtttgagaccagcctggccaacacggcgaaaccccatctctactaaaaatacaaaaattagctgggtgtggtggcaggtgcctgtagtcccagctactcaggagactgaggcaggagaatcgcttgaacccgggaggtggaggttgcagtgaaccgagatcatgccactgcactccagcctgggcaacaagagtgaaactgtctcaaaaaaaaaaaaaaaagaacaagaaacttttccttgggaatgctaagggctttttgtcaattgcttcaaaaggaggaatgtagtaaaacacatattataggactacatattttatatatatatatttttattatactttaagttcaagggtacatgtgcacaacatgcaggtttgttacatatgtatacatgtgccagggactacatattaacaatgatccctagcataatcaagtcgcaagatcttagataaggatgagaggaattcacatatatttaatggggtcagccacttacagaagcctcctctatgaaataaggtgcttcaggggtccccagactgcccacatgtatatagttgtactcatggctaaattttttacagtgaatggatatcagcaataggaaaggacctcaagtgtcactaaaagcatgtcagggctgcctgtagaaacccatgcacaggcttccttatgttctctccctcctgtgaggatatacatcaagcttgctccttgctacagcagcaaaatattcaatacatgtgtgcagtttgtgcccaggaaagtccattagagaatcagcaccctaagtttttaatttatgcaccaccagcctagccatcagattcccagaaggaaagcaggtattcaacataaatcatagtttgtaaaaaggatctaggcatagtgaaccatctttattactaatagttacaggattgaggaaagcattcaagtgcttatttcccagatgccagccaaaggccaactttgtaagcaggctcttgtaaaaacagcagccccagtgctgctctattcactcttcttcacagaagtgattagtaatagctaggcacagtggctcatgcctgtaatcccggcactttgggagaccaaggcgggtggattacttgaagtcaggagttcaagaccagcctggccaatagggtgaaaccccgtctccactaaatactaaatactaaaccccgtctctactaaatactaaaaaatttgcccggggtggtggcacacgcctgtagtcccagctactcaggaggctacagtggaaaaatagcttgaaactgagaggcagaggttgcagtgagccgagatctcaccactgcactccagcctgggcaacagagcgagactccctctcaaaaaaaccaaaaaagtgattggtaaatgttgccaatgagactgaagtacttcctaaagtaagtggcattagggagctgccaacctgtggctatggctgtgttccttgtaaaatataatctttttcttttttttttttttttgagacagttttgctcttgtcacccaggctgaagtgcaatggcgcaatcttggctcactgcaacctctgcctctcaggttcaagcgattctcctgcctcagcctcccaagtagctgggattagaggcacgtgccaccacacctggctaatgttgggtttttagcagagacagggtttcaccatgttggccaggctggtctcaaactccgacctcaagtgatctgcctgtctcagcctcccaaagtgctgggattacaggcatgagccaccgtgccccatcataaaatataatcttgacaactgaagcagttattactacaaagctaagaatgttgcaattacagaatgttctcgtgactagtgaacatggctgaagaagcaaattgagctcaaggtgcccttttctgagttactgagtggaaagggtgctaccactgctggagctgcaggaccagcttcttaaagatcatccaattcactgcattctcttctctctcctcccagaatccagcaatcagtcataagatatatttgttggctctcctgctaagaagcgaatgtgctgactagctagcatgagtttgattcaataaaacagcactacactccattagtcagactatctaatgataacagtgctcatacattaggtacccacgtgcctttttgttgctcttcacaatactcctatgaagtactaccttgtatttgacagaagatagcaaagtatcagagaagggaactgacctgtctagagtcacactagtgaaagcaagtgatacaggatttaaattcagaggttccattttccaaactcatgtcctttccattgcattgtactccctctttagctagaagtcaggttagcaccaatctgccgggaccttctcaccccgaaggtgcatgataaaatcaaatatgagaaccgacaaggccaaggaccaggtcactctgccaaaagtgcctaaaacagcctttcagcttcatccatcagcagacagccacaaaaccactcccaactgcagcaggctggtctccggtcaccactgtcttatcttgtcggaaaacatcctctctccatgtgccaaaaagttgagtgggaaaataattccatcctttcagagctaaacactgtgctgagtctcatcgcacacgggtgggcaaagaaagttgacatttactgctcacccactctgtgccttgacctgtgcaagatgctttatgctagaactcatttaattctcaagaacaacctcattttacagataaggatacagaggctctaagagttaaatttacccaagaggacatggtaagtaagtgccagtgcagggaacaaattcaggtcccactctaaaatctgtctctttccagatctcaaggcacaccactgagttgcctttcacctttctcccaagatgaggattgctctggcatgacttcacctttctcttctgaagcaattccaagttcacttctctgcccactgacagttcactctcctttccctgccactgtcccttctgcaaacgcacaatcttttacccaacctaacgcccccagcctcgtagaataacactgcgcagttggtttacagtcacaaagcactttcaagacagtgtttcgtctcctggtcaccacagtccggtgaagccggcaaagcagataaaagcatccccattttacaagaaagccatcttcccaaggtcgcggaataaaaagcaggtgaaatcggaagcagaaccccaggtcttgacccctggtcctcggctcatcccactgctccgcacagccgcccacgatccagcctccacctccgcgatgtcacaagatgctccctgggccagcagctcacatcccccacccccatcccacaaccacccacctgcagcggccctgcaggccccgccgacccttcccccacggtccctctctcttcaccagcccctcccactagggcctccttcccccgctagatccctccgctcaggcgccccctcccgcacaggctgccggcgagcccagcctcggcctcccacagaccctcgtcccgcctccacgcttcgtcaccccagcccctcctcctgtcagcccgcggcccagcccgccgacgttaccttctccaaggatgctggtctctgcaccgccagggagcgggccagtgacaggaccgtgttgaaatagaagccccgcgaggcgctggagccggagccggagcagccgccgccgcctccgcctccgcctccgcctccccgggccggggccgccgccatcacctcacgagccgcggcgctgcccgccggctccccgctcctggcccgcgagcgcccgacctcagggcgcaggcgtaggtgcatccggctttcccgccacgtgacctctcagttgctgacactagatagggcgtggctgcggggcgggcccaccgctgcaggggagagaggggatggacagtaggctgcggttgcgcgcgccggatgtgggccccccccagccgacctgcgcgatggtcggctccgagggcggggccacctgcgcgcgacgcgcggaaggagttcgcgcgacgaccgcggggtcggcgggcggggcgaggccctggacggcggcggcagtggggctcctccttctgtttcccagaccgagagccgcgccggcaccatgtcagcttaccctaaaagctacaatccgttcgacgacgacggggaggacgaaggcgcccggccggccccttggagggacgcccgagacctccccgacgggcccgacgcgcccgcggacaggcagcagtacttgcggcaggaggtcctccgcagggctgaggccacggccgccagcaccagcaggtccctggccctcatgtacgagtccgagaaggttggggtcgcctcttccgaggtgagcctggggcagggctggtgtggactcgccggtctctgtgctgtcaaacggagacgagaaatgttttgctcacaatcttttgagaattctcaagttgcctagcatagattcttgcaccttagtgactcgatggtggtaacaatctgttaactatgtaaaggtatgtgcatctggagtacttgaagagggcagtttaccccagaaatcttccttagctattagtctgcttcgttgattttttttttcttacgcctagctcacggggaaacgccagattattttctgtccaggtgagtaaaaattctgaacagcaggtcctaggtttgggaaatggagagtccgtttcttcgacattatttcctgtgcaaaatctggcacagggttttggccattccttccggagtgagccagaaagagaggactatgtgcctgcgagtgtcaggtgataccctgaagcatcagggcaggtggtccacgagttcttcccgcatcattgacatctccacctaaccaaccaatagaggtattgaagtcccttcagcccagacagctgcctagttgaccaaagcctgggtttgattgagtccagggtcttacctttacttcccaaatcctagacaaatagtgtgcgggttaagagtttgttgctccaactcatcttcatcagttcttcccatccttagatttcagagagtagtaccttcaataacaattattctggccgagcgcagtgactcacgcctg

SEQ ID NO: 9345 - DNA, 6000 bp, Homo sapiens
actcctgagatcaagcgatctgccccgccttggcctcccaagtgctgagattataggcatgagccaccgtgtcaagcctgtttgcccattttcttttccttattggtatgtgggtattctatatacattctgaatactaatactgtgttggtcatatgttgtagttaccttcttctacttggtagctttaggtttcaactttttaaaaaatgcgtatttttttatttaaaaaatcgagatgtggtctcactatgttgtcagggctggtctcgaactcttgaactcaagtgatcctcccacttcggcctcccaaagtgctaggatcgcaggctggagccaccacacctggccaggtttcaccttttcatggcgtcttttgtttgtttatttgagacagggtcttactctgttgccccagttggagtgcagtgctgtgatcaccgattactgcagcctcaacttccctggctcaggtaatcctccctgagcctcagtctcctgggtagctgggaccacaggctcaagccatcatgcccggctaattttttgtaatttttgtagagacggggttttgccatgctgcccgggctgttctcaaactcctgggctcaagcaatccacccaccgtggcctcccaaggtacttggattacaggcgtaaaccactgtgcctggcccattaatggtgtcttttaacacacagatttttaattttaataaggttaaatcctcataagaaatctgcgtggtttatccttgtttaacccggggttataaaagtattatatatttcctttttatttttattttttgagatggagtttcactctgtcatctaggctggagtacagtggcgcaatcttggctcactgcaacctctgtctcctgggttcaggtgactctcctgcctcagcctcctgagtagctgggattacaggtgcccgccaccacacccagctaatttttgtatttttagtagagacggggtttcgccatgttggccaggctggtctggaactcctgacctcaggtgatccacctgccttggcctcccaaagtgctcggattacaggcattagccacctcgcccggcctttacatttttttttatagagatgggggtctgcccatgttgcccaggctggtcttgaacttatgcgctcaagtgatcctcctgcctcagtctcccaaagtgctgggattacaggtgggagctactgcgtccagcctaaaatgtttgaagttaggtttttgcattaggtttgtgtgtacctggaatgacttttgtatatgaagtgagacagaggtccacactttttccccatatcatcaactgtcctagcgccatttattagcccgtcacttcccacttatttattattattattttttgagacggagtctctctgtcgcccagacgggagtgcagtggcacgaccttggctcactgcaagctccgcctcccgggttcacgccattctctcgcctcagcctcccgagtagctgggactacaggagcgtgccgccacgcccggctaattttttgtatttttaatagagacagggtttcaccgtgttagccaggatggtctcgatctcctgacctcgtgatctgcctgcctcggcctcccaaagtgctgggattacaggcgtgagccaccgcacccggccacttcccacttatttcttaagggggaaaaggcaatggttgttttgaaaaaaaattaacctgctctccctctccctctccctctccctctccctctccctccccctccccctccctctccctctccctctccctctccctccacggtctccctctgatgccgagccaaggctggacggtactgctgccatctcggctcactgcaacctccctgcctgattctcctgcctcagcctgccgagtgcctgcgattgcaggcgcgcaccgccacgcctgactggttttcgttttttttttggtggagacggggtttcgctgtgttggccgggctggtctccagctcctagccgcgagtgatccgccagcctcggcctcccgaggtgccgggattgcagatggagtctcgttcactcagtgctcaatggtgcccaggctggagtgcagtggcgtgatctcggctcgctgcaaccacctcccagccgcctgccttggcctcccggagagccgagattgcagcctctgcccggccgccaccccgtatgggaagtgaggagcgtctctgcttggccacccatcgtctgggatgtgaggagcccctctgcctggctgcccagtctggaaagtgaggagcgtctctgcccggccgccatcccatctgggaagcgaggagcgcctcttccccgccgccatcccatctaggaagtgaggagcgtctctgcccggccgcccatcgtctgagatgtggggagcacctctgccccgccgccctgtctgggatgtgaggagcgcctctgctgggccgcagccctgtctgggaggtggggagcgtctctgcccggctgctccgtctgagaagtgaggaaaccctctgcctggcaaccgccccgtctgagaagtgaggagcccctccgtccggcaaccaccccgtctgggaagtgaggagcgtctccgcccagcagccaccccgtccgggagggaggtggggggggtcagccccccgcccggccagccgccccgtcctggaggtgaggggctcctctgcccggccgcccctactgggaagtgaggagcccctctgcccggccagacgccccgtccaggagggaggtgggggggtcagccccccgcccggccagccgcccagtccgggagggaggtggggggtcagccccccgcccggccagccgccccgtctgggagggaggtggggggatcagccccccgcctggccagccgccccatccgggaggtgaggggcgcctctgcccggccgcccctactgggaagtgaggagcccctctgcccggccagccgccccgcccgggagggaggtgggggggtcatccccccacctggccagccgccccatccgggagggaggtgggggggtcagccccctgcccggccagccgccccgtccgggaggggggagggggggtcagccccctgcccggccagccgccccgtccgggagggaggtggggggggtcagccccccgcctggccagccgccccgtccgggagggaggtggggggatcagccccccgcctggccagtcgccccgtccgggaggtgaggggcgcctctgcccggccgcccctactggaaagtgaggagcccctctgcccggccagccgccccgtccgggagggaggcggggtgggggggggggggtcggccagccgccccgtccgggagggaggtggggggggtcagccccccttccggccggccgccccgtccgggaggtgaggggcgcctctgcccggccgcccctactgggaagtgaggacccctctgcccggccagccgccccgtccgggagggaggtgggggggacagccccccgcccagccagccgccctatccaggaggtgaggggcgcctctgcccggccgtccctactgggaagtgaggagcccctctgcctggccagccgccccgtccgggagggtggtgggggggtcagccccccgcccggccagccgccccatccgggaggtgaggggcgcttctgcccggccgcccctactgggaagtgaggagcccctctgcccggccacgaccccgtctgggaggtgtgcccagcggctcattggggatgggccatgatgacaatggcggttttgtggaatagaaaggcgggaagggtggggaaaaaattgagaaatcggatggttgccgggtctctgtggatagaagtagacatgggagacttttcattttgttctgtactaagaaaaattcttctgccttgggatcctgttgatctgtgaccttatccccaaccctgtgctctctgaaacatgtgctgtgtccactcagggttaaatggattaagggcggtgcaagatgtgctttgttaaacagatgcttgaaggcagcatgctcgttaagagtcatcaccactccctaatcttaagtacccagggacacaaacactgcggaaggccaaggccgcagggtcctctgcctaggaaaaccagagacctttgttcacttgtttatctgctgaccttccctccactattgtcctatgaccctgccaaatccccctctgcgagaaacacccaagaatgatcaataaaaaaaaaataaataaattaaaaaaaaaaaagaaaaaaattaacctatcaaaataaaatatcagcagttgaaactaacaatgtattaataacaataatattatgaccaagttgcgtctaccccaagaattcaagaatggtttaccattagaaagtttattgatgtaactgatctcattaacagattaaaggagaatacccatatgatcatcttaatagatgcacgaaaagcatgcaataaaatacctatttattataactgctaatattttgtgtttttccttaaaaatgcagtgtttttaggaattaaagttcagagcagcaaaagtcaaacaaaaaccaagtctgagcaatagagctactacagtgcccatcacagtgtctgctcaggtgacttcttaaggtcatgtccagctctatgtttctgtgaccacaaatagcatctttggcaagtctagtttcagttggtctttgtccagctcctggattcctccatgcagggcctgagaagccctgagggataaaagattaatccggttcagtggactctgtggttcctcaactccaagtgcccccagcataagtcggacctgcctctcacgcaatggatcccctggcggcaacccgagaccggttctcctacccgcattccgccaagtctctcgctctgcccaggacgcacagatgagagcgctccgaagactggtgggtctatctttcggtctttcctaattttcccgtcctctggggaaaggtcggggatacctgaaccaaagtgtgtgtgtgtgggggggggggggtgtaggtggggcgtgcatagatgtgcacaaccaagggcttggccctccggagaacgcccaggggcagtggcctccgaggttctggcggccggcagtggcgaccggcgcagggaatcgcgcagggttgcggctgaggtcagaccagcgagagacagagacccgcagacatttagtccagagactgtagcaaaggagggggacgaggggccagagccggaatttcgggggaggacttgggagcgcggcgaccagagtcgcttgctggcacttgcgagggcgaatgcaggggcttggccgagatgaccttggaccagagctcccttccggcctgcagagatgagcttggggcttagccgagtaaggagtgagcggcttttcagcctcagtgctgcggcagaggcggatggaggatgaactggagccgtccttacggcctcggacgcaggtgagctcccagcggcggcgacaaaccccgcggcggtgaccccaaaccccccccccgcggcggcgactcccccccaacacgctggggcgaactccccagcacccccagcccttcttaaaaacgctgagtccgcgcatgcgcctcaggcgccctccgcgacactctagcggctctgcgcttcactgcgcctgagcttgagtctcaggccttagtcccggccatcgtttagcgttgcgcgaaccctcagctggtgcggccgctctcaatacccactgcgcttgcgctacagcttcgtctcgacgggtttgctcctctcaaacgctcactgcgcgtgcgctagcgcctctttcaccactgggcgctgcgcgctgcccttccctccgcgcacaggctgccggctcaccgcttgctaatggcagccggggtctccctgggacagcaagacctccgctcaggcccctctttcgaatgctccacgccctcctgcgatctagaatggta

SEQ ID NO: 9346 - DNA, 6000 bp, Homo sapiens
cttgaggtcaggagttggagaccagcctggccaacatggtgaaactccatctctactaaaagtacaaaataagctgggtgtggtggcaggagcctgtaatcccagctacttgggaggctgaggcaggagaatcatcggttgaacccgaggggtgcaagttgcagtgagccaagatcacacctctgcactctagcatgggcaacagagcgagactgagactccgtctcaaaaaaaaaaaaaaaaaaaaagataaaggctacaaataaacagtcagatgaagagatacatagggtaaagactggaagactcctaagtacagaagtttctgtcctggtagagctggacacatggatgagttggttttttttgttgttgcccaggctggagtacagtggcactatctcagctcactgcagcctctgcctcccgtgctcaagtgatcctcccccctcagcctcccaagtagctgggaccacaggcatgtgccactatgcccagctaacttttttatttttgtagagatggggtctctctattttgcccaggctggtcgtgaactcctgggctcaagccatccacccacctcgccctcccaaagcgctgggattataggcatgagccactgcacctggccatggatgagttcttgttccccttcctgtcagcctccacatgaaactccccaaaccctgtcctcttgggccttttttaaaaaaattaattaagaaattaaagacagggtctctctatgtttcccaggctgctcttgaactcctagtctcaagtgatccacccacctcgtcctcccatagtgctgggattacaagattagagatgccagctgtcaggtggctaggtggattcagtgtaaagtcctagaagatgcattttagtaaaaacagctagccacctgacagctggcatccatccattcagtgaagattgttgggcactgtggatactgtggaggaggcagcagtcgcagccggcctgcagagtgagatgcagtgccagagggcttcaggaggaggtggcattgtgattgatgtctgaagagtgtctccatgataatggagtcagtgcaaagtcccaaagactgggaaggagcaagaggaaaggatagctcatatccagctgccccactccaaaaaaaaaaaaaaaaagaggaaaggacgggcaccagcaaggtaggacaaggggggcctctggagtgttttcttctcagttggggaggggtgtgctcagatttgcatgccaagtgcctgggctgcagtagggaaacagcagaggggctgggacctgtgattgggagtctccaggtgagagggttggcctatggggactggaggtcaggtgaggctggtagtgggttatagaggtgggagcagctggacaggcccagtgaggatgcaggggtagctgcccagggctagactctggctgctctggtggcagttgcttagctcaggcttgggcacgtccacctggcgcatctgaaacattagccagcagggcgcagactcgtcagtgagagcattcctgagcccagcatccaagaagcgagggaggtcgggaaggtgctgctatgaggcagggggaggtccccaaaagtccaggtgagagcatggcatgcgtggaaagtgctgcgcagttttggcatcagtgaagtcacagggggctgtgggtgaacaggtgtgcttgggcatgtcaccagggaggccttgagacaggagcgggttggctttcctggagatcaggctgtggcatggtgtcgggactggggcatggacagtcttcctccacccccatcccctccttggagctttcagacactgcagataattaccaggtgatgtgataaatactacctgtggagggtgccttgggcagggaggacagggcggccaggaggggggccctttgggcccctgctctgagctgctcatcaggaaaggggagaagctcctacaggcctggtgttggagcctagccagaccctgtgaggccttgaaagtaggaggtgcattgtctgtgcattgtcatctcaaggaatccacccagcaactgttctagttatccctgctctctaggtaggagactgaggctaggaagggaaaggctgctgtgatacccacactatcagtggctggggttgagtttaaacccagggactctagggcccatgcctctgccatcctgcctctgagttttggagctggacttgttccatcaagtgccaggccagccctgctgctgggtgctcccaggcattcacaagctgacaattctgaagggcccacgcacttggccatgcttcagtctgtgtcctgacatcacaggtgggtgctggaataacaaatgctacaaatggcactgggggtgttggccaggctctgggggcacaggagttctgcccatgcccacagctggcctgtgctgacctccctccatcacagctgagtagcaccagcacttccattgagctgaagtcttcctcccattccttcagtgtggtctttgtggctcagagaggctgtggccaggtacaggatctggagtggcccctgcttctctgctctgtgaccttagacagtgggcaggatctgaggccaggcccacctgcagcaggtgttacaaagaggcaaattggcgcttaatgttggtaagaacttgccagccaaccagagtcccactatctttggaggtagtgagctccccattggggaaggtatgtaagccaacctttctgggatgctggaagatcagagagcaaacacttgagattctgtgatcctaatattgaatccaatgctatgatgtttggatttgaagtcagttctatttagccagtttaccaagtgtctccttggtgcaggacaccaggagacacaaaatgtcctggataatattgggtttctggctcccaggggtccctgagatgttgttccagcggttctggagtatgggccaggcaccgcttgcatctggaccgatccgcattgttcgatcattgtgagcctcatgatggcagttcgggatgtcatgcccccatgcgccccccaaccccaccccgccatggccctcaccatggcccactcagggcatgaggctttctgggtgattgctggtattcagtgttgtcagcttcttggacctgtcagtgggggtggggctgcaatgagatgccagttgcaggaagtggtttgcacagccttcctggtgtcatgggtcactctcttgccgagtggctttgggcaggtcccttcccctctcaggctgcaggttcctatgccaggagctcccttcttgccccaccagggccttgttttcccagatacagaggtggggcagatcccagcccgttgaaacagactgggctttggaggccacagtgggcccatttctcagagggactgtgtggctggatgctgagccaggcactggactggccctttgagcctcctgtctggccaaggcccctgaggcactgtgggctgctggtgccagcacacaagggtgataaggagatgaaagtcactaggatggtggggcggcacccgccccgggctgtgttggcagctgcccctggctggaggccagcttggccctggaaccctcctcaaggaacaaggacacaaaagagccagctcagccagcctctacctagcaccccaatcagcactcccttcttcccatgacccctaccctctgcccagctcctgtaactggccaaggagctaatggacacccaccagggtcttaatgagtgagccagggttaatgggttactgggcccggtgacacattcaccagcctcccagggctctcaaagtccacactggcctggccttgaacgtcttagctcggccacctccttttccagctttgacacctcggggctcaggacgggcctagggtggtcaagaggtcccctgcagccctcacttcctggaaaaggctccatttcctggccttcaggctcaggtggttccttccgcctggcaggtcctccccaaatccaatcccagctcgggctggattcccaaggcccctattctggtgtctgccccttccctagggctcttccccctggggtgaccatactctcatgcccagccaggtcagggctccttgagagaagaatctggaggggccaggatttgatgggagaatgaatgatggaatgaaagaaggaacgtaagcgtgagccttgctaagagtgacaatactggcaggctgcagaccatgtgtggacctcgatctgagggcttagaggcttcggcctgccagcgctgtgggggcacccaccccatctcattgaatggggcagagcaggtgagggcatgagatggacagatgggcctcatccccctgcttccgttgcctggggtcctcggtcagcctgtttgctcagacccctgaaattgggggtcaaggaaggaccctcctggattatgtgactcccttcagtccaggtgaccagggtccttggagtgacagctcctagagccccacctgtagtcctgcaagctggggagagggcctgttaggagaggcatcccctgccctggggttgtagaggtgaactaggctcctcagaccttgtggggcctcagatgcttacatctccagcccctcctggcgtgggcatctggctgcagcccagctctgtggccccatctcccagggaacctttggtctaatctgcctcccgctgaaacccagcctcattcagccccaccgaggctttcagagttcaggtctctcattcagggtttgagaccccaccgggctcagagacacctgcagcctgcagcggtcccagatcacagcctcagggatgggaccaggagccagcccacatcccacctgcagcagttcctgtgcctttaaagcctcccctccccccgccccgcccccaggccactaggggagggaaggaggagctgggtcacagcagggaatcttagcttggttttggtgtgctgctggatgaccagaccgggcgtcgggtgagcccagaagtgagagcagttggctgtgccccagtgctgtgtgacccagaggcgccgctcaccctctctgagctggtggacatcataggtggggaagctcaggtcagggcactcccatgagtgtctggaggcctgagtcccattctcagctctgccatatgcttgctgcgctctagaggagttcctcttcctctccaagcctcggtttatgtacccgtgcagtgggagtgagttgcacttcggggtgaagggggcaagacttgtgtgggcgcatcctgcagaaggatcccacaggtgggcagagccctgggttctttatccgactgggtctgggctgggggcctctgtttcttggctgatgagtttatgtgagtttgagtgaggtatgcgagtgggtgaaggagggctggggggagtcacctgacttgtgcgaagaagctcttgagagagccgtggcttcttggaattaagaggaaagagtgcagcatgaacagacaggccctggaggatctggcagccctgagtgggggcggggggtcagctctggagtagagccagagctgtgatggggttgggggaccctgtgtccttgggccatgcttgcctcgctcctgggttctgtttgtggctgtggattggggtggggcagggccggttgtgcgaggggtcattgcccaactccagggggcgcctgccacctctcagctatatatatagggatatatatagttctttcgacaggtttccagcaggtagtggttattaaatcttactgaaggggtgttttttctgattctcggctctgtgccgcaagggtggaaactgtgagagacagattccaactccacgtctgggtagtaagcatccagtccagggctgtaggcagtcctggggaagacgccagagatctgtgcattctcatatcgagggatagcgactccaggctgggggctggcagggtaaggggtgggtgggtcctgggctt

SEQ ID NO: 9347 - DNA, 6000 bp, Homo sapiens
acaaaagatttttctctttttttctctcagtgattaaaatctttccatcaaccaggtgttcctaagggggatacatgatgcaaggtctggcagggtgggggtgtgaataaatgtgcattgatggagaaagtagtcactgagcataggctgtctgatgacctcaaaatcaagcccctgattaatcataatctgagtagacaaagaaatgggatcacagacacatgacgacaatgacttccattaattgcaatgatgctgttttagcctcaggaccttgcacttgctgtgttctccaccaggaatgtgctgcaatctgcgcttggtgtctgtctcatcattcctttctctacttaaatgtctcctattctaggaacccatccctgatcattcaaaaagaatttgcctcttttactctcaaatcaccttgctttatcttcctcatagaattaaagctctctgaaattcctatttattaatgactttatggtctatttctcatctgtacaaaataagctctagagagcaagaactttgtcttgttcactgtgtattatcagtgcccagaacagtgcctgacatatgcactatcctaagtgctttataatgattgtgtcattgattgctaaatgatagccttttgttgaaatgattactggaaggttaattcagttgttcaaaatcacaccactgctagttagtggcagataaaccatttaaattgaggcttgttgggtttgaaggtccaggcttttaactgctctgctaaactgcctcccctggcatacagcattaattttggaagtggtttgggcccttgtgttgccagacttcactagactgtcagccctggagagccagagacagagtctgttgcatccacagcactcagcactgcttgccacgtggtagccattcaataaatagtaaatgctcaaacagtatttgtagatagatggacagatgggtgagtgggtgggtggttgagtggatggatgggtagatgaatggatgaatggaagggaggagggaaggaagaaaagaagacagaaagggaggaaagaaggaagggtaggtagagggatagataaattgctggatggatgcatggactagtaaatacatggacaaataggtgggtgtgtagataggtgggtagatgaataaggaaacagagtcccagagagactggtgactcacttaatatcacacagcattagcctttagtccatcagttcatgggatcttctctataaccctaggaaataagtgccataatatcccctcatccacgaggatattattatccatttatgtcaatcactccatgtgataagtgttatttttatccctacttctcagaagaggaaaataaagctcagagaggttaagtaacttgcccttgtcatcctataaggaagaggcaaggctaggatataaccctttgtcaccactgtactaattttaaccgcataagagctgatgctctgtttatcacatggcaaaatataaggtgaatagaattgtaggcacacatcatctaatcagcagagaagctaaaattatctccccaggtggcattgggtaggaggaagctcaccctgacaccagaatctaggcaggatgtgccctattagacagaccacaacatcactgccatggaaacagtaaaaggtaaaaggtaaaccaagtgtgtgatatcgagcaagttactttgcctccctggccctcagtttcctcatctgtaaaatggctatcaaaattgtgattgcagattttcatctgcaaactgttctagtccctttcagaattctatttctattatgctatttcttcttccaaaaatagtcttgatactgctcctaaataatcactttatgttcccaacatcacaatctcagataatcaggtctgtgtctcatttcctcaagacttttctctgtgccttgttttagccagcaaatggaatgagtaaatcacggtccatatgttcaatgggttaatggtttacagtgtcacttcttccacataagacacctgcatgcaagcaatgatctagaagttcaatgtacttaccaaagtgagtaaccccattgatggacttttagtgatgtggtccttctggtagtgatgagaggttgaagcttcagcaggtagcaaccaaatcatagcacagaggcagccaccaaatttctgggaagtaggctgtgaaggtgaaatgggttctggctctgtagtcagggctgcccttgaatctgccaaatcccaccgcttcctgactgagtgaccttggctgggttgggaccccccataaaaaatcagatacttatctttcagatggcaataaccacacctcgttttcaggaagattatgaaattgaaatgagagaccatgctcggtgtgggacagcacctggcaaacagtggattctttacacaatagtttccttctcagttgggttgtttggtttttttcctgtaaatttgtttaagttccttatagatgctggatattagacttttgcagatgcatagtttgtaaaatttttctcccattctgtaggttgtctgacattactgggtatatacccaaaggaatataaattgttctattataaagacacatgcccatgtatgttcattgcagcactattcacaagagcaaagacatggaatcaacctaaatgctcatcaatgaatgagcatatatacggtacatatacaccatggaatactatgcagtcataaaaaagaatgagatcatgttctttgcaaaaacatgaatggagctggagaccattatccttagcacactaatgcaggaacagaaaaccaaatatcacaagttctcacttataggtgggagctaaatgatgagagcacacagacacatagaggggaacaacacacacagaggcctaccagagggtggaaggcaggaggagggagaggatcagaaaaaaattactattgagtaccaggcttaatacctggttggtgaaatcatctgtacaacaaactcccatgacacaagtttgcacacataacaaacctgcacaagtacccctgaacctaggaattaaaaatagtttccttgcctccaagtatggagctaaactacctcttcgtttttctctcgctcgctttcttccctttcccctcctcctccatcttccttgcttctttaggtttccattgaacaagtctcactgagcacccgctgcatgcctgcattatactatacagagcctgagcgtatagccacaaacaggcaaggtcattccacagagagctggcagcctcatacagtaaagcatggagtgcttcatcttctccaaaggagaaatcagcactcctgcatccctgcctcagccaccttctttataaaagccagttgggtttactgccaggaatggaaacctcttgcagctgaagataggattttatgggggggctctctgtcccccaaagcctgaggcaggtctgggcctatagtcagtggcctgtaaaagagcattgtttgagtgagtaaatggggaagctctgggtgtggagcgtcttctgaaaccctgggccagagtgcttctccttccctcctccatccagtgttcacctcccccacccattctttctagggactcccggctccaccacgctgctaaagacatattcctccccctgttgctgcctgcaaccttctctccatctgctccctctgcctgttcaggctgcagtgtgtagatagtatggcaaggtagggtagggggaggaggacagcttctaaattgggtgagaggcctgtaaagcctgaccggtctgccaaggctacgcagggagagacagtcagtctccaggactgtgcataagcttgtccccacctagctctctgccaatgtctgtccccaagtatctgtttatctccctcattgattgtccctcactacctctatttgtggagaaaagactttgcttgagaatcaggcctgggcaagaatgctgcagaggtgggccttgtagtcctgctcagatagggaagcgggtacaggaagaggcaagcggctgacctgagaggaagcctcgcagcgctagtgccctgccggcagtggggttatgggagacagggctcagattaaaaagtggaggtggatcttaatttagagttcgtgattgggcttcagaggggtccagaccccctcgtgttagatgcacgattttgtggctatgtgtagtgttctagtagattcacagctgtcaccagatccacagagttacagactttctaggttatggggactcactttggaagcagtgaggccctggcggggaagcaggctggctggatcccagagggctctggaaagaactggaactgggatgtatctggaaggctgggcaggcaatggaaagctccgggctgctcataagctcggtttccagggctccatctcaccgtctggaaaatggtccgggtgctctccagcctggcctggccaggcagagctgctgggagcgtcagcagggagagaaaacgctcggctcccaggacgcaaggggaattggcgttaaactttgcagggccgacgggccggcggccagaggaggcggctggcacccccggcgccgccgcggcccctccagctcactgcccgctcgcccgccccctccctccctgcactcgctcggcacagactcggccccagccccctccctcctcccgctcgctccacgctcgttcgctcgctcgccggctcctcctcactcgcccgcccgcgcccggcgcagctcggccagagcgaccgcggggctgagcgcgcgtccgcccagggggctccggaagctgccccggcccgcggcctcctccctcgctcccgcttcccctttctcgctcaccgccgccctccttccccagctccctcgccgtccgcccgccccacagccagcggctccgcgccccctgcagccacgatgcccgcggcccggccgcccgccgcgggactccgcgggatctcgctgttcctcgctctgctcctggggagcccggcggcagcgctggagcgaggtaagcgccccgaggggcggggcgggcagggggcaaagttgccgggagagcggggcagccaggggtcggggctgaccagggcgactcaggcaccacccgccgggatgggaagcggtggtggctgtccaaaatcggggctaggaaccgcacgtccccttggcccgggctgatgggagtgtggaggcggggatgtgttgaaggactcgggcgcttccctgcttcggctgcgggctccctttcggtcttccccggctgcggggctgattctcctttgcagccaaagaggttctccttggagtggggtcgcctccaaaccccaaattcccggcgcttctctgcaaccgcacccggggctaggtgccagataattatcttcctctccgggagaggacaggaaggggggtgagaagctgacccaccctgcaactgaggactagactcaaacagtgcatttgccgctccccccgacaccacagaaacccttgactcctttggttcaggctaccccgagggtctgtgttcctggatcgatctcagccaagcgtcaggataccggacttgggtgtggctttcgctagaggccggtggagggggctgagggctctgagaacttggtaggggagggagaagagatgttagttagcagttgggaacctgaacgggctcccctctactctctcccctactgcctagcatctctgatcactgttaggaatggggggtgaggggtgttagtttcatctaccacgtgtttgttgaaggggaagaggggcccaaatttagcagagaatgacagctcctctttctcagacctggaaccataccctctctccaccccggtaaggtaccccaggaaaagttatgggtgggggagagggccagatagagagaggggtgcaacgcctaactcacccaaagctaaccctcagagcttcgggggtttt

SEQ ID NO: 9348 - DNA, 6000 bp, Homo sapiens
caggctggtctcaaactcctggactcaggtgatccacccaccttggactcccaaagtgctatagcgtgcaccaccacacctgtagtgtgagctaccgtgcccggcctaaaattttcttatattcccagttttctaggagttttaatcataaatggatgtttgacttctgtcaaatgctttttctgcatctgttgagatcatggtgtcattcttctcctttactttgttaacagaatgaattctattaaaatactttctgatgttgaacaattctacattcttgaaaaataatatttaatgtgaataaaatttttcttttatttaaatttttttgagacaagctctcattatgttgtccagggtggtcttgaaatcctggtctcaaataatcctcccacctcagcctcccaagtagctgagattacaggtgtgagccaccatgcccggctttaaaaaccattttaatatcacaaataacatactaatacttatttgttaaaagtgaaacttactttttaaaagttaaaagttaagctatttccaaatatttgcaaatgcaaagcgtattcctgaaaagatgaataagaaatttgttataatggctgtcttcactaaagaaaaccaactggttgagggataggagagtgacgcggtcccagtaactttctgcatgttgttccggagtatttaaacacctttgaaaatattaaattaaaacatcacaaaaaatgctggagtttcccttgcctactgctcccaattccttgttccttcttggtcccccctgaagttacaactcttaggaatttggtgtgcttcctctgagggatattatctgcatttacaaacgtaattattttgcattttatataggagaacatactagtgtgttcttctagtgctttccctgcttttatataaatacatgtgtatacccacatgtgtacaggtgcgtgttatgtagataaaatcatactacaatcataattctgctttttttttaattttcaccctattatttttctaggagctttatccacgttgctatatatacatctagctcctgcttttagtagcttcacagtattacgtaatatgaaaaaacaactagtcttccatctatcccagaatccctctaggttagatatagcatagcgaaattgttggtttcagtgtatacatatttgttgttgttttaaggaatactaccaaactgctctccaaagtgatcataccagtttctttaatgcaccaagcaagcacatctccctccctccctcccttctttctttccttccttcctttcctccttccctctctccctccctccctctctctttctttctttcttctttcagagagttttgctctgttacccaggctggaatgcagtagtgcaatctcagctcactgcaacctctgcctcctgggttcaagcaattctcctgcctcagcctccagagtagctgggactacaggcgtgcaccaccacacctgtagttaattaatacaaaaattaatacaaaactttttgtacttttagtagagacagggtttcaacatgttgatcaggatggtctaggacttctgacttcaggtgatccactggcctcggcctcccaaagtgctgggattacagatgtgagccaccacggctggccgcaagcacattttccactgacttgctgcaaccttgattgagcaaggcatgttttctctctgggcttccatctgtaggaggagggagttgagtggaccccgtgagtgtatgagacggtgtaatgataggttgtgtagtctcggagtgggtaggatgactgcgctaaagaaggcagcgagagcaggaggatgcaggtggcagccaagctgaaggcaggcaattcagatgcccttggtcctcctctccgcctctccatgagcacagtaacaatttatctggagctctcacccaaaatccccctctgaaaggcatggatatccttttctgcagaattcacctagtagggtctccaaggggttgacagaggcccaggtcatttccatttattgagactcccagctaattaaaaagatgaagaaatggtaagcagggctaacaaaattgcgtgtatagtaatattgccattgaacaaataaatactaacaaatgcagagcagtggtctacagatatcatataattgcactggtcaaggacacttataggattgatagacaatattaattcataatacagtacagataagatggtgcaggaatggaacacatatttacaatataaaaatatcttttttttttcaaacctgccaggataatgctgtgatagaatgtatgactgcctttggagaattctaagtttgagcaactttctgaatgtgagatgagtcaaataccccccactccattttctccaccccacccaggctcaaccactcttaggctgacagtgaagacagacatcccatttaatgtttctaaatctgatgcctgtgttgattatccacactttgagcaaatctgtgcatattatggtttcccaatgcaagtgttttggtttattttagtagaataaaagagaaaaaacattcttcctcttttggagttgagaaaaggagagaaatgacagagatgaagaagagtctaagacatggaagaggtgtattctgggacatgggagaggtgtactctgggacatggaagaagtgggttctgggacatgacaaactgggttctggaacagggaggaggtggattttaggctatcacagtagaggcagattcttaggtcagggaccaggtggattttgggacagagatgagaggtgggttctgggacatggtggaggtgggctctgggacagggaggaggtacattctggaacagggtgaaggtggcttctggaacagggaggaggtgggtactgggacagggtggaggtgggtcttggaacagggaggaggtgagttctggaacagggtggaagtgagttctggaacagagagggggtgggtcctggaacagggaggaggtgggttctggcacagggtggaggtgggtcctgggacagggaggaggtgggtcctgggacagggaggaggtgagttctggaacagggtggaggtgagttctggaacagagagggggtgggtcctggaacagggaggaggtgggttctggcacagggtggaggtgggtcctgggacagggaggaggtgggtcctgggacagggaggaggtgagttctggaacagggtggaggtgagttctggaacagagagggggtgggtcctggaacagggaggaggtgggttctggcacagggtggaggtgggtcctgggacagggaggaggtgggtcctgggacagggaggaagtgcgttctggaagagggaggaggtgcgttctggaagagggaggaggtgggttctggaagagggaggaggtgggttctagaagagagaggaggtgggttctgtagcaggaaggaggtaggttctggcacagggtgaaggtgggtcctgggacagggagtaggtgggttctggaacaggaaggaggtatgttctggaacagggtgaaggtggcttctggaatagggaggaggtgggctctgggacagggtggaggtgggtcctgggacagggaggaggtgggtcctgggacagggtggaagtgggtcctgggacagaaagaaggtaggttctggaagagggaggaggtgggctctggaagagggaggaggtgggttctggaagagggaggaggtgggttctgtaacaggaaggaggtgagttctggcacagggtggaggtgggtcctgggacagggagggaggtgggttctggaacaggaaggaggtacgttctggaacagggtgaaggtggcttctggaatagggatgagaaatggattctgggacagacatgaggtggcttctgggccatgttagagataaattctgggacacaagagaggtgggtctgggacagagacagatggattgtgggcgggccatcctactctatgctcccagaacccacccatgcagtttccctggcgcccctaacacatcccgtagccactgttagtctcccccaggtcttagctcaaacgtcacctcctccaagcagcctccttggggcctccattcgcagctcatcagtcccctggtcagacaaccgtcctgcctgtacttcccctcctaaaccctacccgggggtgagggtcccctcccgctagacggtggctcactgagggcagggcgggcctgagcgctcaccgcgcacgctcagcgcagctggcagggacggggacccaggctggcccatcattactgtactgagcgaatgagttttccatgagactaagaatctggtttgatttgcggttccattccaagtgcctgagggcctcagaagtccgtgttgagtccatcaataaaggaaagaaggcgttagggcgagaggaagtgaggtgggggggaagtgaaagagaatgaaaaggaggaaatggagacgagggcgactcagagaggaacagagagacagagggagggagaactgagaaagacacagagcgaaaaacgaaagagcgaaggaagcgacgcgagcctttcttaatgaatgactgcacgcccgtcgccgcctgcgcgcaacctcgggctgggcgggcgctgcgtctcggggcgcactgccaggaccctccggagcggcggcgggcgcggcctcgggtcgcctcccgcactgcgagcgcaggtgccgggtgcaggggggtccccggccccgccccgcaggccccgcccccccgtaccccctcccccggcggcccagcgcgcgcggcattgtgggagttgtggtcttcgcggccccgcggagcgcagcgcggcgtcggcaccggcaggggcaccggcgcggcttaggctcgggctcgggctccggctcgggctcccgcggcgtgggctgggcagcagccaggcggcggctccgcggcgccgggcaggggccgtccgcgggtccgcgccctcgggcggcggcgtctcctgggtcccggcagccgtccgcgcgcccgggcgcaggtaagcttcgtctccgggggctgccggggcgggagggcggcgcggctgggccgaccccaggacaggggttggaggcgggagcccggcagctgcaggcccacggccctcccttaccggcgccgccgccgccgccgcccccgccgaggatgctccgggacccgggcgcccgcatcccggcccggccgaggccagtgctcgtacgtgctaagcgccgccgcctcggagccgggcatcaccctccctagacctcctcctactcctcttccctgccccatcgtggtcccttcctccatctcccttctcccctgtgacccctctttcctcacctcctgtcccctcccccagccctcagcatcacccacttcccatatttcacgtggtgaccctcctcccctgtcccacgaattatgaggcgccataaacctccttccacaatcttgagctgatcgtccacttttccgggcaacactcacctttccatcgtcccatccccctcctcccctgacctcctggtggtcaccatctgtgctaacccatcttcagccctcccctctttcccactctccagggcaggtgggtgctgagaagctggccaagagagggaaggtccccaggtctgcaccgggaagggctggccccacggcatctctctggctcctgagtggagagggtgacaggcatcacacaccttgcccagtgctgctcactggggggcttccagggtgacttggcctcatcctgagggtgagcagacactctttggcattaggcagcctctgggaatggacatctgaactaggctgaccaggtcaggcctgacaccggctctcccaggtgttcatggtgtgagaagttgtcttggattggacttgctctccaactggccatggatttggactcaattccccagagccaactgagctggaa

SEQ ID NO: 9349 - DNA, 6000 bp, Homo sapiens
tcccgggttcaagtgattctcctgcctcagcctcccaagtagctgacattataggcgcatgccctgacacctggctaatttttatttatttatttattttttacagatggggtttcaccatgttggccaggctggtctcgaactcctaacctcaagtgatccacccgcttcagcctcccaaagtgctgagattacaggcacgagccatcctgcccgggctcaagaccctgtctttaaatttcttttttttttttttttgagacggagtcttgctctgttgcctgggctggagtgcagtagtgtgatcttggctcactgcaacctctgcctctcgggttcacaccgttctcctgccttagcctcctgagtagctgggactacaggcacctgccaccatgcccggctaattttttgtatttttagtagagacggggtttcaccatgttagccaggatagtctcgatctcctgacctcatgatctgcccacctcggcctcccaaagtgctgggattacaggcgtaagccaccgtgcccggcaagaccctgtctttaaaacaaaaaagacaaggaggtggctcaacctggtactttttttttttttttttttttttgagatggagtcttggtctgtctcccaggctggagggcagtgacacgatctcggctcactgcaacctctgtctcctgggttcaagccattctcctgcctcagtctcccaagtacctgagactacaggcgcccgccactacacctggctagtttttgtatttttgtagagatggggtttcactatgttggtcaggctggtcttgaactcctgaccttgtgatcctcttgcctcggcctcccaaagtgctgggattacaggtgtgagccaccacccctggcccagcctggtacttgtgagggtaagactagggttccactgcctgggttcaaagcccagctctaacacgatgtcacctttgggcaagtcatttaatctctctttgttctggggtgggtgtggggctggtaagaatgcctccctcataaggctactgggcggattttgtgaaatgcaaccgtagacaccctgcatagccttagtcaagtctgcagtaaacatttgctattgctgtcattataatcaggccccctcctccagggctctttccataaaatgactgccctttgagcagaaatcatcccaactggagtttcaaagacagttgaatgacccaaactccaacattgtaggtctcctggcttcttggccaatcctgctgccctcggaggaagaaaggggccttacttgcacagtgcaaacagacaaacggacaccaacatctttctggaggcccaggagctgcattcagtgtcctcactctttccatgaaataaagctgctaaacaccccaggcatgtaaagcactgaaatgagtatcccgggttgctctctgccagaagccaggaccacaaaagaccttgagctgttaagtgccatgacctagacgtgctgggctgtatttttagcctcttgtgcactgtttccatcacctgtgctgggctttcagctggaaaagagaaggtgggggtggagaaggttagagggatgtttttcactgcagccagtgccaggaggagcttgcacacaaatttctgagtcctgttgtacaataggaccattttcatgggcgtgcaacctgtatatcaacataggcccccttgcttggaagggccccacacatgctttatcttttcatcttctgctgtcactgtcttgaaattcttttttttttttttttttttgagatggagtcttgctctgtcactcaggctggagtgcagtggcacgatcttggctcactgcaacctccacctcccaggttcaagcaattctcctgtctcagcctcctgagtagctgggattacaggcacctaccgccaagcccggataattttttgtgtttttagtagagatgaggtgtcaccatgttggccaggctggtctcaaactcctgaactcaggtgatccacctgccttggcctccctaaatgttgggattacaggcgtgagccacagcgcctggcctgtcttgaaattcttaataagtttggacaaaggacatacattttcatttctcactgtgtcatgccaattatatggctggtcctaagcagtgtacatgacagagagagccaattggaggaggggctgctgccagcccaggaggggtgccttcccgcagcaggcaggacagaccaaagctactatcacaaggcatggctgcccagacttggccaaataaactttgtttccaacctcctgggtgcccttcctattttctcctctgaaacctgaatgagatgcagaaagaaccttgtgaactggagagacctgtgtcctgctttgctgaagtctttctctggcatcctgcttaaagtagtccaaaggttagccaggtgtggtggcatgcctctgtagtcccagctatccaggaggctgaagcgggaggatcactggagcccaggaattggaggctgcagtgagccatgatctcaccactgcactccagtgtgggcgacagacggaggccctgtctccagaaaaagaaaaagaaaaaaaatccacagaacatgtggtcaacataattttcttgtctttgcagtactttttgttcttcggaatttgtgtgttttcaggttgactagaatgtaagttccaagaggaaggtttggtcttggtggctgtatcctcagcccttggcatgttcctcgctgaatatttgctgaacgaaggaaagttcgactttattgagtgtttgctttgggctgagagcttcacctgcatcttctcatttcattctcttcaaaggcactgctgtctgggagggcacagaagtcctggaataagggttctcaggtccggtggagaaggtgggaagggcccaaaattgtggaaaaggggaaagctggacaaaagtggggatcaccggtggcaggaggtggggggggcggtccccaggaccgaggctggctgggtgaggggatggtgggtgcccctaagttccaataagaggcccagaggatccttgaactcgggaatgacacatgaaaacaataactgaacaagattcttcttgctacagcgctgagtcgtgtgggtggagagggacagagatcgagaggcctcgtgggaggtagctgcgcccttggggcccggccctgcgagcagccgtgggtggggaaaggagtttgggggtacgcgggctctgggagtggataagggggtggcgcccgggggttgagggggcccaggggcgagtgtacccaaggcgtgccggtcccgcccagccgcgctctgggtgcggcgagtctgcacactggtgcagatgttcccgccgccgcgccgggcgcaggtctgcacttgcaagcccgggaccagggacttgaaagcgcccggcgcgccgcctggacctgccccgccgggcgtcaccgctgcgctttaggcgggaactgtaggaaaatcccctctgcctggcgggagggcgggggaggaggacggcccacgaccgaccccgggtgcggcaggggaagaccttgccggggtcggggcggggggaggcgggcaaagggcctaccacgctggggccgaaagtttaagcaagccgcgcgctctctgatccctaacatcccaggctgtaggataagcagtactgtctcatccatttctggacgttgcgttgggcgttttacttgcttctatctcatcgaatcctctgaaggccttttattattcctattctgcaaacggctgagcctcagacagatcaggaaagttgccctggttgaaactggctatgtgataagatacggaaccaggggtcagtatgtggctgcaaacttggggtggagaaagaaattcaacatttgctgaactcctactctgcgtgcgtaaaagcttccatgctttcgttttggtttttttttgtttttgtttttgtttttgagacagggtcttgctctgtcacccaggctggagtgcagtggtgcgaagaaggctcactgcaagcccgacctccagggctcaagcgatcctcctgcttcagtctcctgagtagctgggaccactgagttatttatttttttcttgtagagatggggtctcgctgtgttgcccaggttggtctcagaatcctgggctcaagcgattcttccgtctcggcctcccaaagtgctgggatcacaggagttgttagccaccgcactcggctgtaggcattcttatttagtgcaagcgctctgaggagtagcagctattatcacctccatttaacagatgaggaaattgaggtaagagctatttttcctttaaacctgtccaaggtgttacatgtgaccaagtgggatgtgaactctccaaagcattctttttttaaccattacgatgagctaagcaagggaaaacagtttgcaaactgctgttgtaattattaccgctgtagctgagctcgcgcgtgggtcacgacctaagtgagggtggagcaggggtcactgggagcccggcctatttcagcccggccaaaccgcttggtgacttggaggccgggccgaggccccgcccctcacctgctgatcctacccttggatgggacaaacagagggccctgctgggccggcccaggtgaggcgagagatgggcggggcctgatgcgtgagtggcaggagcagcgcgcggccggggcggggcgtgcgtgcgcagtgggctccgccccccgggcctctccgcggatccgggcgggccccaggctgcaggggcggtggcggcgctgagctgggcgggccggggcggggcggccgggcggccggggcggggctacactcgggccccgcgtcctgctcccatggccgcccccggctccccgcgctgccccctttaccccgggccgcgccccggggccccgcactgacggcccatggcgccgccagccgcccgcctcgccctgctctccgccgcggcgctcacgctggcggcccggcccgcgcctagccccggcctcggccccggacccggtgagtgtgagcgaccccccgccgcccgccctgagcggagcccactcgaggggcgacaagggccggccggcctgagagccccctccctcccgcttcaggaccttccgggccccttcccctcgcccctaggcgacgcccctcaggccgggatggtcccttcctgggacccgggctacccccaggcccgtcatcgacgcccccgggcccggtactgtcccccggctgcaggacccggtgctcctcagcgacgcccctcagcccaggaggccctctccgccttgagtcttccaagaccctctgcgacgccccccgggctgggacatcttctctgtctcgggatctgggacccgctgcccgagtccctcagcgaccccaaccaggccgggacgccccctctccccggtacctcctgggatcccgtcccaagtccccagcgacttcccccgggccgggacgtcctctgctccccggtacctcctaggatcccgtcccaaaatccccagcgactccccacgggccaggaggccccctgctccccggtacctcctgggatcccgtccccaagtccccagcgacccctcccgggccgggacgacccctgctccccagtacctcctgggatcccgccccaagtccttcatcgacgcaccttgcaccgggacgactcccccgctacaagaggctatacgcccctctccgagacctccagcgacatccctcccctgggccaaggtcccctccctgagcctcactgcgacgcccccgcgtcccccagtcctctcctcccgcctacaccggtggaacccggcgcctccccgcgcagagcagagcggaggcgggaggagccggcgctcagccccttttcccgagtcctcggctgcacccgcttggcggacattataacttctgcctcgcgaggaacgggatggacttgttcgccctg

SEQ ID NO: 9350 - DNA, 6000 bp, Homo sapiens
ctgggccgcacagcaggaggtgagtggcaggtgagtaagcgaagcttcatctgtatttacagccactccccattgctcgcattaccgcctgagcttcgtctcctgtcagatcatcggcagcattagattctcataggagcacgaatcctattgtgaactgcgcatgcgagggatctaggttgcacgctccttatgagaatctatgcctgttgatctgtcactgtctcccatcacccccagatgggaccgtctagttgcaggacaacaagctcaggcctcccactgattctacattatggtgagctgtataattatttcattatatattacaatgtaataacagaaataaagtgcacaataaatataatccacttgaatcatcctgaaaccatccccctcctgtatcccgtccatagaaaaactgtcttccacaaaactggtctctggtgccaaaaaggttggggactgctagtttaagggaaattacgttttttaaatgattacctccgaatgagaatttaaaagataaaatataaaaccaaaatccagtactttgagaggccaaggtgggagcatcccttgtggccaggagttagagaccagcctgggcaatgtggcaagaccctctctctacaaaaaaatttttttaaattaggctgggtgggaggccgagacggacagatcacctgaggtcaggagttctagaccagcctggccaagatggtgaaaacccatctgtactaaaaatacaaaaattatccgggcgtggtggcaggtgcctgtaatcccagttactcgggaggctgagagaacagaatcacttgaacccaggaggcagaggttgcagtgagctgagattgcaccactgcactccagcctgggcaacacagcgagactctgcctcaataaataaataaataaataaataaataaggccaggtgcggtggctcacacctgtaatcccaggattttgggaggccgaggtgggtggatcacgaggtcagagattcaagaccagcctgaccaacatggtgaaaccccttctctactaaaaatacaaaaattagctgggtgtggtggcgggcgcctgtaatcccagctactcaggaggctgaggcaggagaattacttgaacccaggaggcggaggttgcagtgagccgagatggtgccactgcactccagcctgggcaacagaacgagactccgtctcaaacaaaataataataataataataaataaataaaaattaggctggggagatggctcatgtctgtaatcccagcactttggaaggccaaggtgggtggatcagttgagctcagtaatttgagaccagcctggccaacatggtgacacccctaaatttttttagtctttacaaaaaatctataagaaaaccagaaaacgaaattagtggggcatagtggcatgcacctgtagtcccagctacttggaaggctgaggtgggagtaccacttgagcccaggagttcgaggctgcagtgaactatgatcgtgccactacactccagcctgggcaacagagtaagaccctttctcaaaataataatagtaataataataacccagcatggtggtgcacacctgtaatcccagctatttgggaggttgaagcaggtgaattgcttgagcccaggagttccaggctgcaaggaactatgattattacaaccaggaattatgtgccactgtactccagcctgggcaatggagggagaccctgtctctacaaaaataaaacataataaaaccaaatgaaacaagccacacctttaactccctgtggtcttccctactcatttctccctcctctgaacttcccatcagccagattggttggaaatgattagcaagacctaagtagtcttcccctggagcctcacaacttcctgctctgaggggctcccaggatgctttgcaaatagtataaaaccacagtaaggataactcatggatgtaaagcatttcacattttaccttctgatcccctaacctggtattactgttgctctttacagatgaattaaaagagagttaaagcctgatcaatgtcagagtcagaggcagagccaggcctgcaatccaatccctagtttttgtttgttttgttttcatttgagctccatcacccaggctggagtgcagtgacgcgatctcagttagtggcagcctccgcctcccaggttcaagcgattctcctgcctcagcctcccgagttgctgggattacaagcgggtaccaccacacctggctaatttttttgtatttttagtagagacagggtttcaccatgttggccaggctagtcttgaactcctgacctcaagtgatccacccaccttagcctcccaaagtgtggggattacaggtgtgagccaccgcgcctggcccctagtttgtttttcatggagacggtctcactatacggcccaggctggtcttcaactcttggcctcaagtgttcctcctgccttggattcccaaaacactgggattataggtgtgaggcaccatccccagcccagtccctggttttgaatgccacccctatccggatgactcttctcaggctcatacctctcctctaaactacagatccatgtcctcatttgcctctagacacctccacttgatgtctgttggctagctcaaactgatgtggccaaaacagaacttaagatcattctgttgattttaaattgttgaggtcaaaacttagatgtcagctggacgcggtggctcacacctgtaatcccggcactttgggagaccgtggcaggcggatcacttgaggccaggagttcaagaccagcctggccaacatggtgaaaccttgtctctactaaaaatacaaaaatgagctgggcgtgttggcatccgcttgtaatcccagctattcagtaggctgaggcatgagaattgcttgaacatgggtggcagaggttgcagtgagccaagattgtgccactgcactccagccgcacagagtgagactctgtctcaaaaaaaaacaaaaaacaaaaaacaaaaaaaacttagatatcctcctcaattcctctttcctgtgcaccctacacacatctgctagcttgctctgtctgccctccctcccaaattacatcccaaatctgatcactgccctgctccacaccctaacctaaattaccacccatcaggccgggcatggtggctcacgcctgtaatcccagcactttgggaggccaagatgggaggatcacctgaagtcaggagtttgagactagcctggccaacatggtgaaaccctgtctctactaaaaaaaaaaattagccaggcatggtggcaggcgcctgtaatcccagccactcgggaggctgaagcaggagaatcacttgaacccgggaggcggaggttgcagtaagccgagatagcaccactacactccagtctggacgacagaccgagactccatctcaaataaataaccacccatcttccctcaaatgatctactacaataacttcccccttgcggtccactctccatagaccagccaggatgatgacattaaagtgcacattaaatcttgtcgcatttctcctgaaaacccttcaatggcctcctagtgcaactagaaaaagacaagactccttggccagacgcggtggctcacgcaccttggggggcgaggcaggaagattgcttgagcccaggagttggagaccagcctgggcaacacagtgagaccctgtctctaaaaacaaaaaccaaagaaaacaagactccgtaaggtgggttccaaggccagacatgagctgaccggagtcaacctcttcacagtccactctacttctttccctcaaacatcccaggactgtagctgcctcaaggcctttgcaccaacgttttcctgttcaactctactattcattcaggtctctagtcaagtgtcaccccccagagcagctacccagggtgcaatgtcaccaccactgcctctccagtcaaccaaagcactatctgtttgctgtactgcatctccccacccgcccactccgtagattgagcgctctgtgagagcaaggactttgttcactgctgggtccccagagcagggaccagaacaggcgctgggaaaacatctgttgaatgccccaggtactccaaagcccttgctcttttcaatcccaagcaggttccaagtctccagccttccaaaccagggttgcccggtgcgaagcccaggggtgagaggaacaggaagcagggcagatccgtccctgcccttaatccagggtgaagggtttaacctccaggacaagacttttgccgcaggctccagctcctggcctagacttggggctggtgcaggggacaaggcgaagagttgagccagggtctcgggaacccagctgccctcgcccctctatccacaccctatcccaagaaatggtgcgtcccgccgcagggcgtacgcacagagaaggaagtgttcaagtcttccagtgcggagaaaagagactaggactcgcccctcgacgtctcgcggaaggtacctggctccccggtggctgcagctccgggctcctcctcctgcgtcctcgcgtcgcgtactgcttgctgggattcgtagtctcgccttggccatcagttcgcccttcccagagagctttgggaatctaagccgggactgggcggagggcggggagaaggtgatggcgcgcgagggcttctgggagttgtagtttgacatattctaacagccaggaattctggagaagaaaaattgggtaataaatcttatcagattatctgggctgtcctgatatgaaccttttgagtttttttcctcattcccaggataggaatacctctgtggttcaaaacacgaaggctgagattcagaggaactacaaatcccataaagtgttgcacgtctagggcctttggggaacgaggtcggccccagcgcaggcgcggtggcgcgagttggactgtgaagaaacatggcggccgcgacgttgacttcgaaattgtactccctgctgttccgcaggacctccaccttcgccctcaccatcatcgtgggcgtcatgttcttcgagcgcgccttcgatcaaggcgcggacgctatctacgaccacatcaacgagggggtgagggcctgtgccatccctgaccttggacccgcctgaggggtgacagtggagtagaggtgggatgggactcagtatacttttaccaggaagggggtaaggggtaaaccgtcggcgtcttctgtctcgagtccgccgtctgtccccttggcttgatgtgaattctaaaacgttaagcgaggttaatatatttcattttgcaggggttgtaagtattgctgtgtgccaccctacatacccacttgcccattatcagaagcaaaaactaaaggctagtgagagcaaaggacttactagctgcacaggaagccaggggcaagtcagggccagaaacgggacccctgtctctcagagtttcaagggcagatttgagcaggcgacggtcgtgaaaaggacgttagacaccttagacgccgtggctgaagtttcagacggcgcttctggtccccaaggcttcccacgtagacagttggtattaatggttgagagtgggggctatgaaatcagaaagccttggataggaacactggtccttgtcacttaactgtggcattaagttgagcaagtttcttctctgaactccgttttaactgtgagatggagatattaatagtaacctgagcacgattgtgaggattacatgagatgcaggcagggtgccacatgcctggtaggtggtaccactgaaaaataatcattgcttacattcctcaggagaaagtggaagcatgaggtaggaatcgcaacacatttttgacttttatgtatcatgcactgtgctaggtgcagtgcatgctttatatcgctaaattatgactgtgctggagtaggccttataca

SEQ ID NO: 9351 - DNA, 6000 bp, Homo sapiens
taattgaccttgtgtagaccaaggataatgtgtgtgtttgtgtcttcatttttaagaaaaagttgcaaatgtaaaaaaaacattttaatagaaaaaatcttatagaataaggatataaagaaaaaatatttttgtacagtggtacaatgtgtttgtgttttaagctaacttattacagaagaatcaaaaagtaaaacaaaagatttgtacagttaaaaagttatagcaaattaagtttattattcaagaaggaaaagtattttaaaaataaatttagtgaacctaggtgtccagtatttttaaagtctgcagtagtgcacagtaatgtcttagaccacattcactcaccattcgcttactgactcacccagagtagcttccagtcctacaagctccattcatggtcagtgccctatacaagtgtaccatttttatctttgtttttttttgatacagggtcttgctctgttgcccaggctgaagtgcagtggtgtgatcatggctcatggcagccaccacctcccaggctccctccctccctcccttcacatcatcatgcctagctagttttccttccttccttccttctttccttccttccctccttttctttttctttctttctctttctctttctttcttctttctttcctttctttctttctctctctctctttctctctctctctttctttctttctttttctttctcagagatggggtttcaccatgttgcccaggctagtcttaaactcctgggctcaaacaagcctcccaccttggcctcccaaactgttgggattgcaggcatgagccactgctcctggctccatttattttcttttatactgtatttttactgtaacttttctgggtttacatacacaaatcattaccattgtgttacagttgcctacagtattcactacagtaacctgctgtacaggtttgtagcccaggagcaacaggctataccatacagcctaggtgtgtaggctatcccatctagtttgtgtaaagacactctgtgatgttcccacaagggtgaaacttcctatgacgcatttctcagaacatatcctgttgttaagtgacacgtgactgtatgctaatcgatagcctgcttctctgggctttccacaactgaactcccaatgagaaaaagggaaagagctcttttaccaaggacccgccaacatgtgccgcgtttgcaccaaaaccgtgaagaaggcggcccgggtcatcatagaaaagtactacacacgcctgggcaacgacttccacacgaacaagcgcgtgtgcaaggagatcgccattatccccagcaagaagctccgcaacaagatagcaggctatgtcacgcatctgatgaaatggattcagagaggcccagtaagaggtatctccatcaagctgcaggaggaggagagagaaaggagagacaattatgttcctgaggtctcagccttggatcaggagataattgaagtagatcctgacactaaggaaatgctgaagcttttggacttcggcagtctgtccaacctgcaggtcactcagcctacagttgggatgaacttcaaaatgcctcggggacctgtttgaattttttctgcagtgctgtattattttcaataaatctggcacaacagcaaaaaaaaaaaaaaaaaaaaagggaaagaagaaaaaattatagcagctctcttcatccctcatctttgctggtgtctcattgtcaatgaggccccttcacacccatcatttgagagagtcattgctgtcaatgctgtattacagatgttcaaagagagggttgcaaatgccaagtgagctgtcaatggtctactgcttgttggtagctgagctgagaatcaaactagccaagtaggttctctcttcagccccttacttcccaaaactcacagactctgcacttaggctgttgatttctttgtgtggcaagagttcaggagctggccattccactgtggggtcctttgccaagaagcacagtttagccagtgagaggtggacattgtaccattgggtctcctggggagaagctcccaggctggtaggagaggtggaacccccaagggtcctggacagatgagtgtggaaggaggaagaggagacaggacagttcccacatagtgatgagtccttaccctgcataatgctgggttctccctgccatctgtagacactagtgacctcagagtcatttgaatatttgttctttttctgacagtcaggtatggctgtggctctgtgggcatctatttttaaatgtggaatccttgtctgaccactgattgtaaacctatgtatacttggatagggagggggctgcttcctgctctcagctctgtctttccttatcagcctcatctttcctgcggcctgagtgtctggctggcttttttctttctcgggtgttctgctaacaagggcccctttagtgaccagatcctggttttgattggcaccaatgacggcaagagagagtccaacaggatcctaccagtgagcagtgacccagcagctcaggccagctgcatgggagcaggtgggcatcacactgtgttctcctagaagcatccattcaggggaaattgggtttgaagtgtccctttagaagagaccaatgaggaagagagatggcaaaagggcctcaggcagcctggggaatgactgtggtagggagtttcttacaggtgacatgctttttatatatgtttatttgtagccccagctagtccctccctaaatattgtaaccccttccttactcctcatgcttgtcatctcctggaatgtccctcactcccagcttacttggcctattcctccttttctttcaggtccctgctcaaaccagagctttcacagaacttactctaacctcaccttatccccaggttgaattccttggtaggcatttggggtattagtatttctccttcaaagcatgtgtcacaatggtaatttcacaggtagttgtctcatctttgatgctgatctatctctgtcattggtcaggaagctctgtgagggcaagagctctgtgtcttttcatagctgtattccagggtcggtacatatgatctggcacatagaagctgctcttttgttgtaagaataaatgaatgaatgaatggatgcattttctgacctctacctgggcaccatcctttcctttcttttcccatttatgtttggctctcctaaaagatcaaagaatggctctgtccctcctttgaagtcctttagtacttccagttctctctcctgctcgcttcactttctatgccttgtacttttggaacttggcatggcctggctgcctgcacctgcacctgggttcagggctggacttttcctgtgggtgggttcacttccagactagaacagaagcttcctaagggcagggactcttcctgggatacattcaggtgaaaaaacttggctgaatgcaggaatgaatgaacacaggcaaaaggcgagttgctccaagctgcagctgacagctgagctctaagtcttgggaggcatccacagcagacagcccctgctttcaggttcctcgtaagaattcctgcttcctttgggcaggcattatactggccccaggacatagccttatatagtttgcagtcctgggggatgtgtgggggaaatggggaagacctgtggggatgctgtccaaataatgattctttgtctgcagcttcagtgggaagaacagttgctgatacggaaggaggggaggcagacctctgaagcattgagtgcaaaggaacaggatgctcacatttaggcagtgggtggttgtctagcagtgggcagggagggcctgaggcagaccagagtcctggcagggtttctgtggtcctctgcctccctgcacctccccatcagagcaaggcccccctctttgggaacagtcacttttggctgctctgtggcctctagagccagcccctgagaataccccacagccctccctctgaaccctggcatgggctgcagggccagctctgctgctggtttcctgtatgaccttgggcaagtcatgcctcctctcttggtcatctctgttctgagccctggcttgctgtttagacatgtgtttccagatgggtgagctgagtccccaggaaggtcagggtttgatgaactccttggaaagggttctctagtatcttcccttctgctgcctctggagggccctgcatcaatactgggagagggacagggcaaggaaatagctcccggtgagatcccttcccccagtctcagtttcttcctctttacagtgggggtaacagtggacctgggggctgcaggctgtggagggggagtcaggaatgtgggtgggtgggtggctgtccttgtggccaagagattaggattgtgctggtttttttccagtgacacccagcaactctctgtcctctcaagaatgttctccagggagaacaagacttgactgattcttcagaagagtgctgcacccattttacaagcggacaagccaagtccttagaaggcatgggactagtccaaggatgggtggcaggtgatctgaagcctctaggctcctagccccaggtggcctgttccctcaatggagccactccagctctggcaagggcaggtgtggtggcgctgctggtgcctgctgtgggagtacagtgggcctttgtgccaggcgggcaccaccccctggctggcccctccccattcgcaggacagctcttacctgccgggccgccgccccagccaacagctcagccgggtgctccttcctgggctccacgcccggagctgcttcctgacggtgcagccgcaaggcatcgcaggggccccgcgctactgccctgctccctcaaagtcccaggtcccctcccctggtgctgatcattaaccaggaggccgtataaggagctagcggccctggcgagagggaaggacgcaacgctgccaccatggacagtagcacctggagccccaagaccaccgcggtcacccggcctgttgagacccacgagctcattcgcaatgcagccgatatctccatcatcgttatctacttcgtggtagtgatggccgtcggactgtgggtatgcagcgggttctgggatgcgggtggggagggtgcgcacagaggaggagcaatggcctcgctgagctgcaaggggcagtaggcttaagtgtcggtggaggggagaggaaatgacttggaagcactttagaagcactcagaggcacagcatgaagggaggagggcaagcaaggatgagcagaagtgagaagggtgcccagggcagcctgccaggaaggaccaaggaggatacctgagcctgtgagcagagaaggaaggtgggggtttgaagagaccgctggaaagtgtaaggggcaggaaagcggctgcttagagctacagggagggctctggggcttgggagatgagcctctagcaggtgactactgtcctaccttttagtcatccagtttcagatgggaaagaaatggtgtggagtgggaaagccacagcctctgccagccccagagatggggatgctgaggtggcagacagagggatgctgacccatgccccactcctgggagaggctaacccagaggccttgtgcatgaggatcccaggggctggatcaagttagagatgagaaagatgggtggaaaaggaggaggaggaagacctgggggtgacctggcactggggagagggaaatgtgtgtgtctccttttgggactctggggacacagcaaaccagagaaacttgttctcagccacctggaacatgggcatttcacttatgacagactgtggcaggcccaacaactagaggaggagatgttttaaaagtgtgcaggaccgactgtggtggttcactcctgtaatcctagcactttgagaggccaaggtgggaggattgcttgagtccaggagttcgagatcagcctgggcaacata

SEQ ID NO: 9352 - DNA, 6000 bp, Homo sapiens
tgcagcccaccaccaccggctagggcacgtggcaccaggcgcgctgctgcaggggatgtgcacaagggctcaaccagtaatgtcgagccagcagctggatgagcatggtctgctctagccagcagctcatgttaagcgccacgggcagctgcggggtgacgtgtggcagtcggtgtgctgcacccggcggggccagaacagagggcccaggtccacccagaccgacgtgaggcggcacgaggcgagatccagacagcggcgcagaaagtgcgtcgccgcccctgtggctcccaggagccgccgctggcgttgccctgctgcgctggcagcgccgcgaccccctgggctagccgatcgcggtagggctccacgccgttggccaacccgcggctcagcgtgtcctgctgcaccagcccgggtccgccgccgcgcttcttccgcagtcatccagaaggtgtctgtaggaggcgcagcagccgctctgggtgcacgtgtttcggcttgggcgcctaccggtagtcgccggccgcccacgacaagctgtagggccacgcggggcgggagggccggccgtggaccagctgcaagtctgcgttctgcagaatcagaggctctgaggaccgccccaagggcgcaatgtccttgttctctgcgtcgcgcacggggttcagggccgcgggctaccagaagcggcagtaggagtggatggaggtggcaccgggcgcacccaaggtctaggctcacggccgcgctctttatggccgcctgttccttcctccttccctccacctccgctctcatatcagcttagccttgccgctgctgggagctcatcgccctaggccaagaaggaccttgtgggcagggggctcccaagggccaggagtgcgaagtcatgaatctcagatgctttccagcccgttccagggttcaggcatgcacattcgtccaggcttctgggagtctaagggtgcgttactttcacgcagtggttgcaggtctgtcaaagtttctaaaatcccaccaagctgagtctcgccattcagggatcataagagtctacaattcctttgcgcaattcaattctgaattcaattcagaattaattcaattctggccgggcgcggtggctcatgcctgtaatcccagcactttgggaggccgaggcgggcggatcacgaggtcaggagatcgagaccatcctggctaaaacggtgaaaccccgtctctactaaaaatacaaaaacaaaacattagccgggtgtggtgggcgcctgtagtcccaactactcgggaggctgaggtgggagaatggcgtgaacctgggaggcggagcttgcacttgcagtgagctgagatcgcaccactgtactccagcctgggcaacagagcgagactgtctcaaaaatatatatatatattaattcaattctgaagcttctgaattcaggtttggcaagtctagattagattcctaatagtttcaattccgtgagactctgcttccaaaaattgaggaatttctgcatctaaagaaggtgacatcaggctctatagaggcacctctgagccctcgtgaaaaccccggggcctttgaggagctggttcttttcttttctttttttttttttttgagtcttgctctgttgcccaggctggagtgcagtggcacagtctccgctcactgcaacctccgcctcccgggctcaagccattctcctgcctcggtctcccaagtagctgggattacaggtgtgcaccaccatacctggctaatttttagtagagatgggtttcaccatgttggccaggctggtcttgaactcctgacctcaagtgatccaactgccttggcctcccaaagtgctaggattacagacatgagccaccacgcctggccttaaggagctagttctgagcatctaccccagctcctccggcctgggatgcgagtcctggctccatcagcgcccctcacactgttttctctccccttacgcacttccccttgatgctccccaaccccagccccagcttctaaaaacactacactcagcccctccacctctcccctcccttccttaactcactgcagactgccttttgccctcaaaacacctgtccagtttaccagcagcctcctcattgctgaatccagtgtaccttgctccccaggtgctagcctccctaaccctctggaggcatttggccatgtggcccctcctccacacagttcaggacagaactccatgaccaaatcacacagccgttcaccaagacctattctcctctttggctcttgcctagacgagaggctcctaacaggtcactcatcaaatctctcccactctgtccatccttttcaccccgggcaataatagacttttttttttttttttttttgagacagagtcgctctgttgcccagtctggagtgcgagcgatctcggctcactgcaaccaccacctcccaggttcaagcgattctcgtgcctcagcctcctgagtagctgggattataggtgtgagccaccatgcccagctaatttttgtatttttagtagaggcagggttttgccatgttggccagtctggtctcgaactcttgacctcagatgatccgcccacctcagcctcccaaagtgctaggattacaggtgtgagccgctgcgcctggcccataacaaactttttacaaaagataatgtggggggaaaaaaagaaagaaagaaagaaaatgtgcgggtcatgtctctgctgtagaatcttagtagttccccgttgctatcaggtaaagccagactttttggacaggtacctaaaccatctgggctccagctggactaaggctctggaaagagcttccggagaaggatctcaggatttgcagagcctgagggaggagtctctggagtctgccgaaaggagactcaagtcctggtttcccactccaggaaaccccagtcaagactaggaatcctttttttttttttttttttttttttttttgagacggaatctcgctctgtcgcccaggctggagtgcagtggcacgatcttggctcactgcaacctccaacccctggcttcaagcaattctctgcctcagcctcccgagcagctgggattacaggtgcccgccaccacacccagctaatttttgtatttttagtagacatggggtttcatcatcttggccaggctggtcttgaactcctgacctcatgatccacctgtcttggcctcccaaagtgctgggattacaggcatgagccaccgcgcccagcctcttctttttttttttttttttttttttgagacaatgtctcactccatcacctgggctggagtgcagtggcgtcatctcggctcattgcaacctccacctcccaggttcaagcgattctcctgcctcagcctccagagtagctgggattacaggcgcccgccacgacgctcagttaatttttgtatttttagtagagacaaggtttcgccacattggccaggctggtctcgaattcctggcctcaagtgatctgcctgcctcagcctcccaaagtgctgggattacagacgtgagccaccatgcccggcctaggaaccttttctaaacatggattggagcaagaaggtgcagggataggggatggagtcacatcaggctgggccacaggaggtgggagtgccagagactggctgggccctgggcacagaggggttaactacaaagcaaatcacagagagcgagatcaatgggttactggctgcagagagaggaaaaggcagcagcaacgcagagaggcagagaagagccaggcagaagagcctgccacctgggggaaatcagggactgaggaggaagtggccagtggctactccagagggagtgcccaactccggctcagcagagggggcagaggagaggaggggccttaaaggcaaagggggagaagtagaaggcagaccagtacctgcagggaggcaccaaggggcagccgctgaatcaggaggcccacccagcccggccattccacccaggatcaagcccactgcccaaggcggaggtgggtgttgcccatcctgggctttggggacctactgcatgctgggtgctgggatgggggcagacattgcctttcttccctactccctgcctgacccccctttcccctactttgtcccaccaccccagtggtctcaagcctgcaaggagatccacaggcagtaggagacatgggctgtagagtgggatgggggtgagcatgggtgcggtgtgcacacacacaagttgtcagaggcaccacctgttacaagctctcagatgagcactctagcttaagaggcaggataccagggtggcaacagccccagagctgccatttcgagtgtgatattatcctcccatgtcccctctctgggcctcaatttccctatgtgcagagaggaagcagtgacctacacggtcttcccagttttgccattgtgatgatctcactatactggaccctccaatgactcagggatgttacccgtgttttgctaaggctacagcttgtagccagagaaagccctaaacccatgtcccagggtctcccctgagcttcagatccccattgagaaggaaaacataccagtttctgggtttggcccctccccccatcgccatatcttcatcctacttcgcttgtgccttccccagcctcgtgggttgaaagtgtccctcaaatacctaggtagtcctccaggcaggactccaggggtgttccttaggaaactgaggaactctcaccccttgaacaccacgagcttgctcacacagtgacactcagcgatgactttggctctgctctcccctcctccatctcccacgagcttccagcccagaacacctggccagacccaggtcgggggagttagatcccggggtcaagcaaccagaactgggggctcttgcctgaggattccagcttctcttcccaggtgcccgtctgatggggagatggctgatgcccagaacatttcactggacagcccagggagtgtgggggccgtggcagtgcctgtggtctttgccctaatcttcctgctgggcacagtgggcaatgggctggtgctggcagtgctcctgcagcctggcccgagtgcctggcaggagcctggcagcaccacggacctgttcatcctcaacctggcggtggctgacctctgcttcatcctgtgctgcgtgcccttccaggccaccatctacacgctggatgcctggctctttggggccctcgtctgcaaggccgtgcacctgctcatctacctcaccatgtacgccagcagctttacgctggctgctgtctccgtggacaggtgcgctgtgcctggggcctggctgggcagggctgtgggggcgggggttgggggaggagtcctgaacagatcctcactggccttaggaaggagagagtgggggaccagaaagggaggtgggtgggaggaaacaaaagctccctgacccctcgcaagcagcctctgggcacctgcagggcgtgcttgaggggactgtcctgcccttcccctcctccactgtgaacttccagaggacgcctctgagtctcaagtggcagcacagggtctggcacatagtaagtgctctgtaagcgcgaaatgaatcgcaaaagaagctcacgaatgcgttcatcagtttttttgttttgttttgttttgttgttttttttttttggatcttggctcactgcaacctctgcctcctgggttccagcgattctcctgccacagcctcctgagtagctgggattacaggccaccacacctggctaattttttgtatttttagtagaaacggggttttgccatgttggacaggctggtctcgaacccctgacctcaagtgatccgcccgcctcggcctcccaagtgctgggattacaggcgtgagccaccgcgcccagcccagctattttctaactgcccacacctggccaagct

SEQ ID NO: 9353 - DNA, 6000 bp, Homo sapiens
aaagcccactagagcatcatttgccctaaagccttctttaagagcagtcctcccagggactccctccaacagacagtgattgccatttttcctctgtgcggtccagtccgtgcacaggcacccacctcccacagcaccagaaaggcccctggaggctgcacctaagttcaaccctcaaggcgcctggtgcccagctggtcttcagtaaatgtgtttgtaactaaaacgggaagagaggttttgaaccttggtgtttataaccttggtgtgtcagtaaaatgcggcccgctgcccctgcctcctgtcactcaaaatatattgagctggggaaagagcttcccgaacacctggggtggaaccgcagggagaggaaggctgggcccaccccgcactcggttaggaaatggactcgtccgcgcctccgggcgggcgggacctcaggggctgcctgggaagaggtcattccttccacgggggagcgtccactcgcctaggccagaggaagacttggcggcctagaggaagctctagggagccccggaagcccgggacatagctttccttccaggcccctgcccggtgagagacagccaattaagtggagtgattttcactttacacccctatttccttccacacagaattggaggcagtttgcaggatattccaaacagtggtgaaatataagaaagggctaggaccagaaaaagagagcgagcgagagagattatatatacctatttttaaaaaataattgagcaagtcccccattctctcttccataaatctgactttgaacgtagaatttgctttgttaagtgagaagaaaacagtccttgccctttgagctaaaggaaatttccctctttgctttcccctgcagcaggcacatttttgagtgttgggaaattgaggctcagagacgtgagggacttgctggaatccacccagcagcagggacagatcgtgaatgaccatgcaggtggccagagtgctggcaggggctagagccaaatgttttccgtgagtaaagggtttccccttttctccatggggagctttgaaagtctccacctgggagcctagtgggcacaaaagaggtggggctaattactgtggacagagccttaggactttggggagaggagagccatgtgactgaccttggggagcaagagacaaatttgagccccgatttcctcatctgtaaaataaggacatagtatccatttcatagggacatcaggaaaactggatgcaaagagcaatggctaagcacctgcaatacttcatttctttttgagacagggtctcactgtcacccacgcccagtttcaagtagagtagcgcaatctcagttcactgcaaccttgacctcccaggctcaggtgatcctcccaactcagcctctcaagaagctgtaactataggcacgtgctaccacgcctggctaatttgtgtgtgtgttttttttttttttttttttgagacggagtctcactctgtcacccaggctggagtgcagtggcctggtgttggctcactgcaacctctgcctcctgggttcaagcgattctcctgcctcagcctcccaagtagcttggattacaggcgctcgccactaatccggctaatctttgtatttttagtagagacggggtttcaccatattggtcaggctggtctcgaactcctgacctcaggtgatccgcccacctcagcctcccaaagtgctgagattacaggcgtgagccactgtgcctggccataatttttgtcttttttttttttttttttttgtagcaatagagtttcaccaggtcgcccaggtttgtctcaaactcctgggctcaagagatttgcccacctggcctcccaaagtgctgaggttacaggcatgagccactgcgcctggcctctttttagttttttctttttgagacaaggtctcactctgtcacttagtttggaatacagtgatgtaatcatagctcactgccgcgttcaactcctgggctcaagcgatcctcctgcttcagcgtctcaagtagctggagccacaggtttgtcaccatgcccggctaatcttttttttattttctgttttcttaattttttgtagagacaagtcttgctgtgttgccttgactggtcttgtactcctggcctcaagtgatccccctgcctctgcctcccaaagtgctgggattacaggtgtgaaccaccgtgactggcctacatctgtctttatttttcccatttatcagatgagaaagctgaggcccagagaggggacgtggcaggctcaaggccacagtggcaggcctgggacaaggtctagcccctggagccattcagcttgggttccttcccctccagcaccacggtccctcctcagactctccctggccttggccagtttccctgtggtcttgaggaaataaagggaaggggaggatccagcctcattccagccccacgtcccccccaacacacacagtgggggctgcttcccaggaggacagatgttttcaccaaatggcacttgcacgtgcttttctctggcttggggaggaggtgggcgctgagaaggaaatgccagctggttgggcagagacaaccgcagccacacctgagggatttaaatagcctccgccttctctgggcaccggctgaggaggaggcatctgggcagggttggaggggagcggggaacagaagggccattcggaacctgccgcagctcagggatgagcgcctggctcctcctcccagagggacctggtctaggcacctcacctccctggacctcgaggttcatcccctgcaaagcgaggctctgaaggccgctgaaccacgtgcctgttgatggaaagaacctgagtaacaggcctgacccatgcctggcacccagatgctcagtacttgacggctattggggtcaccacctccctgccagggcaggagggcctgctgctgagtctctgacaaatgagcgtccaccggccgctcacccacctctcgcgacagggtgctcatcacctgccatggcaacccacagtgtaagggaatgatttcatggtagaccgtgtgttggaatctgggctacaggactgcttggtgtctgtgtgacctcaagcaagttatttagcctccctgcctcgctttccccatgtgtgaaatgagaatgaggccactgcttcctcacagtgctgtttagatgagtgcctttggaactttacagttaaacacgatccccaggggattcgtgtgcacatcggagtctgattcacccgggaatgcctggggaggggctgagattctgcattcccaacaagcggtagcaatgctgctggtctttggactgcgtttggggtctcaaaggactgccttggctgggcgcggtggttcacgcctgtaatccccgcactttgggaggctgaggcaggcaaatcatctgaggtcaggagttcgagaccagcctggccaacatggtgaaaccccatctctactaagaatacaaaaattagcctggcgtggtggcgggcgcctgtaatcccagctacttgggaggctgaggcatgagaatcgcctgaaccagggaggcagagattgcagtgagcagagattgtgccactgcaccccagcctgggccacagagcgagactctgtctcaaaaaaaaaaggactgcctttccctgggaggaaaagtagggaaagtagggggcatagggagccatagaagggtcttgaccactgaagtgacagatttttatcacagaaaagaggctggccatagtggcttatgcctgtaatcccagcatttggaaggctgaggcaggcagatggcctgagcacaagagttcgagactagcctgggcaacacagtgagaccccatctctgtttaaatacatttgtcatggaaaagcctctctggttatctgtggcaggaggtgggagtgggaggaggtccgttatttagagagagatgagggcgctgaatgggaggagggcttattcaggtcaaggaggggaggctaagggccctcagctcacctggtccactctttcagacgcagagacttatatccagagggggtggtggacctgctcagaccacacagccctgggaggactccctcccaccagggacccttcactccccacccttcctggtgctcagccctcctgggtctctcctgtcctgtgtgtccctgtttaacatcctagtaacaccaagaagagggaaggcacgaacgagggccctggatctccctgaccagcttgacctcctgcctacccacaacaacccgattttacaggtgagaaaattgagaccaagagagaggaaggcccaccgacccaggctgcagccgaggtcagtctgattctgctgctgagtggtgtgccattaccattgtccacctgcagcaagatcgggtcccgaccgggtggacaaccaaattaacagacggaggtggggactccgcttccggctcgccccgccccaccccactctcccagggagggagctccagctccgggaagatgaggacaatagcaggaatcgccccacagggtacttccacgtgctggctcctgccaagcgctggcaccagtgttatggggcctgtgtacagatgaggaaactgaggcagagattggggcttggtggcaggcctccagtttctgcggagggaaggcagagggcacttggggcatgggcgacatgggtcgtggcgggcacccggcgcacacggcagccgggcgcaggccagaagcccccccgcgtcgccgggccgcccagtccgggagccgggcgctgggatgggcgggaggcgggatctccgggccgcgccgcttcctggctccccaccctgcgccggcggccgccctggccacgtcaccgcccggccaagagtgcgtgggcggcggcgcgcgggtgcgatcgcggagctgtgaggcgcaggcagggctctggggcacctagagaccggggccggagacgtggcagccgccctgcccgccagaaagtttcctagaagtttgctgggcgcgggcgcacgactgactggctggaccatgaacgtgttccgaatcctcggcgacctgagccacctcctggccatgatcttgctgctggggaagatctggaggtccaagtgctgcaagggtgaggggcgcctggcagggaggtgcgggaccccctctctggccagcctcatgcccctgcgtgcagggcagggcgctccaggtgtctgctcagggtggggactccggcgtgggggtccttgaaactttgcggagctccacttccaaaaacaatgtaaagttgtataaaatcagaggaggaggacccctcgagatgatgggaggcgggtgggtttgttcctgcacagacgccccctcaggttggcagtgtcactgctggttggaagagggggttataagggaggtgacaacccctccctcccaccagttacacccattgttccttccaccatcgactgtggggagaagcagatatgcactcaggaacggcccacgattctcaaggtcttctcttccctgccccttcccagaccccaccccgccccccaaagtgagccctcgtccctcccctgcctgcatgtgtggcaccggtggctgtgatgtggcaggagggcaccagccgggctcaggcgggtatggagctgcctctaaacggaagccggggaaggctggaggggtcccctgtttgcattctggctgccctgctgggggtttggagaagcttggaggctggactcgcggtcgccaacagatccagagccacgaaaggctgccagagcctcctccagccatctttgtccaccggcatcctcgtggtgccctccctgtgcctggcactgggtgtgcagaggcaggagtgagctcaggctcctcgtggggctgaggaggctgagaaggctgagagtgggccccgaaggccctgtggaaggagcagctccgtgctggtc

SEQ ID NO: 9354 - DNA, 6000 bp, Homo sapiens
cactttgggaggccgaggcgggcggatcacctgaggtcaggagtttgagaccagcctggccgacatggcaaaaacctgtctctactaaaaatacaaaaattagcctggcataatggcaggcacctaatctcagctatttgggaggctgaggcaggagaatcatgtgaacctgggaggtggaggttgcagtgagccgagactgcaccagtgccctccagcctgggcaaaggagcaagcctcccatctcaaaaaaaaaaaaaaaagaaagaaaagaaaagaagattctgtggacgagagggagggcatgagtgcaggattagaggcagtaatggcaggaagaccgagtttgagtcctagcaaggggaactgcgcagacaacaggacaggcatgggctaatgtgcactttctaatgagaggggcttatagtttttataggattctcgaagggagccatgcccccaccccccaattaagagctactatatcacatgtttctaattctgacaggacagaaacaagcaaggtggaaatcttgggctcgagagatggggagtagaggagctaagagcccagcgttcttgaacctgcctctcccatccgatggcagtcacctgggctcctagcatggggcattgccactcacttgctgacacccttgtccactgatgcgacctccatcctggcaccagtctcaccatgtcatctctgctgctgagccttcctcttgaagacttcagcaattcctcagccctctggtttccctctctccccaatctttaaatgtctgattccacaggactctgtcttttttttttgtttctgagacagagtctggctctgttgccaggctggagtgcagtggcgtgatctcggctcactgcaacctccaactcccgggtttaagcaattctcctgcctcagcctcctgaggagctgggactacaggcgcctgccaccacatctggctaatttttgtgtttttagtagagatggggtttcaccatgttggccaggatggtatcaatctcttgatttcgtgatccacccgcctcagcctcccaaagtgctgggattacaggcgtgagccactgcgcccggccagggctctgtcttctgttctcactctgccttttcttttcttttcttttttttttttttgagatggaatctcactctgtcgcccaggctggagtgcagtggtgcaatcttggatcactgcaaactctgccttccgggttcaagcgattctcctgcctcagtctcccaagtagttgggattacaggtgctcaccaccacgcctggctaatttttgtttttagtatagatggggtttcaccatgttggccaggctggtctcgaactctggacctcaggtgatccacctgcctcagcctcccaaagtgctgggattataggcatgaatcactgcccccagcctcactctatcttttctagatcatctcatctcctcccaaagttctgaacactctgcattgcatgatttccagtattttttcttatcccttggaaattctataatcattgaaagagctctttcatccttaaacaggttttttttttttaaatcatgtgttgctcttatgaatataagcaaaattcattggttttcctaaaacttctccacattagcattgcgaattactttccatttggagtcactaatgtctgtgcttttcaaataagattggtccctctacgttcaatagcattagtcttctagcatttcttaaatgaacccataaaagaactaaaagctgttggcactgggctcttaagctgccctcgaaattataaagggctagcccgcttttttttttttttttttttttttttgagacagagtctcactctgtcgctcgggctggagtgcagtggcgcaatcttggctcactgcaacctccgcctcccaggctcaaggattctcttgcctcagctttccgagtagctgggaatataggcgcctgccaccacgcttagctaatttttgtatttttagtagacagggggtttcaccatgttagccaggctggtctcgaactcccgacctcaggtaatccacccgcctcagtctccccaagtgctgcaattacaggcattagccaccgcacccagccccgctctttttaaaaaagtaacctttttaacacaggcaaaaaagcatagttcataagtgtacagcttgatgaattacccaaaatcaacacagacctaagagaaccatagcatcccagaagctactctcctgcccctttccaaaattaaccccttcaagggaatcactgtcctgacctctcatcatagattggtttctgcctgtttttgaactttatataatggaatcatacaggagtacccttttgtcacatgaaaactgtctgataggccagactcacgcctgtaatcccagcatgttgggtggtcaaggaggctggatcacttgaggtcaggagttcgagaccagcctggacaacatggcgaaaccccatctctattaaaaatagccggggccatgcctgtaatcccagctactcaggagactgaggcaggagaatcacttgaactcgggaggcagaggttgcagtgagccgagattgcgccactgcactccagcctccatcacaaaaaacaaacaaacaaacacaaaaaagtgtctgatagagatgccctgtccaaagatgaaagggaggcctggggactgtatcggaaggagtgtgagacacaggacaaatgctcattactgcatcctcatgcatcacagaaggatttggactctcccatcctgggagtctctgattccaggttcagttggctaaaggtgtttatcaaattaccctgtttaataacatggggcacattttaaaaagaagcacttacatccatcatataggcaaaaagtaaaaagatggataacacctaatgctggggagggtgtgggacaaggacatttccatttactgtactattatgaaagcatctgatagaggctgggagcagtggctcatacctgtaatcccagcactttgggaagccaaggcgggtggatcacctgaggtcacgagttttagaccagcctggccgacatggtgaaatcccatctctactaaaaatacaaaaagttagccaggcatggtggcacacacctgtagtcccagctacttgggaggctgaggcgggagaatcgcttgagcccaggaggttgcagtgagctgagatcatgccactgcactccagcctgggcgacagagcaagactccatctcaaaaacaaacacacaaactcaaacaaaaatttatatctgcatactttctgaccagctcacctacttactagaaatctatgtactatgcctcagtttcctcatttctaaaatggggataacagtgcctaccccagtgagctgctgtgaagattaaaggaggacacaccgcacccacccacacccacaggcaccagagcacctggtatttaggtgttaactcttacctttgtttggtacatagggaagatttacctgatgttttcccaaaagacctgcaagacactaatttattcctaccaagtaaaacatggctcaggaaaacgaaactggatcagtgtctctctaaaacagcccaagaagcaggccaaggagatggacaaggaagataaatctttggccctggtcacaggccgaattaagaaatccggcaaggtggggcgcagtggcataggcctgtaatcctaggacttggggaggctgaggcagtcggattgcttgagtctcggagttcaagaccagcctaggcaacacagtgaaaccctgtctttatatatatatgtatgtgtgtgtgtgtgtgtgtgtgtatatgtgtgtatgtatatatacataatacgtatatatgtatacgtatgtatatatatacatatatacacatacctatatacacatatatacatatatacacatatatacatatatatacatatatacgtatatatatacacacacataaaatatatattatatataatatataactatatataggccaggtgcggtggctgatgcctgtaatgccagcactttgggaggccgaggcgggcagatcacttgaggtcaggagttcaaaaccagcctagccaaatggtgaaaccccgtctctactaaaaatacaaaaaattagcggggcgtggttggtggtgcatgctgaggcaggagaatcgcttgaacctgggaggcggagcttgcagtgagccgggatcacaccactgcactccatccagtctgggcgacagagcgagactccgtctcaaaacaaaaccaacaacaacaacaacaacaaaaagctaaaatcttacaaaaagcgacctgttccactgtcccttgggcctgcggtgatggtgggcctgactccattcgtctttaaacatctctattcccggccacatctttggccacctatgctcgaataaagtgttgtcttggagcctgttgtaaatttaagaataaacttttgttaaaaaaaaaaatacagtggctcatcatctcttgagttgttttcactcagccactcctaccttagctgtgaacttaaagtaaaacaagcccccagaatcttgccagagtcagccctttgatctttgttctcccctgaactctattacctggaattaaaacaacgcatttgaaaaaaagaaaaacaagcaagtttctgagctcaccctatacccgctgaacagaatgactgcggtggcgccccagaacctctcacaggcctctcagctgctgctaatgcccgccgaagccccgacgcccggataaggccagggctgccggacccgctgcgggcactggaggacccggggctagagggcgccgctctcgcccggctcgcgcctcggctcccggaaaagcagctctgtccgccgttcggctgcgctcacctcctttccgcttccggtgtcccctacagtcatggctgccgccgtcgctgctgccggtgcaggggaaccccagtccccggacgaattgctcccgaaaggcgacgcggagaagcctgaggaggagctggaggaggacgacgatgaggaggtactagggcctcgcggggtgcagagcgggaagcgggcccgctcgtgggtgtgggatccgcgtggtacgggatcggagcgaagcggctgctttgggaggcggggttaggggccctgctgggccctgggtgccctagctccagtggggctcggcggctcccagtgccgcagcggggccaggaatggatgtcgctttttcggctaagacccgcgtctactccaccacagctagatgagaccctgtcggagagactatggggcctgacggagatgtttccggagagggtccggtccgcggccggagccacttttgatctttccctctttgtggctcagaaaatgtacaggtaaggaacgagggcaaaggcactgggtacgtgcatgggatggtcgtggtgctgtgaaagaacacggggtttggaagcagcagacccgtgttgggtgaccttgggcttgtaccctatcctttcttagtttcctcttctgtaaaatggggattcttacctggcaggggagttgtgggggttatttcagattgttggagataattaatgaataaggagctttgtaagaactcaggagaatgttaaaccgccatcactagatgatacagctaccatagctgctcctcctgtctctggtaggagtatggtgtaaggagcgggtagaatacgtttatcaaaaacattggagtatgtaatgtgagaggtttggttactgggtagttcttgcctgttttgtttgcatgtcttcatgctcaccctctggggattttcctctgcaggttttccagggcagccttgtggattgggaccacttcctttatgatcctggttcttcccgttgtctttgagacggagaagttgcaaatggagcaacagcagcaactgcagcagcggcaggtgag

SEQ ID NO: 9355 - DNA, 6000 bp, Homo sapiens
aggtcaggagctcgagaccagtctggccaaaatagtgaaaccctgtctctactaaaaatgcaaaaaattagccaggtgtggtggtgtgcgcctgtaatcccaactactcaggaggctgaggcaggagaatcgtgtgaacctgcgaggcagaggttgcggtgagctgagattgtgccattgcactccagcccgggcaacagtgtgagacgccatctcaaaaaattaataaataaataaatggaggaatattgtcactgaaagaccagcctgagcaacatagcgagacttcatctctacaaagaaaaaaaaaattaagtaagctcagtggcatgagggcacaagtctgtagtcccagctactggggaagctgaggcaggaagatggcttgagcccaggagttcaaggcttcagtgagctatgattgcgtcactgcactccagcctggacaacagagcaagaccctgtctccaaaaaaaaaaggtgtaacttaatgcagtgaaaatcacctcttgtatggatagttctgcaaggtttttttctttgtttgtttgtttgtttggagacagaatctcactcagtcacccaggctggagtgcagtggcgcaatttcggctcactacaacctctgcctcccggtcagttcaggcgattcttgtgcctcagcctcctgagtagctggaattataggcacacactaccatgcctggctaatttttgtatttttggtagagatagggtttcaccatgttggtgaggctagtctccaactcctggcctcaagtgatttacctgccttggcctcccaaagtgctgggattacaggcgtgagccactgcacctggcctgttctgcaagttttgataaacaattttgtttttgagacggagtcttgctctgttgccaggctggagtgcagtggcgtgatctcagctcactgcaacctctgcctcctgggttcaagtgattcccctgtctcagcctcccgagtagctgggactacaggcgtatgccaccacgcccagctaattttttttttttttttttttgagacggagtctcactctttcacctgggctggaatgcagtggctcgatcttggctgactgcaacctccgcctcccaggttcaagcaattctcctgcctcagcctcccgagtagctgggattacaggccaggctggtcttgaactcctgacctcgtgattcgcctgcctcagcctcccaaagtgctgggattacaggcttaagtcaccatgcccggccactaattttttgtattttagtagagacggggtttcaccatgttggccaggatggtctcaatctcctgaccttgtgatccgctcaccttggcctcccaaagtgctgggattacagtcatgagccacagcgcccagctgacaaacattttttattttattaataaaacatgttttattaataaaataaattaacaattgtattaattatgtaaccattcccataaacaagatatggaatgattctatcatgcctccagatttccccgtgcctcttagtagtaactctctgcccaccaatcccctggcaaccactgatcttttttttgtccttaacagttttgcctttgcaaaaatgtcacataaagggaatcctgcagtctctagacatttgagtctggcatctttcactttgcataatacacttgagggtcacccatattgttgagtgtatccactgttcattgctttttattcctgagtagtgtttattcctgagtagtgcacagtttataccctcccaacttgaggagcatttaggttgtttccacgtttgggttattacgaataaaactgctccaaatatttctgttcagggttgggctcggtggctcatgcctgtaatcccaacactttgggaggccgaggcaggcggatcacctgaggtcaggagttcaagaccagcctggccaacatggtgaaaccccgtctctactaaaaatacaaaaattagcccggcatggcagcgggcacctgtaatcccagttactcatgagactgaggcaggagaatcacttgaacccaggaggcagaggttgcagtgagccaagatcgcaccactgcactccagcctgggtgacatagcaagactccgtctcaaaaataaataaataaagaaagaaaagaaataaaacttctgtacaggtttttctgtgagtaaacttttcactttttttttttttttttgacactgtcgcccaggctggagtgcagtggtgccatctcggctcaccgcaacctccaccttctgggttcaagtgattattctcctgcctcagcctcccgagtagctgggattacaggcacccaccaccacgcccggctaattttttttgtatttttagtagagactgggtttctccatgttggccagtctgttcttgaactcctgacctcaagcaatccaccgcctcagcctcccaaagtgctgggattacagacgtaaaccaccgtgcccagcctagccatattaatagatgtgtagaagtatctcattctaattttaatttgtacttctctctctctcttttttttttcttttaacagtctcacttggttgcccaggctgaagtgcattggtgcaatcctggctcactgcagccttgaattcctgggctcaagcaatcctccagcctcagcttcccaagcagctggggtcacaggtacacaccacatcacacccagcttgtatttctgactaatgatgttgggcatcttttcttttctttctttctttctttttttttttttttttttttttttgagacagagtctcgttctgtcgcccaggctggagtgcagtggcgcgatctcggctcactgcaagctccgcctcccgggttcacgccattctcctgcttcagcctcccgagtagctgggactacagccactacacccggctaatttttttttttttttttttgtatttttactagagatgaggtttcaccgtgttagccaggatggtctcaatctcctgacctcatgatctgcccgtctcggcctcccaaagtgctgggattataggcgtgagccaccgcggatgctgggcatctttttatgtgctgagttgccgtgtgtatatcttctttggtgaggtgtataactattcaaatcttttgcccattttttaaaaagtgggtcctcttattattattgagttcgaacgttctttatttgggatgcaagttctttagatctatgctttgcaaatattttctcccagactatcgtttgtcttttcatacattcttttaacaatgtcttttaaagaacagaagttcttaattttgataaagtccagtttatcaattgtttcttttatgaatcatgttcttcatgattttttttttttttttttttttttgagacggagtctcgctctgttgccaggctggagtgctgtggcgcgatctcggctcactgcaacctccacctcctgggttcaagtgattctcctgcctcagcctcccaagtagctgggactacaggagctcgccaccacgcccggctaatttttgtatttttagtagagaccgggttcaccatgttggccaggatggtctcaatcacttgaccttgtgatccatccaccttggcctcccaaggtgctgggattacaggcgtgaaccactgcgcccggccttctcttgtgctttcttctaaaagttttatatagtcatagtagacaccttataagtgtgctggattaaatgtgaaaatgtatgtaaagcccttagcacaaggcctggtagagactaaacaatcagctgagcctaagatggacattgactatgtaatttttataaggagcaccctcaggcccagcacacatttcctccacacagatgttgtgtcctgtcatcacagaatggcaggataccagagaagcaaaagcctccacccatatcctcatccaacctgctcctggaaccagtgaaggtgactgcagacatagagaggccatagagctacagggcagcaggagagccagccctggaaggtggcccttcccctgcagggagcactcctccatctagcctccgtttccatgaaacctggaggtctagcccaagctgtgatggggtgatggggactaggctctgtttactgagcacctactgtatgctaggcccttgggtaaggcattgaataagttagacaacacctgggcctcgggagctcacagactagcagcagaagaggccatgaacaaatgattgcgtaattaattgctagattcaggaaaggggcaacgttctggggtaggaggggatggggaagaggaagtctcagccgccgcctctgtgccaggcccctccaggctgggggtgggagggtgcgcgggcacagggacacacatgacgtcatcgtaagaggcaggggaagggtggtcctgggaggtgggggctgctctggagggctgtaagagagggtcattcactcgtggttcattcattcgagaaatattcatgcggcgcctactgcgtaccaagcaccctctaagaaggacgaacacagctcctgccctctcattatatttggggccgacaaagtggcaggaaacagccaaacaaatcaagcgtgaagatggtttcagcagagccgacggctcagaggggctgcgaccggggcaggggaccggggatgcggggcagggacacggcccacacttgctgtgcacgcaccgccctcccccaaacactttgcaaagaggtcaccgcactggctgcgagcgcgccctgagccccgggccgcagcacgcgcgcccccgcgcccgaggtcgcgcgctgcccagccccccgcccgcgccccgcgagctgcgcccgccgcgcacgacgccccctcgcgggagccctgggccgccggccgcgcgcgcaggggagggggcgggggcgccgcgcacgcgcacgggccggcggcgcgcgccgagcggggggcaccgcgcgggtgcagccacgatggaagggggtgcgtacggagcgggcaaagccgggggcgccttcgacccctacaccctggtccggcagccgcacaccatcctgcgcgtcgtgtcttgggtaaggacggactggccgacggctctgccaggccggggtggtgggggtgtgagcaaaggcggcgcgcccggaccgaccccgaccccgaccccaacgggcccccggcggcggcgcggcggcgggcgaggagctgtcctgcctgcggggcccgctgccgccgctcctccttcccgggcccggggcgggcgggatccctggtgctcgcgggagacgccgctccggctcccggagccctggtttcctggggcccccggttcgtgcgccccccttcccgccccgattgctgtgacctccaggccgcggctatgccgcgaaaggctcggattgtgcgcggccgccagggcggactggggaccgtggggacggagccagggtttaaggtggccttttttggggggtggatcagggcgtggaccatctcggtggggtgcatgccgcgcctgcgatggacgttggaggaggagagggccgggaaccgggttcgtattgcctagcccggcccgtgtggagcgatgagtcgggaactgagtacctctcttccacccgggaactgcctctccttctctgcgtgaccttgggctgggagccacccaggaaatgttctcgagaaatgaggacttcaattccgaggtggggagtgtcatctcctctctcatgcctcagtttcccaatttatagacaaggtgggcggagccttcttgaggcccccttgggctctgacatttcatgaaccggtaacacccctcccactcagcatgcacctggatgcccaaggcgggtgtctgggagaaaggtctgctcccacagtgaagaggccagggtggcctccagcctagctggggggcagggtcctcagtgcagagggctgagtgggctcttgttcagacgggtggtcagggag

SEQ ID NO: 9356 - DNA, 6000 bp, Homo sapiens
tggcgttagtgtgatcgcagggtgtttttcagccctctgatgtcaaaaggtgaagcacaggaccctactgtgtgccaggcctctgtgaatgcgggaggggaaaagagtgacaggggctatgtgggaggaaggaattgggggctgtgtccccttctggccagctctcaggcaggctcctggcaccacagggcctgagctgggagggtagagggtggagggtggggcctggtgtgcctggctgtgcccggctgtgcccagggctggctgtgtgcgactgagcaagtcacttatctctgacgaacaccttcactgggcgtccactttagactgtctggacaatggtttcttatcaggaagggatgatggtcagttattgtgtcaaaactgcaaaagagggatagcatcggacagctggttggtatcagtggtgaagtctttcaaaagggctggtttctggctagccctaaccgtcagcaggctttcttccctaaggaaggggttcaggaggggctgtatcgaggagtgtctgacctcccattctgttgtagccaagcactcagctttcaaggtttctctggggttcccttggccaagacggggggctgttggggggcttgggatttcattttaatttctcaaaggaccctttatcaaacaccttcggtgctgcccagcaccaccttgtcacacatcccacctccctcaccctccccacacgctgtcaggtggccacctttatgcccactctgcagaccaatgggcctaggctttgagtgtggagccctggcgcagctcggagggccccgaccggagccagctcactctgcccactgcaccgccatgctccctgaccacctggagccttggcagggctggggcttgatggcttggttctctctttctttctttctttctttttctttttcttttttgatagggtctcactctgttgctcaggctggagtgtagcggtgcggtcctagctcgctgcaacctccacctcccgagttcaagggattcttgtgcctcagccttcccagtagctgggactacaggcatgtgctaccacggccggctaatttttgtatttttagtagagatggggtttcaccatgttggccaagctggtctcaaactcctggcctcaagtaatccgcctaccttggcctctcaaagtgctgggattacaggcgtgagccattgcgcctggcctgtggcttggttttcatggcatgggtgaggagcctccccacctggagacccagggccaggagtgagatgccccagggaggtggaatgcggctcccacaggccaggcagcagctgctgaaagggtaacagacctagcaattgttcccagagccaaaaaggcctgggtgaaaggggacagcagggctgtaaggagacaccgcctgagattggctaatcttgtatctgggcttttcccacctccagctcccacagcctccttgtcaggcagctcagcccctagaggagcagtggggcaagagggccaccaaccaccctcccccatatcaccatggagcttggagccccagcctcccccacgtcatcgtggggcctggaggacggctgggagaggatggagagaaccagattccattgatgtcaatgcgatgtcagggcagtgattcgtcccattctgcagatgaagatactgaggcttagggattgaaatgactggaacacttggcgagctggcatagaacccaggtcttaagctccctgggattcagcttctccacctgctgagcacctccgtgcctactgtgtgccaggcctctgtgaatgtgggaggggaaaagagtgacaggggccatgtgggaggaaggaattgggggatgtttacccttctggccagctctctgggagggaggcttctggcaccacagggcctgagctgggagggtggagggtggggcctggtgtgcccagctgtggctgtgtgaccgagcaagttacttatctctgacaggctgggcgtggggaagatgtacttgccacacagcgcccaacacactgagtgccgcattgaggacatggaggcggactttggtatgaacccaacaaggctgactccacttcggcctcccaagaagcttgggaatctggaaaggtcaggagaacaaagacccaagctgggggaagatggagagcaagcaagtcccctgaccctggccagctctgggcagggcagcttccctggggagtggggcgtgtctttacttctcactgggcctcaagggcaggggctggggcttgggcaggtcctcctcccctttgccaggagcaatggaaatggaggaatgtgattattttgtgcctgccttcgtgcttgggggccaatgtcaaggttttcttgatgctcagaacgagttcaatggagaatccagacttgaaacagcacttctttcatgggctgagggacgcccagagttgctgctgaaggctcagggagggagagaaggttctggggaaggaaagtgtctgtgaggcggtcccttccagaggggaatgagtcccaggcagggagagctgtggcatggggaattgggggagggggacacatttgagcagaaattgaaggttctttgggggccggagaagaaggggcagagagggttgaacagccaggctggggagaggaggagggcaacatttttgcagggcagaatagactggattttgggggagtgacaattaccttaagcacatgtcatggagatgatttattttttttttgagatggagtcttgctctgttgcccaggctggagtgtagtggcatgatctcggctcactgcaacctccgcctcctgggttcaagcaattctcctgcctcagcctcccgagtagctgggattacaggcgtgtgccaccacacccggctaatttttgtatttttagtagagatggggtttcatcatgttgtcaggctggtcttgaactcctgaccttctgatccacctgcctcaacctcccaaagtgctgggattacaggcatgagccaccatgcccggcccatggagatgttataatggaatgtgcttagagtgataggaactaggaatggatcttacactttcaaatggttgggaaaacatcaaaaaatgtttctggacacgtgaaaatgacacgaaattcaaatttttgtgtccataaagttttattggaacaccgccaggctcattcttttacgtattgtctatggttgattttatgctacgatggcagagttgagtagttgggacagagaccatatggctggcaaagcctaaaagatttacaatcaatctcttaaagcaaatggtttgcccacccttgcttagagagagcctccaggaagaaaagagcagtgagggtgacgttgaagaagggggcaagactaggtcaccaggggctccctgtgccccgcccaggcactgaacttaagctgagggcaagtgggagccattgaaggtgcaggcaggagagtgacctgctcaagtgaatgttggagtaggatcactctgcctcctcagcaaggatggatgaagctgggcacggaggcacctggagcaggtagaccagccctaggcagcccggatggttcagcaaaggcctctgggactattctggagcacattcgctgggatatagaataggtagcgcatccctgcaccttcgacgatggcggcgcagagatgtctgctgcgtacccacaatgccttgtgcctcgcaccgcgggaggaagtggctgctctgtaggccccagaacggaaccacttgaaaggcgggaaacacgtgggggacgcctctgagccctgagaggaatggcctagagcaaggccacgaggagccagggcacgacacggtgggccctcggagaaccgctggtgggcaagtggcaggagagtaggctcaagagggttggcagggccgaccgggcctagggtggccgggtgaggggggcgggggaggggaggcccccccagttaccccaggagtgcgcaggtggcttcgggcatgtgagggacggagggggtcggacggaaggacacaggccggtgtacagcggtcacccacgccccaagcagacacacagactctgcagacaccgtaacaggcccggcaccgtgcacacatcacaggcccaggcctctgcacatggtcacagatgcctatgcgaaatcccggcccaggttcacgcgggcacaggcgcatccacgcacacaccgcaacacggatctgcacgtccatgcacacacaggcacagactcgggcacacggagtcacaccgacccgggcacgctgcggaacgcacccgtccacgcatacacagaacgggacttgctgccccgcacgcacaccaggcccgcactccgaactacccgcattccccgcacacgcccccgcgcaggccgccccgggccgtgggccggcgcacgcacggtcacaggaggggcgcgcgcacactcgcactcacacacactcgctcgcacacgcacacactcgatccagcacgcgcgggcggcgcggggcggcggcggccggagtctgcggtgcgaggcgcccccggcccggcgcggcggcggagcccggctggcgggggaggggagggggttgcggagggggcggggtgggggccggagccgcttgagccggcgggagcgggcacccctgcgcgccgcgctcggcctcgcctccgcgccccccgcgcgcccgccgcggtccctcccccgcgcccgtccgctcgccgggcccccgccgccgccccggggtgcagccgagcggccgcgccgggtccccgggacggggtggaagtgggggtggggggaggggatcggggccgggccggggccgcgctgcctgcgatgccgggcgcccgccgcagccgctgccgccggagcccgggatggggcgagaggctgcggcggacgccagcatctccccgccggggaccccgggggccgcggagccgccgccgccgctgctgccgccgttgctgagacccagcgggcgatgggtgagttgaccccggcgtcctggggggcgccgcggcccctctatccccgcgctgcccgccctcccgcgctgcgcttggcgccccccgcccggctccgcggcccactccccgagcgtgaccttagggggcgggcgcgggcgcactggggctgggggcccggaggccgcggtgggggcgggatgccggggaagccgctcggcgcgggccccctccccctacccgccgctcctccgagctccccggtccccggagggcagagcctcagcgcccgaccccctcccacggccgggcgggggacgtccccgaggcgcggggctcgagccgtgctttgtgcgcggcaccccccagcctccggcgcggctcccccacaacctccggcgcggcgcggggctggggtgggaggcctccgcgcccgccttccccacccccgaccccagactgcggcggcggcagccgaggcccaagcgcagtcgggggctgggcgggtgcgggggctgcggccgtagctacccctggggaccaggcagaggcaaatgtggagagggcccccggccatttaccggggtgggggcccccggctccttgcattgctctgcccagggcgggggagggaacctggctgagggagggcgctataaatatctgcaaatagtgagttctggaaccgggagtggggaggggagtgcgcctgggtgtgtgtatggtggggttcctgagctggggtgcagcaggaagggatgccgcgcggccagacctagtggtctgaggtcggatgacccccagccccggaagatgcccctgaaggcccctgatggggtgtgggcagacacactaccccagtgggattcctccctggttccccacttcattcctgggacacaccagtccagattcgccttgatgggggagttgtgagcactggcgtgtcgtttggggagggggagcagttatgaaagatccagacatggagcccag

SEQ ID NO: 9357 - DNA, 6000 bp, Homo sapiens
ttggtggtggtggtgatgatgttggcgttagtgatggtggtggtgatggtgttgatggtcattgtggtggtaagggtaatggtgatagtgatgatggtggtgatggtgatgacggtgatgatggttttggttatggtgatggtggcggtggtggtaatggtggagatggtgatggtgatggtggtggtggtgatgatgatcatggtggtgaggacaatgatggtgatattgatgatggtgatggtgatgatggtggtgatgatggtgttggtgatggtggtggtggtgatggtgatggcgatggtgatggtggtggtgatggtgatgatggtgttgatggtgatgatggtgttggtggtggtgatggtggtggtggtgatggtggtgatggtggtggtgatggtggtggtggtggtgatgatggtgttggtattggtgatggtggtggtgatggtgggggtggtgataatgataatgatggtgctggtgttggtgatggtggtggtggtgatggcagagaatgggctggggtagcagcccctggggatgacacagctggaccagtgcatgctcagccatccaccagagtgcctccccatttacatcattttgcttctattttttttttgagatggagtcttgctctgtcacccaggctggagtgcagtggtgcaatcgtggctcacggcaacctctgcctcctgggttcaagggattcttctgtctcagcctcctgagtagctgtgactacaggtgtgcgccatcatgcctggcttatttttgtgtttttagtagagatggggtttcaccatgttggccaggctggtctccaactcctgacctcagatgatctactcgcatcggcctcccaaaatgctgggattacaggcgtgagataccacacctggcagcccatcatgttgcttcttaacaagagcctgctgaagcaggctggaggagggctgagctttacagagaaaaactgaggctctaagaagctgacggagtcaggaatgggggtctgtgttccagacacagcaggcttctgctcctatccctgctcttggaggccagcctaattgccacactgctgcttggtgggctactcaggggaaggagcatcagggttaggtcctgggagcacctagaagaaggggactcagggatgtggaggcagctcagactctggcacctgatggacctgagtttgaatccaccaatgctgtcacctaaagcaagtcctttagtctctgtgactgcggacagattggagcccagggaggcccagctgccagtcccctcagggcttccagccatgggcacacaggcacctgcgataggagctaggccacagacacaggaaagagagatatctggactggacttgggggctttgggagtggggagtgggtcagggagtagtggcctgggaagctgctaaggaacaggtcagagggagatggtctgggtggtcactgggaacaggtcagagggtggaggctgggtggtcactggaagcatgtccgagggtggaggctgggtggtcactggaacaggtcagagggtggaggctgggtggccgctgggagcaggtcagagggtggaggctgggtggacactggggagagagttgagggtggtggccttaggggtgtggtttctgggagcaccacagtgaggggagaggtgtgagcacagagggcagcacagtgtggcggcattaaacaagccaagagaggcaacaagcaagtcagtgcaagcgacgtagcccagaggcaggaagtgggtagttttgtgcagtcccggaggccgggggagctctttccacctgtgtggtttcaggaaggacttcggtaatgctggggcgagggttgcaggtgggccactgcagttgctgcgagaccaggtgctttacctcgagaataaatctcaatccaccgccttctccctgtcttcaccagcagccaagggcaggccagcccagctcctcccagcccttcctgctccaccccttccccttcatccactctcccttcagcccctggagagatggcttagaaacagaccagagcacaccactcccctgcctaaaacccacctgtggcttctactgaacttgggataaaacccacgctcctctgtgttctcccccagggccctgctgaactctttggtttcatccgcctccctgcccgaggctcggcctcgcttgtgttccttaaatgcaccgagcgggccccattctcctggccttcgcacgtgctcttcctcctgtgctcttccagcagatcagtcagggctgcggcctcccgcgtcttggttttcacttaaacatctcttcctttagagagggcaagatgattgtctccactcccacctttccccttgtttatttacttcccagcactttttattcactgagtcaacaaatatcgattgagcacctagtatgctccaggcaccattccaggtgctggggatacagcagtgaggggatacacctcccttacaggcttctcttaggctggggagacagacaccaaatcatggagatataaagacataaattatgcaccgtgtttgatggtgataagagttgtggaaaagcagaaagagagaaattaattgatcggtgtgtctctctcctctgcggaagtgtgggctgaatgggggctggtgctgagtctggctcgtgccccagcatagcccgaagcccacacagtgcccacacatagtaggtgctcattgggcaaatgaatgaatcagtagggcctgggagaacagggcctgggcggaaggagaaggtgccccagtgagagggaagagcgggagcagggcctaggacctgaggaggtccaatctggccagagcaaatggccaggggagggagtggtgggctccgaggctggcacggtggtgggcagagctggaaccaccctagggagggtgcgtttcagcccaggaggttgacacgtggcaggccaaggtgcctgggagcttatgtaaggcccgtggctgtttttctggaatcaagagcaaagccctgagctcaggagaaaactccgcctccctgaccagccaggggaagtggcaggaggtgccaacccctgcccgttgcccccgggagccagagaaatgtccaaatgcatcagctccgggtggcttggtcgacagcccagcagcagctgggtgggcaccagggacgtggaccccatctctcaatcccacggctcagactggccctgtaggggttctaggatcccagggaccccagtggacaaagttttagggactagtaccctttggggtgaggtggtgaggggcaggccctgggagtggctgtccgtcccatcttgccattgactggttgcggaggctctcggccagcgagggcaccatcagttgtcatgaagcccgcctgggggtctggtgctgggattctggcctctcaacaccacctagtgcttcacttggctgggtgcatagccttgacaacccgctttgttctcttggcctcagtttcttcacctgccaaatgggcataatagtcctcctgaggttgttgtgagcatcagacaaggccagggagtagaagtgctttgagttggagtcggagccagcaagatgatttgcatcacctagaacaaaatgaaaatgtgggacctcttgataagcaattaagaatttcatgttggtgacagaagaattctaaagcaagttcagggcccttctgagcacggggccctgtgcagctgcctgagccacagacccaggaagcgggctctgaccggaattcttttttttttttttttttggtgacagagtcttgctctgttgcccaggctggaatgcagtggtgtgatcttggctcactgcaacctccacctcccgggttcaagtgattctcatgcctcagcttcccgagtagctgagattacagcgtgtgccaccacacccagctaatttttgtatttttagtacagatgaggtctcactatgttggccaggttggcctcaaactcctgacctcaggtgatccacccaccttggcctcccaaagtgctgggattacaggtgtgagtcacgtgcctggcctttgactggaattctatttctgctgttactctgctacatgtctgtcctgtcccttctctgggcctcggtttcttcatctgtaaggcaaggaggttagactctaagattcctgggttctcagccttgtaaggcagtggctgggaggtccctgggtcaagggctcagctgtaggtctcagctcaggggttacttcctcagggaagccaactgtgattccctcctggcttgccagcgttcccccagtctctgattctgcagcaccccaacattgcctttgtaacctgcattgtcctggcaataatgtctgtctttacaatcacctcttttttcttgcaagttttctttacctttgatggtgcaataaatacatagctctagtcttgtaaaaaagttaagatcccttccttccttccttccttccttccttccttccttcctttcttccctccctccctccctctctccctctctccctcccttccgtctttcttttctgtctataattacttaaacattttttctcttaaataatgaaagatttcaaatacagaaaattgccaatagacaaaaaaaaaagagttaatatcacaattatattctaagaaggctttattctccccactatcttcgtttgccaaaactgaggctcagccagggtgagcagacttgccccatgatcacccagcttggaagcagattccaagttgggtgcagctgggccctcagctgtttcgtaatcctcatgcaagagtgagggtgaggggcctgtggggctcaggtggggctgtcagagctgcatccgtccacttattggtggagaggcaggttggggagcatgtaccaggcctgtccccaccacgtgccaccctctctgtcttccccagggctcccagctcagtgtggacatggctgagagcgcctccccgccctcctcatctgcagcagccccagccgctgagccaggagtcaccacggagcagcccggaccccggagccccccatcctccccgccaggcctggaggagcctctggatggagctgatcctcatgtcccacacccagacctggcgcctattgccttcttctgcctgcgacagaccaccagcccccggaactggtgcatcaagatggtgtgcaacccatatcctccgcagcctcggctgatcggggccctgcaggggctgaagggtggggggctggattgagtcctgctgctcacaccttgctccggctgggagacctgaggtctgcggtgaggccactgggccttggtggtggtgagcgagctcagagggtgggtctggggagacctcaaatggatgaggacctggtgttctgctgatgtgaaggttctggaagttgctggtggctgtggggtcagtccagtggctggctggctcagaaagtccttgagtgtgggccccagacctgtgctgggctgggaatgcagatcagtcagactctggagccacctgatgggccgtgaccatacagaggatgggagccgtgatcaggaactgtgggcgtgggcagcggggcagccgatcccaacacacagggcaggactcattctccttactgtgcctccgagcagcctcttcccaggcctcctgcctccacttgctgcctccagtgggctcatgttccccctgcttaagactgtcatgatttgctatggtcctggaggtgcagagcaaagtcctaatccaacccatcagggcctgtgtgttccacccagcctcacttcccaccacttggcttcccccctgtgctcttctgagcctcagggtcctctcactggctcttccccctgtctgaaaagcttttcccttccccctggacctggccaaatcctttgctacatccttaaaatcccagcttaagcatcacctcctcagggaagcc

SEQ ID NO: 9358 - DNA, 6000 bp, Homo sapiens
gcttgggatgggaaatacagcttctgcttttggagaaaatacttcacccatgaggaccaggaccagctaataaggactgggagaaataaagggactatgtgtgggagtggatcttttttttttttgagagagggtcttgctttgtcacctatgctgaagtgccattgtgcaaacacttctctctacagcctcaatctcctgggctcaagcaatcctcctgcctcagactcccaagtagctgggactatagtcgcatgtcaccatgcctggctaatttttaattttttgtagagaaggcctcgctgtgttgcccaggctggtcttgaactcctgggctcaagcgattctctcacctctacctcccacagtgctgggttacaggtgagagccaccccatctggccagaagtggatcttgagggtgctagatgatgcaaatataaggttgaaaggagagagttttggccaggcgtggtggcttatgcttataatcccagcacctcgagaggccgaggcagtaggataccttgagctcaggagttcaagaccagcttgggcaacatagcaacaccttgtctctacaaaaaattttaaaaaccaaaattagttgggcgttgtggcttgtgcctatagtaccagctactcaggaggctgaggtaggaggatcacttgaaccggggagtcagaagttgcagtgagctgaaatctcaccactgcaccccagcctgggtgacagagtgagcccctgtctcaaataaaatgagtaggccaggtgtggtggctcacgcctgtaatcccagtattttgggaggctgaggctggtggatcactggaggccaggagtttaagaccagcctgggcaacatagtgagactccatctctgctaaaattagccgggcatggtggcacatgcttgtaatcccagctactctggaggctgaagccagagaatcacttgaaccaggaggcagaggtttcagtgagctgagatcataccactgcactccagcctgggcgacagagcaagactctgtctcaaatgaaaaaatacatacataaattaattaattaaaaaagaaaggagacagtttattgacaggggagaactctcctgcaacacaggatgtagctggagccagtcctaacatgcttctgggatagctccatgaaatggtttacaataataaggtggggatgctgggatggccattgcagagttttgggattttttgtgcatagtaaaatacacataaaatttgcctcttcactttatatattgtggtaggatatacgtaacataaaatttaccattttaaccacttttaagtgtccaatttagtggcattaagtacgttcacaatgttgtgcagccattatcactgtccatttctagaacttttttttttttaagatggattttcgctattgttgcccaggctggagggtaatggcacaatctcagctcactgcaaccctcacctcccgggttcaagcaattctcctgcctcagcctcctgagtagctgggactacaggcacatgccaccatgcccggctaatttttgtatgcttagtagaggcagggtttcaccatgccagccaggctggtttcaagctcctgacctcaggtgatccgcctgccttggcctcccaaagtgctgggattagaggcaagagtcaccacacctggccagctacacacttttaaacaacaagatctcatgagcactcactcattatcacaaaaacaggaagggggaaatctgttcccatggtccaatcacctcccaccaaacatgcttcctcacttccttaaggacttttctggaagtgcttctcagtgaggccttcctctactgcaaaaagcttcccctgccacaaagagcttctttttttttgagacagagtctcgttctgtcacccaggctggagtgcagtggcgtgatctcagctcactgcaatctccacctcctgggttcaagcgattctcatgcttcagcctcccaagtagctgggattacaggtgcttgccaccacacctggctaatttttgtacatttagtagacacagggtttcaccatgttggccaggctggtctcaaactcctgacctcagtcaatccacccgcctcagcctcccaaaatgttgggattacaggcgtgagccactgtgcccggccaagactgatcctttcaaaacatgtctgatcatgtcttttctcagctgaaaaccccctggtgactcccatttcccctaaaggcaaagccaaagtgcttatactggctggcaaggcctggcagaatctgcccttcctgctccttcctctctgatgacagctcctgctaatctctactatagccacagtgctctccagagtcacactgcacactcctgccacagggcctctgcactgacaatttccatggcagggaatgctggtcctccagaatatttcttcttcttttttttttttttgagacggcgtctcactctgtcacccaggctggagtgcaatggcatgatctcggctcactgcaatttccacctcccgggttcaagcgattctcctgcctcagcctcccaagtagctgggactacaggcgcccgccaccacgcccagctaatttttatatttttaatagagagggggtttcaccttgttggccaggattgtctcgatctcttgacatcatgatccgcctgcctcggcctcccaaagtgctgggatttcaggcgtgagccactgcgcccggccactccagaatatttctaagcatgcttcctcacttccttcaggacttttctcagagaggccttccttgatgatcaatcctctataaaatggtaacctccacctctcttggtattcctgggccctctcaccctgctttaagttttttacagcaattgccaatatcataagttatctttatgtggagtatatattttttcttttttttgagacgtagtctcgctctgtcacccaggctggagtgcagtggcgtggtctcggctcactgcaagctccgcctcccgggttcacgccattctcctgcctcagcctcccgagtagctgggactacaggcacccgccaccacgcccggttaattttttgtattttttaatagagatggggtttcaccatgttagccaggatggtctcgatctcctgacctcgtgatctgccagcctcggcctcccaaagtgctggtattacaggtgtgagccactgcgcccggccatattttttcttttttctgagacagggtctttctgtgtcgcccaggctggagtgcagtggcccaatctcagctcacttcaatctctgcctcctg[450 bp omitted]aattgccaataccatgaattgtcttttgaggggttttctgtctccccgcaacttgaatgcaatcttcatgaggacagggactttatcccccaccccacccccacttttttttcttttttttttactgcaaaacctagaacagtgcttggcaggtagtaagtactcaatgaatgtttgttggatgaacccaataagtaaacaagatagaggacacatgtagggatctgcccgtgaacctcgacccctggctcctgagtctggcagtgggtgcagtggcagctcctgtctgtgagggccccagaggctggcagcaggatgcctccgtggaaaattcccttaacgcctttgcctctgcagctgttcctccgggatgatctctttgggggatcatgctcagatatttgtctcaaagagtcccaggccaaacctcagggacctcagagcgtttagaaaaataacacctctgtgagcttggtccaggcagatcccatgcagagaggagtttgtccccttccagtccccgaggtcctggctattgccagcatggagtgacctgtgtcacctctgagtgccaggcaagggttcagcagctgacgactcagcttctgcaggatgctggcagcatagccagcgagatagttggaagccgtcagggcacagggaaggggccgagggtgccctgagtgtgcatggggggcagccctgctgcagtccaagcctttgattcccaagctatgtgcacagtttcctctggactctgccatgtggcccagccacccatacctggaataggggctaagccaagctgctctctcctccaaagggaggcagcctgtgtgctttgtccgtttgcctttgcagagacctcgatcttcacgcaaggcaagcagcagcccctgtaagcacacgagacaatcccaagtgtcagtgggaaggagatccctttcctgatggggctgcctgtgtccagtccctcccagcttccccagggccctggggctctgcaggcattcagaagtggaagccagccacagcctgggactgaagaggttaatgtgcatctgcctccgaatgttaatgtgtctaggtgatgtcagtgggagccatgaagaagggagtggggagggcagttgggcttggaggcggcagcggctgccaggctacggaggaagacccccttcccaactgcggggcttgcgctccgggacaaggtggcaggcgctggaggctgccgcagcctgcgtgggtggaggggagctcagctcggttgtgggagcaggcgaccggcactggctggatggacctggaagcctcgctgctgcccactggtcccaacgccagcaacacctctgatggccccgataacctcacttcggcaggtgagttgactgggagccctccctcctctgggctgtgggtggaaaatgggaaggtttcacccctgagccaaactgcttgggaaactttatcacagttcttggggacaagatctgtggtctgctttgctctgaggggcaggagaaaagggggcaatggtccgcaggggcagacgggcaggagcagagcagggggcgaaggcatattcagaatggcaaggaaggggggccagccgtgagacagcaggggaaggctcgctgctgggttccaaagatgcttggcagaaaaaattccaggctggaaaagcaagcgagagaagctggagggtggtatgtgggagacagctgggggctcactcctgcactgttagcctcagctttttactcccacttggatgatgaggtctgagacatccttactgccacctgggagaggccctgggaagggaagacttcacagagccatgaggggattaacttttctggtgaattaagcttcctgacatttccagagctgcggtgccctgggattccagctttgaaggagaaaggaaggaaggaaaagaggaaaggcttatgtagataatttttccaggctgctgagctccaacagacagtttctgtctctgcttcactcaagaagcccaggctcagaagataccaatcaaggaaatccccgctaggaagcctggggtagggagagctgctggcttgaccagggcacagccggcaaaagcctctacaagacagtcacccacagatatgcccaagaatcagtacacagtttccaaccagagatctccaaaatgaaacactcagggctacacataggaaaagc

SEQ ID NO: 9359 - DNA, 6000 bp, Homo sapiens
cccatctcagaatgcccagtggttgaaaggatgaaacctggaatttaagtgacttctcagtgatgtgtgcccttctctgacggttccttgttcatcccatgtatttactgactgcctgctatatatgcagagccaaagagtggggcctggtcttgaactatctcctcatctgccccttctggcacctccttcctcctgggctctttcctctaataccgtcatcctctctccaacctggttaatcctgtcctttctgccctcaaatgggcaccttcaaagaaacaaatagaactactccactcgctccctctctccctccctttactgccactattgattgttatagtcacttgctccaggaagtccacttgctgagtcttactgcagacagagcccaccccctgagctgtaaaggccctagggcacatgtttgtccagctgcctcttgcagctgggattgttaggtcactatagcgctaccaactgcatataccactgtgggagtcgtgctggtggcggtagtggtcacaggtaccaggggcagcagtgaaggggtggctctaatgccaagtccagtgaccagtgccagggtgcccagtggtggcaacagtggtgttttcagtgtgatcttggacattgctcctgtctactcagctgctagtctgtgagctccctgatatcctttaagacagcgttttccagcagcggcactattaacgtttggggctaggtaatcgttgggtgtgtgagtgtgaagagggctgtcctgtgtgttgtaggctattttagcagcatcccggcctctccctgccaggtgcctgtagcagtcccccagttacgacaaccaaaaatgtgtccagacattgccagatgtccactgggagggaaaacctctctggtccacagcccttctccttattccagtcccacatcttcctccccttccccatcactgtcctcagagagatgctgttgacagctccttgaggtgattctctcaggcttgttgttgtagttctctgctgtcaagtctgagctgactctctcttccggattcttctttcctcacctgcccccgtttgcatgaagttttttatggagctgtttctattttctttttgggcagccatactctctaagacctaaaagctgaatactcgcccggttactacctgataattctcatcgcttatgtttccaaaaccaaactggttatttccctctctaaccccatctctgtgtcaaacagtggagtacatgcttttggttaatccaattggaaggcttcctagaggaagtaatatctgaactgaatcctgaaagattaggggaagaggaagaaaaggacaggtgctgtgggaaaaaggggaaagtgtcagaggaagtaaatgaaaaaccatatacaaaattatcttctgtgacccgtagcacatgcccaatccatggtagatatcgaaacatagtggttacccagtctaatccatcccttttctttctttctttcttttttttctttttttttgagacaagtctcactttgttgcctgcctggagtgcagtggtgcgatctcggctcactgcaacccccgcctcccgggttcaagtgattcttctgcctcagcctcctgagtagctaggactacaggtgcttgccaccatgaccagctaatttttgtattttcagtagagatgggtttcaccatattggccaggatggtctcgatctcttgacttcgtgatctgcctgcctcggcctcctaaagtgctgggattacaggcgtaagcaaccgtgcccggctgtccatctcttttcagatgaagagctcaggttctgaggagtgacttgtcaaaagctgttctacctctcagagccagcccttgtcctcctgctagccagagcaaggtaccacctggaagagatgttcagttacatgggatccagggccagagggaaaatatcagtgcttcctgaggttcgggtccagccacccttcttccaccatttctactgagccttcagttgtaccccttcagtccacttggcgaggcatcacgccctctgggcaggctcagtggggaactatgggagcaggtgctgtgtgccacctctggagggggtcactgaggttctgggttgtggggggtgccctgggccagagtgagttgtatgggagttgttgctgaatccccccagagtaccagtcacacaccagtgtgaggggccttgcaagagccactgggcagcacagttgaaggtggcaccttcctgctcagtgctgtgtccagagcagggtttagttttctgtgtctttcagggtgagactggtgtattctataccagcctccctgtgtgtgaacaatgacgagaacaatgttgtcttgctttcccaaaaaataagacactatctatttctcattagttatacacgttcattataaaacgtaatttaagcaatactgaaatgccaaaaagaaagtaaaattcactccaaaagtaaaattcaccccaaatctcactactcctgtaactatgtctgacagccagctgttgggtcttccatcgtttttaaccttcaggtgagcacacagatccttattttttcttttcttttcttttttttttttttttttttttgagacgcagtctcctgttgcccaggctggagtgcaatggcgcgatctctgctcaccgtaacttctgcctcccgggttcaagcaagtctcctgcctcagcttcctgagtagctgggattacaggcatgcaccatcacgcctggctaatttttgtatttttagtagagacggggtttcaccaagctggccaagctggtctcgaactcccgacctcaggcaatccgcccacctcagcctcccaaagtgctgggattacaggcgtgagccaccttgcccggactctctttgtattttttctttcttttttttgagacagagtcttgctctgtctcccaggctggagtgcagcgacatgatctcagctcactgcagcctctatctcccaggttccggcagttctcctaccggttagctgggattacaggcatgcgccaccacacccggctaatttttgtatttttagtagagacggggtttcaccatgttggtcaggctggtctccaactcctgacctcaaatgatctgcacacctcggcctcctaaagtgctggaattaccggtgtgagccaccgcgcctggccagatccttattttttcaattgcaatacagcagtatgcaaggcacttactgtatgccaaagcttatgccgagagctggctgccagcagctcctcctgcctcgaggcctttgtccatgtcatcatttcccctttggctgtaacagctgcagttctctcataattttaggtttcatcttaaatgtcacttcttcagaggcttcttgacagcacaagtcagggcccttgttagtttcatcacatccattacctttccttgatcacttgtaccatcatctgtaatttatttttatgtttaatacgggtgtgggatttctgatttttttttttgctagactggaagctctcagagggcaggaaccatttgtttccctgccacagagatgttcaataaatattgtcaattgaatgtgcaaataatctcacttaaccacagctatgagggatgctattttatccccattttagagatgactaaactgaggcttagaacaattaacccaaggtcacagtgaattagtggatccatgtgtctgcctccacacagcctgtgtgttcttaattattgatcactaagcaacagctgcctctcacaaactggcaggaaacttcaacttttcccttttatcaatatattgtgaacgccttttcttgctaataaatatacatttgtgtgcgtaatttttaatgatcccatggtattccatcgtgtggatgtaatttacatattcatttccttattctcacttcttcctagttacagcacttctttaagcacttgtaatttttattcctttggataaattcctagaagtttacaacacgaccagctgcaagatggggcagtgaggtgcttgaaggagtgggtgggctgcacttcagaatcccggtggaactttttcaaaaaactcgtgcccggggcccccctctcaggaggccgtcggtgggcctgggcactggcgtggttttcaggtcctcagtggttccgaggtgccagagattgaggaccactggagtaagcgcgaggtcacggcgggtgcaaagcagaagacgtaaaatcctgaccgccctgggacaatctgcaaccttgtcaagcctccgtgcccgcctttgtaaggaggctgggagaagcgggacttggatgacccggactcccgtcccgagcgctggggtccaggtttgactccgctggctttctcaggcgggcagggcgggggtaggcagctgggaagatgacgtaatgtgctcccagccaggcctggaggcggccagcggtcgcaggtggagggtggcctgttaacccttcactcccaggccagtggacggacttgcgtgtggcgcagatccaacggagaaggcagcggctcctttaaacaaggcggagaaggttaagatgatgaccggacggctactccaggcattcgctccgaggccgcggggggagggacctcactatgcaaatctgagctgctgatcgatgacgcgccatcaccccacgcaccgcttcgctcgcccattggctgagatgagcctggtcccattgacaacaaacaggggggcgcgcggcctggaggcggggccgcagggggcgcgggctggggcgggggaatcccgccccgccctttctgtgcggcgcccgggcgcaacgcaaacatggcggcgggtggcacccgtcggtgaggcggtgccgggcgggggttgtcgggtgtcatgggcggtggcgacggcaccgcccccgcgtctccctgagcgggacggcagggggggcttctgcgctgagccgggcgatggacgacagcggcgagctgggtggtctggagaccatggagaccctcacggagctgggcgacgagctgaccctgggagacatcgacggtgagtggtgggtgggtgggagtgcgggggccgcgcggggaggaaggggttacggcggcgcgcccgggtgcgcgtgcgcccaccccccgacagccccggttcgcgcgggaagaaccccgtgcgcacggtgcccccggcggtcctcaacccttccggcgctgcgagcgtgagcccgacccagctgcgccgctccgggaggccgtgggatctggggcgccgcggggccgaaagcggcgcgagggtcgcgggttccagagcgcggggctagggacgtcgcgggggcgtctcagggagcggcctaaggagagcgcgtggccgccgcctccctcgcgcgcccacacgcggtttccgtggtccgctctcccgccgcccgcgaccgcgcgtcgcacctgtcactcccttcctggccgcggggacgtctttgggattcccggggcccagcccccagtctccgcgccccgaatccctgggcttctcaggattgaccgacggccaggtcgccgggtgctccgcgaaactttgggcagcgactgcagaagcaagttgctgatgaagagagcagtggcggcggagtgtggacacatctctccgggatggagacccgggcgctcctgctgtcacgctgcaaggggaattgagcagaagaaattttgagttgtggcccctcgggtacgggctggggagcgggtggcctttgttccagcgccttaacagcggagtggaagagctggtaggagcccagggatccactcttaaaatactaattttgcgaccacgggaacaacgatttggagagggtcagcggcttgctcaaggtcacccagctggttagagcctagttcttgcagttccttggccagtattggtttttttatacccctcctttcaagaaagagtccagttgactaggcta

SEQ ID NO: 9360 - DNA, 6000 bp, Homo sapiens; identical to SEQ ID NO: 1052

SEQ ID NO: 9361 - DNA, 6000 bp, Homo sapiens
aaaaaaaaaaaaaaagaaaagtcggcaagaaaaggaagttacgtggatgcagctagaggccattatcctaagcaaattcaggcagaaacagaaaatcaaataccgcatgtcctcacttacaagtgggagctaaacattgatacacctgtacataaagatgagaacaatggacactgggaactcctagaggtgggaaggagtgaggcaagggttgaaaaactgcctactactgttatggtcactatctgggtgacagaatcaattgtaccccaaacctcagtatcacactgtatacccatgtaacaaacctgcacatatacccccgaatctaaaataacaggtgatattaaaaaaaaaaaaaaaaagacggccgggcacagtggctcacacctgtaatcccagcactttgggaggccaaggcgggtggatcacctgagctcaggagttcgagaccagcctggccaacatggcgaaaccctgtctctactaaaaatacaaaaattagccaggcgtcatggcacatgcctgtaatcccagctactcgggaggcagaggcaggagaatcccttgaactcgggaggcagaggttgcagtaagccaagattatgccactgcactccagcctgggcaatagagtgagactctgtctcaaaaaaaaaaaaaaaaaaaaaaaaagagagagagaaaaaggaagttagaaaaacagccctagaggccctacattctgagtaataggagttccagaaaggaagtgattgctgcacaacataaatttgaaaagaaagagaagtgagaaaatagagggaaggaaatcaaagaaataatccaacttctgaaaagtaaagaatgagcttccagcgggaaagtgcctgttgagtgcaggcacagtggaggaaatgaagctgggtgtgttggagctcgcctgtagtcccaggtactcgggaggctgagggagaattgcttgagcccgggaggcagaggttgcagtgagccgagatcgtaccactgcactccagcctggattacagagtgagatggtctcaaaaaaaaaaaaaaaaaaaaaaattagtcccacataggggaatatcagtgtgaaactgcagaactctggggcccaaaatcttaaaaactttccaggaagaacaaaatcggttacatataaaggatccacagcgtggccggagcaggattgcttgagcccaggagttggaaacttgtctgagcaacatagcgcgaccctgtgtctacaaaaaaataaaaacaaaacaaaaaacaaccaaagacttccgaaacagaatggctttagcctgctcaaccgcagtgtggcagctggccaacagcatctcttcatgattctgaaggacaacgatctgcagctcagccaagcatcagccatctatggggtaggatgcaagaattcagcaatgttaccttccgggcagtctttctcaagaactcctggaggataggctcaacacaagcaaggggggaccaagaaagaggaagatgtgaaatccaggaaataaggacccatgcaggagggggcggaggtggtgaagaaagacccgggcatggtgtgtgtactggacctgtgcagcctgtccagcggggagcagcgtgacttgagatgtgttgagagctggcattaccaacatccctactgccatgctgctcatttaggtacagaatgccccacaagcttggcccagattctttttttttttttgagacagagtctcactctgttgcccaggctggagtgcagtggcatgatctcggctcactgcaacctccacctcccgggttcaagcattctcctgcctcagcctcccgagtagctgggattacaggtgcccgccaccacaccctgctatttttttgtatttttagtagagacggggtttcaccgtgttagccaggattgtcttgatctcctgacctcgtgatccgcccacctcggcctcccaaagtgctgagattacaggcttgagccattgcacctgacgctggcccagaatcttgcctgcacctgactggtccctatcacaggctgaggaagccctgttctcgccctgctgcctgggtctgctgaggacacatggctcacctgacaggcctcaccttgctcctgaggtctgagcaccctactcctcagggcactgtgagctcagaagcaagagacagaacagctcatgcccctgaccatttcctgctgaatgcgcatgccacagctgtgctcaacgtcctcacaggggagccccacccacaaccatgccctctgcctgccccagaggggcctcttgtcagtgcccacagaggccgggcccagcctgtaccccaggcgctcagctgagtttatcttcccgggagtcttctggcctggccatggtgcctgttctgccccagctgggggtgtgctgcctctctgcacacatagtactcagggaaacacacccgggtgggattcataaaaccctaaaggaaagcaagggcgtgatcaacccaagtcaaagtaaaggtgatctctggggaggggaggaatcgctggggaggtcaccagggcgctcctaggactctcgtaatgttctggtcataactggggaatgggcacacctggtattattgttgtaatgtgtacacgtgtgtggtttttttttttttttttaaattgagttttgctttatcacccaggctggagtgcagaggtgtgatcacgactcactgcagcctccacctcccgggttaaagtgattctcatgcttcagcctcccgagtagctgggattaaaggtgcccgccacaacgcccagctaatttttgtatttttagtagagatggggtttcaccgtgttggccaggttggtctccaactcctgacctgaagtgatctgcctgcctcggcctcccgaagtgctaggattacaggcgtgagccactgcaaccagccacatgtgtgtcttatttttattttattttattttttgttttgtttttttgagaaagagtctcactgtgtcacccaagctggagtgcaatggcgtgatcttggctcactgaaacctccacctcccggttcaagcgattctcctgtgtcagcctcctgagtagctgggattacaggcgcctgccaccatgcccagctaatttttgtatttttagtagagactgggtttcaccatgttggttaggctggtggcgaactgctgacctcaggtgatccaccggcctcggcctcacaaagtgctgggattacaggtgtgagccaccacgcccggctaagaagggattttttttttttttttttgagacggagtctcgctctgtcaccaagctggagtgcagtggcaccgtctcagctcactgcaacctctgcctcctgggttcaagagattctcctgccttagccttccaagtagctgggattacaggcacacaccaccatgcccagctaatttttgtatttttagtagagatggggtttcaccatgttggccaggctggtctcgaactcctgacctagtgatccacccacctcggcctcccaaagtgctgggattacaggcatgagccaccgtgcctggccagaaggaattttaaaaaagaaaaaaaaaaaaaaaaacaaagctgccaggtgcggtggctcacgcctgtaatcctagcactttaggaggccgaggcagtggatcacttcaggtcaggagttcgagactagcctggccaacatggtgaaaccccatctctactaaaaatacaaaaattagccgggcatggtggcaggcgcctgtaatcccagctaccgggaggctgagggaggagagaatcacttgaacccaggaggcagaggttgcagtgagccgagattgtgccattgtactctagcctaggagacaagagcgaaactccgtctcaaaaaaaaaaaaaaagaaacccagaagaaaaagatgaatgaagaatggaaccaagcctgggttatccttgtcttcaggccaacacagtaaaaaatagatttatgtatgtttgttttttaatagaggaagaggctcacaaaggcaaaaatgccaggtcctaggaaagccatactgcagcctggctggtccccaaggaggctcctggcttctgtgtctgggtagaagtagccacagttctccttggaccctgcaggatcagtttgggccaacgtggctggttcaggctgatggggcgttgccaggctgagttgtctggagggagctgggacagccttgaactgcagcaagacagccatagtgccaagggcctggggctggacacaccctgcatgggagtggacctgggcagctggaggccacctctgggctgtgatgatggcagcctcccctcactgagcgccgagcatctgaggggtgtcctgcctgcatcaccgcgttgcggcctcatcagtcccacgactttgtgcccattttacagatgaggagatggaggcccagagagccagtcagaaagtggctgggccaggactaagagtgcagcgcgctgcctccgtgccctgcgtcaacagctcaaggaactggggtgctccggaaatggggccaaggctgctgggcagcaggacgctcagggccttggcctcaggagaggtaattccccactcggagatcggtcttgttgctgcattttatagatgggaaaagtgaggctagaagagacgacaaacgacacgccgttggacacacggcaacgttttagatgttgggtctggccgggcggccgtcaccggtcaccatggggaggaggaggagccgagagacttgctcgcggccggggggaggcagaagcgcgtcccgcgggagaggtggctttgaggagtgagctcccggtcccgcggggacgcgagtgggcccagtgcccgggctgccaggcggggcggggcggggccgggcgactgagaggggcggggcctggcggctgggaggggcggggcggatgcggggacagcggcctggctaactcctgccaggcagtgcccttcccggagcgtgccctcgccgctggtgagtgaggacgggacgcggagggggcagcgggaagtgggggcccgcatggctgcgactcttggcagcgccgcgggacagagggaaactgaggccggagccgcagactggacacccgagggggcgacccggggcagcacttggggctcggctaccgggtcagggggcggcgggcagcagagtctgggcctccgcggccggggttccagcgcgggccgcctccggctgggggttcgggagggaaaacttggacaaccctgccacgcccagcccttggccgcgtggcttctcctgcaggaagcgcggtcccaggagtggccgacgctccctctcctgcccattccgcggatgggcaatcccaggcggaactcccttgagggtctcagaatatctgggagacctcgggctcttgatctccgagacaccccgtttcgtagtggagaacagtccagatcggggaagtttattttgcccaaagccggttagaggccccctggccctcgattcccagtgcggggctcaggtgcgttgcagcctagacgggtcttactgtgagccgagcagcctctgggacctgtctgcttcccctaccccttgcaaagaagccggagcccaggtaggagaagcgggggcttcctgctgtgaacgcgctgctggccagggcagctgccagaggccatggcctggcgtgggcctggagcccctctggccagcctgccaggggccagggctacgggataccagcagcgtgccctgggctggatggcaggagagacaggacttgaggctgtcccagaatgggctcaggcagggcgaggatatcaggggaggtggtgtacaggaagcagccgcccagcttgcctggcacacagcaagccctgcccatgaaggcctactgccagaacagtgggcgaggcccggcgtctctgtggagtcggtggggcccgggacagggcagcctgaggcaggtt

SEQ ID NO: 9362 - DNA, 6000 bp, Homo sapiens
acacaaaaggacaaatactgtatgattccactcacagggagcccctagagtagtcagattcatagagacaggatggtggtttccaggggctgggggaaggggcatggggagttagtgtttaacgggggttgttgcagtttggaaagataagaaagttgcagggatggatgctggtgatgtttgcacatgacgtgaatgtacttaatgcaactgaactatacgtttaaaatggttaaaatggcaaattttatgtcatgtatattttaccagaactttaaaaggaaaaaagagagcactgcaaccagagccaggacactgggccaaggatggaggcgcagaggtgaggcaaggctggcactgggcccatcagtgttccctacctgttgctgccagcgtgggttgggaaatgtcgggccaggtgtgtggacgtggaaggtccagatgcagcctggggcactgggaggaggacagcagcaggcaaagggctgctctcacgtatgttctgtcccccaccctgaatctggttcctatcccgtttttgcccatggctggaattagccagttctctcattgacagaaatgtctctgtgaacagatcaaggtgtctggcaggttggcagagaagctgagacctcccacagagtcagtcctcatggtgctgggtttggtaactgggtgagggatgccagctttcattttcccagtggtgtagggagaagaggtcaggctgacactgtctggacgcagtgtgcccacacagagctggcatggtcaggggtggcaacgatctgtatttccagctttagagaggaaatagacactggagttcgagcacctccttgctccccttcgtgaatgttggggtgacgtaccatcaattcttgtgattcatggtggttacatttataaagtctccacatacactggatcagccaagactgagtcattgctcctaggggacggatggggttaggttccatccaggctctgggcacatttttgacaaatgatcgatacataaccttgttttatgtgtgttcctggttaaagacaccgtaatcgataacttgttttttttttttgttttgagacagagtgtaactctgtcgcccaggctggagtacaatggtgggatctctgctcactgcaaactccacttcccgggttcaagtggttctctcaccccagcctcccaagtagctgggattacgggcatcatgcccagccattttttgttattttgtagagatggggtttcaccatgttggccaggctggtctcgaactcctggcctcaggtgatccacccaccttggcctcccaaaacgctggaattccaggcgtgagccactccgcccagcggataacctgtatattgttgattcattaaccttgaacccacagcaaacagcactagaactcatgcctaaggagcttctctaatgcatggactttttgtttttatctgagacagggtctcccaaagtctgatattgaaaagtggtcctggacaggcgaggtggctcacgcctgtaatcctatcactttgggaggctgaggcgggcagatcacctgaggtcaggggttcgagaccagcctggccaacgtggtgaaaccccatctctactaaaaatacaaaattagccagacatggtggcacatgcctgtaatcccagctactggggaggctgaggcaggagaatcacttgaacccaagagatgggggttgcagtgagctgagatcgcaccactgtactccagcctgggtgacagtgagactccatctaaaaaaaaaaaaaaaaggaaagtggtccttagcgttcacttatagacgttgccaatcagtcccacatcatatcacaagtactgggaactgaaatttgaagaccgcaaggaaatgaacatttacgactcctggaaaatagcacttccttatgcaagcatccatgccatctgatgatgttttgacacatgaattcacttttcctccttcccaagtgcctcagccaccagtcctctccattcttccaagtagtgtctgtgtctgatgtgagcagggcacagccacaactctttgtaccatgggcaaggcagtaacttctcttttgagagaattgttcaagagatacaaagaagtctccctggggcctgaacactgagttcaagataagaaatgtttataactctgtgctggcagccaagagctggatcccagttgcagatggggctatgcgtagcagtgagagtgggagacacagagacagggactgagagagagagagagagagatgggatcagggataagggcagtactgccaggcactgggctgggtgctttctgttcatcacatttaacttcacaatgcccctcacacaactgttttctcccccatggtacagatataaaaagtgaagctctgagagatgaaatgatgcttgcgagtcttgtgcactggctgtctgatgccaaagcttgcagtctcaaccatgatatcatgtgcctgtcccactggaggctggatggggggctgagagagctggaccatgaaacccttgcccagctgggtcctctctttgtctctggaaagtggggagggcccccagctgctgtctacatgcagtgacgaagagggggtgagtcctcagccctgctcctgtcctgcccacatctgggtcacactggggatgacagatgtccagtgtggctggccaagaatgaatgccggtggacaggaagagaatatgaatgcctgtggctggtggcagggtgactcatctcgggccttcggtcacagcctcaaattcctgtgccagagcctggccctcctgtcattagtcctaagactggtcatgcaatgcaggagggatggatgggtacaggaggctagaggttctgaccccagctgtcccctccagaagcctcagttccgccgcagccctgagcgtgaggtgggggtggagggcagttagggcaggactgtaggtaatgcccctctccagcaaagccaacacgtcaggaatagatgggaccccctgtctgcttctcagctctcctgaccttccccgggacttaggacctgaccctgccttgctctgggcctccatctacaaagtgtctatgtgatgaggcagtcagcccaggtattcactaaggcctgaagctcccatgccctgggattcctgcccagagaaaggaggcagccctgctcccagctcccctacccctccaggcaaggcaaaagcaaggactgcagcagaatggggaagctcagttgaacatgaaccacccaaccaatccaggtgcttctcaggtgacatttggaatcctgacagcaatgtcacctgttttacaacaccaccagtcattctgcagttgaggacactgagccacaaagagggcagaggcctgaccccaaagctcacatactctgcattcctccaggtctcacggagaagggggagggcttcctggtccactccagctgggggcgctatggcccggcagaccagggtcctccagtgaggagctctggaccaaggtctaacttggctccatgtactgctgtgggcttgctccacccagtgccaggggtaggtcaaggtcaaggggcctcttaggcatctcctaagggcatgctactatccaaatgtttgtgtccccactaaaggtcatctgttgaaatcctacaccttaaggtgatgatctttggaggcgggggcctttggaaggtgatttgatgagagggtggcacccttatgaatgggattggtgcccttatcaaagaggcccagaggtgaggatgtggcaagatggcaccttctacgagccatacctctcaccagggaccaaatctgctggtatcttgaacttgggctttccagcctccagaactgtgagacagagaaataagccaggcgaagtggctcacccctgtaatcccagcattttgggaggctgaggtgggtgatgacttgaggtcaggagttctagactagcctggccaacatggtgaaaccccatctctactaaaaatacaaaaaattagtcaggcatggtggcgcatgcttgtaatcccagctactcgtgaggctgaggcaggagaatcccttgaacccgggaggaagaggctgcagtgggccaagatcgtgccattgcactccagcctggggggaaaaagatagaaataaatctcttgtttgtaagcccctccgctttaaggtgttttgttttcgcacctgaacggactaagggactaagggaccaggaatcatccaggcctcagcttcccaaagcactccccactccccagttcctacagggccccgaccccagccccagcacccgtcattcacattttttacttacaaaggaaactttgaaatggacacttcctgttactttcattcaatgaaaaaaatccccagcacttgaaggcaatcatacagaaagcctgcaacaacgcagagagtagactcttcaggtggtggtgcctgctttaggctggctctccccgggtcaaaagggacgtgataaagtgttaaagtgatgttaaggatcaagtgggcaccaactgcgactcccctcccaccccccgacttaacagatgtcaaggaaaacagaaggaagccgtttctctccaggacatgcagtgtctgctggagttttggaaaaatgctttctctcgagtcgctgcggggagctcccaggctggacccccccgcacaggtcctccgccatcgccctcccagcccccgcccccaatccccctcccagacccggtccccgcccccatcccccgccagacgtcgtccccacccccatccccctccaagccccgcccgggagggcgtcctgcccgctcattgggcctcccgccggctcatttgcatggtccgaggggggcggggctgacgtcgcgctgggaatgccctggccgagacactgaggcagggtagagagcgcttgcgggcgccgggcggagctgctgcggatcaggacccgagccgattcccgatcccgacccagatcctaacccgcgcccccgccccgccgccgccgccatgtacgacgcagagcgcggctggagcttgtccttcgcgggctgcggcttcctgggcttctaccacgtcggggcgacccgctgcctgagcgagcacgccccgcacctcctccgcgacgcgcgcatgttgttcggcgcttcggccggggcgttgcactgcgtcggcgtcctctccggtatcccgctgggtgcgtctggggacgctgcccgggctccacgtgcggagtgggtgccccctaggccggggagcgggggatccccaggggtcgcggggccctggaggagcgggcatcggacgcggacacggcggggtgcatcccgagggccccctccgaggcagatgcttcctgcgggggcgctgttcctgggcccgggaagggggcgttggaaccccgagcggtccgggccgaagcctgggactctcgtgcgtccccacccctacccccatcaggcgcccgtgcatgaagggagaccctcacctccggactgagagtcggagcgtctcggagcgacggggagtagggagcgggacccggggcggagggtagtgctggcccctgcggactccgggtcccctgtgtcctctcgggaggggctggacgggctgagctgccgaggggccgatttgccctgggccggacaaagagtggggctttggccggtcccccacggtgggctccttccctctggggattgagggactcaagacaccccgcgcctgcgcttttcttttctttttttctttttttttttttgagacggagtttcgctcagtcgcccaggctggagtgcagtggcgtgatctcaactcactgcaagctccacctcccaggttcacgccattctcctgcctcagcctcccgagtagctgggactacaggcgccagccaccaagcccggctaattttttgtattttttagtagagacggggtttcaccgt

SEQ ID NO: 9363 - DNA, 6000 bp, Homo sapiens
ggaataatcagtatgtagcatattacacgtcaggcggcaacattctttttttttttttttttttttgaggcagggtcccgctctgtcatccaggctagagtacggtggtgcaatcatagttcactgcagcctcaacttcctggggtcaagccatcttcccacctcagtctcccaagtagctggaaccacatgtgtgcactaccacacccagctagtttttttttgtagagacagggccttgccttgttgcccaggctggtctccaagtcctgggctcaagtgatgctcctgccttggccttccaaagtgctaggattacaggtgtgagctaccatgcctggtccaacattcttcatttggtaaatggctaaacttagtgcagagtatgagcctgattttgtttaaaaaaaaaatgtgtgtgggtgtgtatatgtatctttgagtgtatataaaaagactgaaagagggctgggcacggtggctcatgcctgtaatcccagcactttgggaggctgagggaggcggatcacttaagtcaggagtttgagaccagactgggtgaaaccccatctctactaaaaaatgcaaaaattagctgggcatggtggcgggcacctgtaatcccagcaaccagggaggctgaggcaggagaatcacttgaacccaggaggtggaggttgcagtgacccgagatgcagtgagactccacctcaaaaaaaaaaaaaaaaaaaaaaaaaaagactaaggatatatatcaaaacccttatggcagactgttatttgtaattgtattttatttgtcgtgcttatatgtgttgcccaagtttctatggtgaacggtatgcatcactttcagcatgagaaaataactcctaataaacgtgattcttaaaggactctccctgtgtacatcctttccaaggagccccgatgtaccctgcttccctcacagccaagctcctctaggacagtcctccctagggggttacggccttgctcctttgatggccctgccacagcccaggggctctttcctgggcactgtggaccagaccctcctagaatccctctccttcctcaaccccagactctcaggcaccccatctctatcctggacaccgagcttgtcaccaaggcccagctgcagctgctgtgctgagtgtgcacagccacctctgggaaggctgtgctccccctgaggacctgggtcctcagtctctgactctggggggattcggggccacctacccaccttctggctctactcaacaccagcagcccctcaacatcaagccctccagctcacagcacctcagctctgcagctccaaagccaccccagcctggaactggggactcagggagactccctcgctccaactccagctggtcccagcactgcctctgctgtcatctctggaatctggtctcttgtccccagcccactgctgccagggtcagccctggtactttctacctgggttgctgcaacagcttccctctgggggccgcctgttttcagccttgggcccatctgccctccacgttgctgctgggcaagctgaggccccaccacacccccagcaccttcctgtgcctccaggccttccctgccagtacaccccctccagcccctgaagccctgtcagcagctcagagcctttccccggagtcaccctgcttcccgaggggacccacgttgctgctgggcaagctgaggccccgccacaaccccagcgccttcctctgcctccagactccctcctagcacaccctctccagctcctgcagtcccaccagcagctcagagcctcttccctgagtcaccctgcttcccgaggggacctccacccagggaatgcccttccaggctcctctcactgattcaccttcactcctcagaggtcaggtgctggctgatagaggcaatgaggtgagcccctcacctcagggcgctcagcccctgggaaggtgatgaaaaagggcaccccaaggggtgtcccaaactaataggtggatgactcccgtgggaagatccagtctcccctccccatggccaattaaatttggggtgtttttctttacttttttgaggcaaggtcttgctttgttgctcaggctggagtgcagtggcacaatcacagctcactgcagccttgacctcctgggctcaagcaatcctcctccttcagcttcctgaggaggttttaattaaataaattaaaagctaattaaaaacatttttttttttttttggtagagatggggtctcactgttttccaggctgatcttgaactcctggactcaagcaatcctcttgcttcagcctctggagtagctgggactacaggtgcttgctactatgcccagctattttttttattttttatttttattttgtagtgatggggtgtgtttcctaggctgatcttgaactcctgggctcaagcaatcctcctgcctcggcctcccaaagtgctgagattataggtatgagccattgcactcagcctggattgtattaaggaaactagcttagtcactaaactgcacttctacttctgattggacaagattggcactttgtaaaccaggttttctgggatgctggtttccttgaagatgtttctagctggtattatcatataggataggctgagttatgctgcattaacaagcaaaacccaaaaggtttatttctcattcgtgctgtatgtccagcaaatgtggctgggcttcattttaagtcgtcctcactcccagacctagcctgtaggtgccccaccattgggggatcgctgattgccatggcatggttagagaaatatggttcttaaaggttctcatccagagtggcacatctctcttctgctcacaatgtgttgaccaaagcaagtcacatggatgggagcagggagatgcaatcctctcttgtgcccaaaagaggagcacaagaaatactgttgaatagcattgccagaggccacagaaaaatctccaaaaccaaaaatctctatgacccaataaattcaagaaatactgggttaaagagaaggaaaccagtatatgcactgtgagacttctcagtctttattatatacattgtaaccatcacagacagcctttaatatatacatcttaactatcacagacagccttcagtatattatatacattataaccatcacagacagccttcaatatattatatacattataaccatcacagacagcctttaatatatacattataactatcacagcctttaatatattatgtacattgtaactatcacagcctttaatatattatatacattgtaactaccaccgcctttaatatagtatacccattgtaactatcacagcctttaatatacacattgttaactaccacagacagcctttaatatattatatacattgtaactatcacagatagcctttaatatatacattgtaactatcgcagacagccctttgtttgagggtaaagcatgtgactttgttttcctcctgttccctctgccatcctccagggcctcacacacaataggctctcaaatattgcaaccatcttgcactctgcagggcaacctcatggcttatcctttacaagtggcatactcagaagaataacgaggaagaaagtgtaagaaaagagggctgtttgggcaaagaaaatctggttgattcgatgtttacagagtgccaggccccatgcttgatctcatgaggtcctcagaccttatgccttaggctatcatttccattttacagataaggaattgaggctcagggaactgagagtgagggaagggcaggggcctggctggtgctgggttctgtctctttccaggcaagaagggacatgtggacttgaatatttagctcagggatgttggaggcctagggtgctgctatttaaatggaaagggtgtcagggtttctgggagggagtaaggggacagaagaaaagatgcttctgttatcagaagggagtggcaacgtgacaggatactgaagcttcctcttttcttattctgtctcgtttctttcaatatacttatcacaatgtgtggctgatatttattatgcctttttcttttctattctcttttcttttttggggcaggggagctgttttgccaccaaaacctaagcccatggccgtcttcttcaccgatatgactggttctcatgcaagcacctagatggccctcgcccataattactggctgcagttgagtgaatagcggtcattatctagcgcccaccgtgtgcccggcccggtgccgggagctttgctttccgtctctcacattaggcccttttaatccaacccccaagaaggagacacgaccatcgtcttcattttgacgattttgagtgggggttccaatgacttgaacgaaaggagccagggcaccaatccgggtttgtgtagcagatgccggtgagacccgactactgcagctcgggggtggccggacccggggtctccccgctgagtctcggggcttcaccggcgcgtgggcacaagcacagcaccctcgggtcgggggtgctaggagggctaagagcagcaggacttgagtgacacccaacagctggtctgatctctttcaggcgccaacgccagacgccagcctcccagcggaccctctcgcagacccaccttcaccccacgcgccctccccacacagtccacgcgccagcagcttcgcggatgtcagtgaacgctcttcgcttgcgcagtcagaacgtcctccgcggccgtgtgaacatccgggtcacaggcgcataaggaccaatgagcgaaggcatcgcgagccagggggcgcggagaaggcggggaatcatggccgcccccagtgttccgcgtccgggggtttgtgggagttgccttgacctgcagctccgccaccgcggacccgccttctgccctcagcagcagacgctctgtcccgcccgggcagctctgcgaggcagcggctggagagggaaccatggggactgtgcacgcccgggtaagaggcccagcgacccgcgggctgcgaggcctctgggccagcagggcagacgggcgccgcggggagacgctctcgtggctgcgcccagggttcaccgggagagagggtgccaagggtgccgggctgggtggaggaggccgaaaagaggtcgcctcgggccagcgagtcttgcagaccttcgagcaggaacctgataggagggacgagacttggctaaaggtcactcggcgagtccgtggcccaaaggacttgccaactttctgtgatgtcttagaccgcagtgaatgtgctctttctttgcatgattttaagttttctctctttactggtcacttccagcctttccccgctcagccgctgctggagccattgtaggctcctagagcaacaagaatcctttgaagtcttctaactcaaacctatctaggggtcctcttttctcctgtctaccgtgcaaaagacggaaccgctctctgccttacttcctgttttaaagtggaggtagtaatagtacctacctcgcctggcttaaaagagaattaaaagacaatgcatgtgaatacttgggtgcctggcgcctgactaactgtactggttgccaaactcctctcgtttatcctaatcttaaataagggccagataatgagttacttctccaaggtcacatagttactggttccaaatggcctaaaacctcagatttcctgagtctcagccccaacactacttttctactgcaactttgattgcttcacttgacctgcatagacgttttcagtagttccccattaacttccaaaaaaatttagcacagaagtcgcagcctgacatcgataattggacttaacttccctttatatgtctttcattcagatcaaacaccgtttctcttctgacatctctttgtgtaactgtaataggtctgttgctcagtgtgctcgataagtcaatacactcagacagtggg

SEQ ID NO: 9364 - DNA, 6000 bp, Homo sapiens
cccaagtgaatttcccaccatgactcatttctcctgtacttccccctcttcagaatgagccaaacaaaagtcagcaatctttgaagtggacatttgtttataaatctaagatttttttctttccagaacatgttttgggcctttgcagattattgttttaacattttccttcaaatgttctccccatatttgggcaaggcaagagacaagaggactttttggggtttttgttttttttttaaagaaactgcagcgttttggagaaaacaatttcctgggcctacttcctctcacaggtgattctgagctgggcctttaagatcaaccctgctgaggccaggcacggtggctcacacctgtaatccttgcactttgggaggctgaggctggtggatcttgaggttagaagttcaagaccagcctggacaacatggtgaaaccctgtctctactaaaaatacaaaaattagccagatgtggtggtgcacacctatagtcccagctacttgggaggctgaggcaggagaatggcttgaacctgggaggcgaagcgtgcagtgagccgagatcgccccactggactccagcctgggtgagagagcaagactccatctcaaaaaaaagaaaatcaaccctgctggcctctgataaactgcaggttcacaaccaggttcacaaacaattgttgaacaagaaatgtcagtctataaaaattcttggaagaaaaccgcagccctgttcaagagttccttacctctgggacattttctgtgtgctgaagataaggatctgatcatccgctctctgcatgtcagggctgagaggtgaccaaactccctccccactttctagaaggtaaaccgacacccaaagaggggaacagtgcatttctgtggcagagaacagactctgtcccccaacattttcactttgaaaaatgtcaaacctacagaaacatttcaagaacactacagtaaatactcatacttatttaccaattgctaacattacactaaatttactttctctttttctctcgaatctcatatatatgttagtttcaggtatcatgacactttatccacatgcaagctgggaggatcccttgaggccaggagctagagaccatcctgggcaacatagtgagaccccatctctaccaaaaaaaaaaaaatcaaaaaaaacttgctcagcctggtggtgcatgcctgtagtcccaggattgcttgagtccaggaggtcgaggctacagtgaactatgatcttgccactttgagctatgattaaagctgcaataacagagccagaccctatctcttagaaaaaggataaagaaaatcagcagaaactaattaatttctgtatgacgttgatgacataacctcactggcagaaaaagaataaaacgatctgagtaattatagagctgggttgtccaggggtacctccttagtggagtacactctaagaactgggaggcctgtgacagaaccccaaacctcactagtgactttgttattggcagtggggagggcggagccattgtgaagcaactttgggttatcctaggattggtggtaccagaacccagattctcactgtaggatgagggagatttggaatggaagaaggaaaatgctggtgttttgttatttgtaattagttatggaaaaaaattactaaaacaagatttttaagtgaaaagaaaagaaaaaggctggccaggcacaggcctgtaatcccagcactttgggaggctgaggcgggtggatcacttgaggtcaggagttcgagaccagcctggccacatggtgaaaccccgtctctactaaaaatacaaaaaaattagctgggcatggtggcgtgcgcctgtagttccagctactcaggtgggtggctgaggcaggagaatctcttgaacccaggaggtggaagttgcagtgagccaagatcaccccattgcactccagcctgggcaatagagtaaaactgtctcaaaaaaaaaaaaaaaaaaaagaaagaaagaaggaaggacaaagaaagaagaaagagaggaaggaaggaaggagaaagaaagaaagaaggaaggaagaaaggaaggaaggaaggagaaagaaagaaggaaggaaggagaaagaaagaaggaaggaaagaaaggaaggaaggaaggtagaaagaaagaaagaaagaaagaaagaaagaaagaaagaaaaagaaaaaactaggttcattgagacagaccgagaagcagtaatacccagttgcaagaggcaccttgccactgttagatcttaaactccagtctccagtgaaaggcaccagtgccccttggagagatggctgaatccagagctgggacagggaatgtcaagaggagcccgggacattttattgtgccagaaagtaaagaggttctcaaagaatggtgggagcgtgaaagcagctagcacagagctgctggaaggagctgccaacagccaggcctgggaacatttgagcacaaaataaataatggaagtcatacattcagcttgctttttttttttttttgagacggagtctcactgtgtcacccaggctggattacagtggcacggcgcgatctcagctcactgaaacctccacctcctgggtccaagagattctcctgcctcagcctcccaagtagcactgattagaactcaccgtcatgaccatgtcctgcccaaaaggtttaacttgaatttcatcaataggaaaccatcagacagatccacatgcagggactttctgcaaaccagctggactggatgctttgcaaatgttcacatcaggaaagacagaagcaaaacaaaacaaaaggctgagaactgtctgatggtttcctattgatgagattcaagttaaaccttttgggcgggacatggatgtccaagtagctgggactacaggcgcctgccaccacgcctggctagttttttgggtttttttgtatatttagtagagaaggggtttcactgtgttggccaggctggtctcaaactcctgacctcatgatctgcccacctcggcctctcaaagtgctgggattacaagcgtgagccaccgcatccagctggggaaagatttttagggatcaagggccgggcgcggtggctcacgcctgtaatcccagcactttgggaggctgaggtgcgtggatcacaaggtcaggagattgagaccatcctggctaacacagcgaaaccccgtctctactaaaacaatacaaaatatcagccaggcatggtggcaggtgcctgtagtcccagctactcgggaggctgaggcagaagaatggcgtgaacgtgggaagtggagcttgcagtgagccgagatcacgccactgcactccagcctgggtgacagagcaagactccgtcccccccaaaaaaaaaaagaaaaaaaagatttttagggaacaagacatacattaatccagagataccaactttaccaaatgatgaaatggaacatccccaataatgggacacactgacctcatgtgcttccttcctccattccaaatctccctcatcctacagtgagaatctgggttctggtaccaccaatcctaggataacccaaagttgcttcggaatggctccgccctccccactgccaataacaaagtcactagtgaggtttggggttctgtcacaggcctcccagttcttagagtgtactccactaaggaggtacccctggacaacccagctctataattactcagatcgttttattctttttctgcaagtgaggttatgtcatcaacgtcatacagagattaattagtttctgttgattttctttatcttttttctaagagacagggtctggctctgttattgcagctttaatcatagctcaaagtggcatgatcatagttcactgtagcctcgacctcctgggctcaagcaatcctgggactacaggcatgccccactaggctgagctaatttttttttttttttttttggtagagatggggtctcactatgatgcccaggatggtctctagctcctggcctcaagggatcctcctatcttgacctcccaaagtgttgggattacaggcatgagcctccttgcccctcttctgttgtttttttcctatccttgttgacttacttttatttcttaaatgtaaaattgatttaaggtgcatccagagatgtgcacagattcttgtgatggagggaaccgcacagtcatggtgaggagtccatcataattttcaaacgcccctttaagaagtaggcattaacaccctgctccatccctttggaggcagccctgggctgagcactggactcctgggttccaccaacctcagtgtctccaggagaccaagcgcggccgggggtgagtccctgtccccgcgccccccaccacgctccaatacttaccccctgccccaccccccagcctcccgggccttggcttgtacctgtgaaccgaaggggtcatactaggcgtcatactagggtctctggatagctcccaggcctggacttcgttttccaggatatcacctttactggtcaacccattttgtttcgcgagtgcccagtgagtgtttggcacgtaatagagcctccataaatagttgtagaaattagcgtcattttacagtatggaaactgaggctccaagtgggagtggcttgccctcaaggtcccattggtgagagacgctgtggaagggctgccctggcctgggcacacagtaggcgctttgatgcgggctggagaaggtcctgcccggtgggattgcgccctggggcaccgcgcacgggtcggggaagcccggggcagggccgtatgcaaatagcgcgcgaggaggccgcggattggccagcccaggcgggggcggggcgcgccgagggcccagagctggcaggtgccctggcagggacaggtctggtgcccgcgcctgctcgctggaccgcccgccccgcgctctggcggctcctcccgggcgatgcctccgctctgggccctgctggccctcggctgcctgcggttcggctcgggtaggcggtgaagggcaggagggggctgagcccagaaagagcgggcagctctgccctggggcgcccgccgcctggaccctgattcctggcgctggggacccagatattactgttatgaataatagtgatagccaacgtttacgggcctcctctgttgggaatccgagggctcacagatggctgcagccctgcgatgtgtgttgcaagagaccaacatgcaggggggctgcggtaggacagagaagggactagccccagccccatggtgacgcctggacgggggcagatagagagatatttcggccgaggaagcagcatgggcaagttcatggaggggagacaatattgggctgtcctgggaactgccagtccatgggaccagctggagcctggggtgaggggagcctgtgggggaaggggtgaggctggagaccgaacaaagcaaagcccagaacttcaggacctcactgcctttccagagaggctggacttcgtcagggggcgctgggggaccatgggagggccatagccagagaatgaggcagtcagacttgcatgtggggggagggcccaggtgaggaaggtgggacggaggagggctgggccgatggcatggagagatgcttaggaggggcagtggagttcttggcaactgagtgtctgcagcagggagagaaggcagcagtttggcccgaccgctccatttctgagcaggatgactgggcagggggcagtgtctgagacagcttatgcggtggcccagggggagggtgaagcccagggcctggcacacaacacgtgctcagtaactgcaagcagagtgggtgtggacagttctgccggaggtcagttcccatcctcactgcctcctccagctgtgaacctgcagccccaactggccagtgtgactttcgccaccaacaaccccacacttaccactgtggcctt

SEQ ID NO: 9365 - DNA, 6000 bp, Homo sapiens
catctcagactcccgagtagctgggaccacaggaatgcatcaccacacccagctaatttttttattttttgtagagacgcagtttcgtcatgttgctgaggctggtcttgaactcctgagctcaagcaatttgccagcctcggcctcccaaagtgctgggattgtaggtgtaagccactgtgcccagccttacacagatttttaagattgagttgttgaccttcttcttatttattgttttagagacagggtctcgctctgtcacctaggctggagcacagtggcacaatcatacctcactgaaacctcccaactgcttcactcaagcactcctgctgtctcagcttcccaagtagctgggactacagaggtacaccatcatgtctggctaatttttaaatttttttagttgagacaggggtctcactatgttgcccaggctggtctcaaactcccagcttcaagcaatcctcccacctcggcctcccaaagtgctgggaatacaggcttgggccaccgtgcctggccccttcttattgaactgtgagtgttcttgttatattctagattaggtccttggtctgacatatattttgcaaatttcttcagtctatgtcttgccctttaaattttgtagcaacatctgtcccttacacaacttcatttgtcttcatagcctcatcacgccctgacacccgggttcactgtccatttccccacccactacgctgtgaatggcagatggacctgacagcagtaacttaagcataccctgaaaatgaccctttggtctaagaagaaagtgtgtttggagtcttgagctaaggaatctgggagtggccaactaggagtctcacttcttttctatgaagagatctgaacccctggcctgttggtcccttggaatgcaggccgtacaggggatccaggccctttgttgtggcttaaatggaggttgctaggtggagagggctccacaaaaattgctatataaattgcatgctttgtacaaatgatagtgtttctcctgtccaggccactgccactggatcacttttgtatctaagtcctcaataaactccatgtctcattcactggctctgggtctcttcttcggcctcttggacatggtgccattcttattggagtcaataggggcctggcgcaccatgttgtcagctccacgagggcagtgctggttttcccgctatgtcctcggctccttacacagcgggtgttcagcagatattgttcagtgctcctgccagtcctcccggacatggcgtgtcttggtggcaggtgacatggactggtgagtggagacctcagagcagcctgttgcaaaacttccaggccagcagtaaggggtcctgagctggggcacgggtggggtctggggaaaggagacgagctgacggagaaggagggccagagagacttttccaaggtgcaggctcccctcttcccttcccctgcctgccatacacaccccgcctgctgctcagcaatggcatcacagcccctcctgccagcctgcccggatgcagggagcagcaggagagtttctacaggaaatagacatgggcatgggtggcatgtggggaggctctaaaaggcttgattagctcctttaccatgagtgtgtttacagcatgtatgtgtaatgacacacacagtgtgagggtgtatattgcatggtgcgtgttatctctgtggggtgtgttcttgtacaccggtgcagggcatatatgtgttatgatgtgggtttgtccagagaataaagcaacaacttcctctccaggatgggaggactgttatgtggtctctggtgtcctttctgtccattctttagagcatcccaccagggaccctgcctgtgaatctgttggctctctcttttctgacagtgcaaaacaaagctccttctgcagccagacagaccctggcagcaattccaagcagatgcccacttaccagctcggactagttgctctaacgcctctgagcctgttttttggtctgttaaaggagattaataacacctaccacgcagggtggcagcgacagtgaggaaaggtatgcctatgaagagcttagaatagcgcctgacacacagtaggtgctcaattcacagtagtgtatatgcccacacacaggtatgtacattccaaatgcaccaacgcccctcaagataccctcaatacacaaatagattgagtctgggctggatgcggtggctcatgcctgtaatcccagcactttgggaggctgaggtgggaggatcacttgagcccaggagttcaagaccagcctggactggtggagacatggtgagactctgtctccatgaaaaataattaaaaatttaaaaaatatattttaatttgaaaacttttaaaaaggaaagatatggactaggtctggtcgctgggctcctgacgacaaggcttgctgtgcacatacatcttcattagtgtgagctgtgctcacgtcggctgcgtggaggctgggacagacacggacaccccacagtgcccagtgatgtgtcacacccacacatcagcaccacgctgacctcttgccaacctgccatatctgcccccttatctactcagaatggtcaaggtgcccagggggcagtgtctctcagtaattttccacaacctgagaaaaagctgtgtttctctcagatgtggggaaaaggggagcccttgttcctgaggcatccttcctgctgtccttgctcttgtaaggctgactggctgagtttttgggtggaggggctgaggctcccagcctatctcagatggtgctgaatgtggctggaggttacgattgctttggtcccaccacccctcagaggatgccctgcgcagagtcttgggtctgactgacctcggcagcacccagcccataaggtcctgttaatcaaaatccttgctggggcctgggagctccatgagggaaggggccacatctcccacaggtctcgggcttcagcacccagtacaggagcaggtgttcatgaactgaattatatatcttttgcattaaaaaaaattttttttgagacagagtctcgctctgttgcccgggctggagtgaagtggcatgatctcagctcactgctgcctctgccacccgggttcaagtgattctcctgcctcagcctcccgagtagctgggattacaggtgtccgccaccacgcccggctaatttttgtattttcagtagagatgaggttttgccaggttgcccaggctggtctggaactgctgacttcaggtgatccacctgcctcagcctcccaaagtgctgagattacaggcgtgagccaccggcctttttttgcatttaagtcgcacctccaggggttggggagctgtatgcagtggtggttacatgtgtgggctgaggcatggaactacacaacctcttgggcctgagcttccccttgttaaactggaataacaatgaagacgccttcctcatagggttgttccaagaacaccatgaaggaacgcatgcaaagtgctcagggagtgcctgaccccacatacagagcacccaggggctgccctcttcatcccagagtcactgctcccactgttttctgggctctggccccccctaaaatttcacaggccgctaacacaacactaccttctgtcacaaaatgagagctttctggtgggctagggtagggggagatattaacagccaactttaaaatcaggcaggaaaaaaaggtgccaaggagacaggaagtaataaatgactccaggttgggcagggcaggctgggaagaggaagtggattgggtcttgtttaggtaaaagacttcagtggcagacaaaggaggagtaataagatcgctagggggcccgtgcccagcccacccacgcacaatctcagtcctcgcaatacccacaaggtaggtgctaggatcacaccctttacggacgcggcacctgcgacagggatgcgcgaggagtcagggggcctcgccggatcgaacctaagctggggaagagtatttcttgtatttttaggagaaattctcagcctcggggaagagtatttcttgatgagggaagagcgcggggaagacactcacgcacgcacaaacatgtgggcggccatggtgtgcccagcgccgtgctggcttctgggaacccccagtggacaagacggacaaggtaccggctctcaggggaagtgggagccagtcacaagcgtacctaatttcggagagtgacaagtactctgaaaaagaaagaaggtagggctggtgactggccaatttaagcgggcaggagtctgctgggggacggagaccagcctcaggtctgggttggggacagaagctgtgcctaagtgtggtgcaggatgcagttgcaaaggagcgcttccgatcgcacttgatgctcgccacgtccctgcaaagtgctcccgccccctttctgcaaatgaggaaacgggacgcgcggctcgccgggccaggtagggctaggacgcggactctaggcccaagcgctccccagcgcaagccctcccccgcacatccgaccgcgcctgcgctggagaccccgggggcgtggcctccccggtgggcgggaccgtggtcaccgaggtgggcggtgccagaggatctggcggcggggcggggcggggcgcgcgtcctggcttcgcccttccccggggcggggcctccggggaccgcggggccgttggtttcgggacggaacgttcacgcggctggggcgggcgcgcgggggaagggtttgcggcggcgccgctgccggctaacgcggaggggcgcctggaggcggcgtggcgtccgctctggctccgactccggctctcgctctcgcttctagcccgcgtgcctgcgcagtcccctccccgagaaccatccccttgccccgcccagcgtcaggggtgcgcggccgccgagagaccccggaggcgtagccggctgcggaggcgaagaggtggcagcgcgagctgggaccagcgtctcggaggcgccgcaggtgagggggcggggcgggcccgcggtccctgcatccggagcccctggggaccccgagatcctcaggatccgccccggccccggggccaccccaggactccctctcagctcttcccctggagcccctgcccccgagaccccctcaggatccgccctgcccctccaggcccgcgaaccccgaaactccaagattttctctggactccgagaccccctgaggaccccggccgctagtgggccctgagaactgttggttccggaaactctcgaggttcccttgggacttgcttccagcaacctcctcagaagcccccaggcccggggcatcttcctgtggggagccgtggttcccagtgtccttagccccgcgagaccccgggtccccgtgccgcccaccctgaggctccctctccgacctgatctcagggctaggtttctccaacttgaggtccctggacctgcggggcgtgggtggaagtgttcccaggtctggtgataacttaagacggtaacagcgcgcccgacgaccacctcctaagctgtggtccccgcgcctgcaggtgcagggccgggtttaagttttaatgttctgctgagactcaggtggccccacaggacagtctatagagcaggagacctgaggtggccgagggcggccgaaccggggagggagcgagttagggcacatggggacgcttttaggttgtctcctccttaattttttcattcaaggaactaacattttgtttttgaatgcctgataggctccaggaattgacactggaaatagagatgagacggtccctgctgtcagggcctagggacctggggcataagacaagtaggtcgtttttatctggaggaagctgtgtcgtcgctggcagggaacccatctgggtgggcatgggattctgggaaggggtgggtgttaaggagggcgtcttaggagtcgtggggaggagat

SEQ ID NO: 9366 - DNA, 6000 bp, Homo sapiens
ggcaggggcgtaacatgcaaaacaaatgcagtaggtgcagtggcccaagcctgcagtcccagcgtggctcacgcctgcaatcccagcatggtccacgtctccagtcccagcgtggcccaagcctgcaatcccagcgtggcccacgcctgcaatcccagcatggctcctgcaatcccagcatggcccacgtctccaatcccagcgtggctcaagcctgcaatcccagcgtggcccacgcctgcaatcccagcgtggctcacgcctgcaatcccagcgtggctcaagcctgcaatcccagcgtggcccacgtctccaatcccagcgtggctcaagcctgcaatcccagcgtggcccacgtctccaatcccagcgtggctcaagcctgcaatcccagcgtggcccacgcctgcaatcccagcgtggctcaagcctgcaatcccagcgtggcccacgtctccaatcccagcgtggctcaagcctgcaatcccagcgtggcccacatctccaatcccagcgtggcccacgtctccgatcccagcgtggctcaagcctgcaatcccagcgtggctcaagcctgcaatcccagcgtggcccacgcctgcaatcccagcgtggctcacgcctgcagtcccagcgtggcccacgcctgcagtcccagcgtggcccacgcctgcagtcccagcgtggcccacatctccagtcccagcgtggctcaagcctgcaatcccagcgtggcccacgtctccagtcccagcgtggcccacgtctccaatcccagcgtggcccacgtctccaatcccagcgtggcccacgtctccaatcccagcgtggctcaagcctgcaatcccagcgtggctcacacctgcaatcccagcgtggctcacgcctgcaatcccagcgtggctcacgcctgcaatcccagcgtggctcacgcctgcaatcccagcatggctcatgcctgcagtcccagcgtggctcacacctgtaatcccatgcctgcaatcccagcactgtgggaggccaaggctgggttgggtgggggtggggggatcaggagtttgagaccatcctgggcaatatagtgagaccccgtttctacagataaaaaaattttaaggccaggtgcagtggcttatgcctgtaatcccaacactttgggaggctgaggcaggaggatcacttgagcccaggaattcgagaccaacctaggcaacatggcgaaaccccatctctcaaaaaaattagccaggtgtggtggtgcatgtctgcagtcccagctactcaggaggctgaggtgggaggatcccttgagcccaggagatggaggatgcagtaagccaagatcccaccgctgcactccaggttgggcaacagagtgagaccttgtctcaaaagataatagtaaaaattgctgggtgtggtggctcatgcctgtaatcccagcactttgggaggctgaggtgggcagatcatgaggtcaggagatcgagaccatcctggctaacacggtgaaaccccgtctctactaaaaacaaaatacaaaaaattagctgggcgtggtggcaggtgcctgtagtcccagctacttgggaggctgaggcaggagaattgtgtgaacccggggggtggagcttgcagtgagccgagatcgcgccactgcactccagcctgggcaacagagcaagactctgtctcaaaaaaataataataatagtaacaattttaaaaagctgggcatggtggcgtgcatctataatgccagctacttggggggtcaaggtggggggattgcttgagcccaggagttcagggttacagtgagctctgaccagtgatgcagtgctcagggtttgaagagagcgtgcacacaaaccgctagagataaactcaaagcacctggaagctacacccgcccccccttccccccgagaatggcagatactagaaggtggatagggctgagagctggaaagaagacagggatggtgagagcatggactggccgagcacttctggaaagcatggagaggcacccatgcgaaagcagaaagtgcatctggaaaacaaaggcagccacccagcagccacactcgggtcgctcggaggggctggaactcactgcactgggttatctgggagtgactgagttgtcggggagggggggtgacttggttatgtgaggggtggctgggttctctggggtgatggttatctgggggtgactgggttatacgggatgggttatctgaggggtgcctcggttatctaggagatgactggtttatctggttacctgaagggtgacttggttatttggggatgatgattttatctgggatgactgagttatctgggggtgactgagttatcgggtgaataggttatgtgagaggtgactgggttatttggggtgactggtttatctggcagtgactgggttatctggggtgaataggttatgtgaggggtgcccgggttatttggggtgattggtttatctggcagtgactgggttatctggggtgaataggttatgtgaggggtgcccgggttatttggggtgattgtttatctggcagtgactgggttatctggggtgaaaggttatgtgagaggtgactgggttatttgggaggtgactggtttatctggcagtgactgggttatctgggttgaataggttatgtgagaggtgactgggttatttgggaggtgactggtttatctggcagtgactgggttatctggggtgaataggttatgtgagaggtgactgggttatttgggaggtgactggtttatctggcagtgactgagttatcgggtgaataggttatgtgagaggtgaccgggttatttgggaggtgactggtttatctggcagtgactgggttatctggggtgaatagattatgtgaggggtgcccgggttatttggggtgattggtttatctggcagtgactgggttatctggggtgaataggttatgtgaggggtgcccgggttatttgggaggtgactggtttatctggcagtgactgggttatctggggtgaatagattatgtgaggggtgcctgggttatttggggtgattggtttatctggcagtgactgggttatctggggtgaataggttatgtgagaggtgactgggttatttgggaggtgactggtttatctggcagtgactgggttatctggtaggggtgactgttatcggggggtgagttggtttatctggggtgcctgggttgtcagggtgactgggttatctgccagggctgatttatctggaggtgcctgggttatttggggtgactgggtttatctggggtgactgggtggttgggtgctgggattggatgtagctgaactgcctgcctcaggatgaagtttgctggaagtcaggggctggcatccctcagaaaacatgcaaggatctttaaaaacgcagacggcgtgaaagctcaaagcagacacatcccctacgcagcccagggaggcagggggacctcctggtttgctcacagcagtggccgggcctgtgaacacgggctcaaaatacatttttggaatgaattattgaatgaacttaaaactccaatcacactaaatcttttatatgaaagatcgtgcacgttcgtcctggtatagtgggaaggggacctgcacgagggaaaacggctgcctcgaagaggcagggaccacgcgggatgcgcccgcgtctgaagccagacccccggctccccgagggagaacaggacggagggcggggctgtggggagcggagggaatgaaggtcagggaggcggcggggaccccctgagctggcacaggccccgggaacgtctgtggaacaggggacgggatggggcgtgggggaaggaggtgcgggctgcaggagcgggggtgatggggtcactcacggcggcgggactgggggtactgggtgggggggtcgggtggggccggggctgcagtggagggtgtggggcggggagatgccctcattgcccgcgcactggcgcccgagcccagagaagagagcgccggcttccccgccagtggccgcagcaccccaggagcgcgggaacctccggacccacagcggggcgcggccggggcaggtggggggcccaggcgaggaagccccctctgcgccctgggctgggcgaagggccctgcgatgcgacgggggcagccccagcgcgcgcccagtcctcacgtcgccaccgagcggcgcccccgccccagcccggagccccgcagggccgcccccacccctgcccaccctcccgcgggccggggcagccccccgccagccaccccgcgttcccaggaagagggaccggtcattactcattcatgtcctttcatttcatttcaatattttctgcaaagtcatcgcccgcgccgcatctgcgtggcggggggcggggtggggcggagccacgccgcggagtcgccgcaggtaaacagccccctccccgcggcgggagcggggccgccggccccaggcagggacagcagccgccgcccgcgctccgggccgggatcccgccgccgcccccgccggaggcacgcgccagggcgggggccgggctgcggcggaggcgggcggctccggtgccccccgccgccgccccggcccggcccgcccgccccctgaccccgggggcggcggcggagcgccccccaaaccccgctgcgggctccgcgcccggccagccccgcacccgccgcgcgcctccggctactcccatcccccggagccccccgctcggtcccggcgtcccctgccaccctctcccgcggcccgcggccccgtccccgtcccgcgcccccacgctccccgatccccgcccccgcgccgcgcgtcccctcccgcccgcgcccccctcgccgggccccgccccgcgccccccgccccgcccgcgccccccgccgggccgcgccccccgccccccatgcaccacctcctggagcagtcggcggacatggcgaccgcgctgctggcgggagagaagctgcgggagctgatcctgccgggcgcgcaggacgacaaggcgggcgcgctggccgcgctgcttctgcagctgaagctggagctgccgttcgaccgggtggtcaccatcggcaccgtgctggtgcccatcctgctggtcaccctggtcttcaccaagaacttcgcaggtgaggccggcggccggggcgcggggcgcgggcagagggggcgtccgcaggtgtccgggagctggcgcttcccgcgtccccggcggctccgtccagccgcgcccaccgtggcctggctgcgtccgcggcgtcccaggcaccttccacagccgcccccatcctagcaggtgtcgctggtcgcacagacccctcgtctctattttattgttgttcttccttccattcgtccgcccatggccgcgggtgggactaggcctgtctggacccaggggtcccaaatgtcatgagacacggggtctggtttggagaatgtcacaagcagcgcctgaggggatgcagggtggccaggtggggaccaggaaaggccgggatgggtgttgacagcagagagctgattacaggggctggtggagctgccgggcagggttcccaggctggacttgggtggaaggagggcagagagagtctctgagaggcccaggccctccacccctcaggcagggcgaggcctctccgggtgcactgggggcctccgaaggtttgaagcaggggggctagcatggggcagggccacgtgtcagagcagggagcctggagctcctgcagggagatgggggctggaccagggcagggacccgcgctggttagatcaggacctgtgggggcacttgaagccacccaggcgaggcaggaagatggacagagcagccagcctgcctgtgagcctctgcggggtggggtcctggtgcctctgccctccccaaggagtggggcgagacaggtggagccgagaacttcctcccc

SEQ ID NO: 9367 - DNA, 6000 bp, Homo sapiens
gaccgtgcggctgcccacaggggctcactgttcccctacacagtccatcagggagttgtggcaatccgagtcccaagtgtaccttatactgtcacttctcccagtctgtcactacccggtccaggcctctgtcattcccttctctgctgcggcaggtcctcctcctggcttcctgatgccctatgctactcccttgcagcctgtcctccctacggcagccgcccgagccatgctccgcaggggcgtcacccccactccaaactgccagcaactgtcatccatgagacccctgcctacctggccaaccctggcctcctaccaggaaagggctgtccctcaccgccccctggctcattcttgctgggcaactgagcaccttcctcccaagagcccaggcctcagacaaaaggaaggctgctgttggacggacgtgggaggcctgtgtgcagccctggcccctggaaaaggatgtgcacctctgcaggagggccgctccccagccacacctggggtacacagcacatgagcgcagcctcctaggagtgctagtcctaggacaggaaatcctagtttgctccggtgatggtcagaggggtgttggcacacagcagcctggggccatggtgagatgctcctcctgacctgggattcgctcttctgcttctgtgctgtcaccatgttcttgattttgagcggccttatttcacatgtatcctaaagatggttgggtgcagggagacactgtgtgccttgtccacacagcccgcctgggcaggaggacgacagcatccccagcgtagcacgagggtggcccccttctcagagcggccatttcctcccctccccctcagatggcaacagtctgtttgactccatggccagcgggatgcgcctggtcgtcagctgcatctcctccttcctcatcctgtcactgctgctcttcatggtccaccggctgcgccagcggcgccgggagcgcatcgagtccctgattggagcaaactgtaagtgccctctgagggccacaaccctggtccccatccccaccccaggtcaccccatgtctccatgagctccccagccctggacagagaggggcagaggcaggtttgaaggccacatgttgtggggtctgtgtcctcacctgtgggccaggaaagttcttgccaagaccctccttattcccattgagccacagggtgggcagaactcggaggcctctgagggtcagaggcccggatcacccttccagctggaggggtgtggtcagccagaggctgggtctgacagaagtgtcagcccagagggacaggttggtgtggtgagggtgagacatgccacggagcacaccaggggtctcatggggatgccgaatgtggccgaggggtaggcagcggggcacaggtgtgtgcactcagggacggcaggcccagcctgggggtggggggctcaggagccaggcagcctgcccccagtgacttgtctctgttcccgttgcacacttttgatggcccagtgcaccacttcaacctcggccgcaggatccctggctttgattacggcccagacgggtttggcacgggcctcacgccgctgcatctttctgacgacggagagggtgggactttccatttccacgaccctccacctccctacacggcatacaagtacccggacatcggccagcccgacgaccctccgccgccctacgaggcctccatccacccggacagtgtgttctatgaccctgcaggtgcctgactccccagggagagggaacaccttgtcaagtaacctggcacgtggggctgagcccagcactcttgcccagctgcagaggcctagggacctcacttctttccggctttgtctttggtttttcctttaaggcttctcctggggctgcccgtgcagaaggggtcctgatctccctgcctggccgcccttggcaatctgtgcagagagctctgagaaggcctgggacccctccctcctacctccctgccttctgtgagcacctgtcatctgggcagccctcagggccctcagcccagctctagagacctggggagcccgacagtggtggttgtgaagacagggctggcccagacccaggagccaatcacttgtctgtagacacatgagctagagacaccatggtgacagcccctcctgtcgtgtcaggaggcagctctgtgaggtgggaggaaagcgtggcttctgtgctactggcccatagttggagcctaccacccatctgagagtgggcgccattcctcaaggctgtgtagctaaggagtggcaggcccctgacccctggcctgtctctgtctctgttgagcagtgcaggtgtcccatcccatctccctgtgcattaggccccctaacacacacaaacctgtagtatatttggtaggcagtgccaccccaaagtggctggctccttgcatgcctgcccatctcggcagaatgggcattgtgaggctggggctgctgtgcctaaaggtctcagtcctgttcgtttgtttagtcagctgccacagctcttgcatgatctgggggtgcagaaaagacttgcatttgacccctgccctcatgacacagattgtcacagtcttccagggtaggaccagcttcctgcaagggatggtggtgggtggcagcagatcccagacacctgtgtgggccaggctgcagagcagggtgggggctgtgaggggctggccgggagggaggtgcatcaccggggccttgtgctgttagctttcagagacagcctatggtaatgacaagcaggcagcccaggcgcagtggctcacacctgtaatccagcactctgggaggctgaggcgggaggaggggtctcactatgttgcccaggttggttcgagaccagcctgtgagacctccttctccacaaaaaattcagaactagccgtgcatagtgggcacagctgtagtcccagttactgggcaggctgagaatggaggatcacctgagcccagaattcaaggctgtcatgagccatggtcacgtcactgcacaccagtgtgcaatcttttaagatcctgtctcttaaaagaaaaaaaaagcaagtaataaagatcgggcaaaacaaagcgagtcgactgcctaccacacagcctgccttggatcagagcttcctgcaaacacctgtgtggttttccaggccgctcactgcagccctgttgcccacactccggttgccacattccagctgcagccctgaatgttcttccacccacctgggcccagtgcctccctgatgacaaatgcccctgccttcttgctgagccgggtcttcaccttactgagtctgagacggtttccctttgggcccctctgttctagtgactgctggtcagtgtgtctcccctacctcacaccgatggtgggacaggcccgtgtctgcctttgtgagatgggccctgcaccttgcatataccaggttcccagccacagggggcagtaggtacaacaggtgtcatgtggggcaggctcctccttcaaaatctgaggcccgggggagccacccaggtcctgctcaccacccagcttcaggggggccttcaggcaggaggagtgtctcctggttttgcctagctcccctgcatcccctgtgccaggcccgtacctgcctctgacacccctctgtctcttcctgcagacgatgatgcttttgagcctgtggaggtcagcctgccagcccctggggatggtgggagtgaaggtgcattactccggcgcctggagcagcctctgcccactgcgggggcctctctggcagacctggaagactctgccgacagcagcagcgccctgctcgtgccccctgaccctgcccagagcgggagcaccccagctgcagaggcactgccagggggtggccgccacagccgcagctccctcaatactgtggtgtagacggcctggcctgtaccccaacggtctgggagcacctgtctgttgtagaaaacaccggtccctggggagacttgaaaggcccctgtcccagcctggacgccacgcactgccgcacgtcactggcgggctcgcgtgtgtacatagagaccacagcccgccttctgccaaaagaagtgatggcctgcaccgagcttccttgagggcttcagaaacatgcatagctttggatcactgtcttctcctttataaatggcagaagagtgacaaaattcattcagaccgcacatgttagaggcagggaatgaagaaggtactgtgggccatggccacacctgatgcgtttttggtgggcttacttggtgcagtgtgctgtccagagagacctgctgacccagtctgggacaggcacagtgggagctgccacagtgccccttgctggccgccctcaggagggggcctctggaccgtcagtgtggcgtaggcagtgggtctgcttcagggaggcagcctcttgactttgtcacaacggttgcactgaagatggcccccacaagcccagttgtgaatatcaaggtgaccctgcccctggctgggagctcccctggggctctggaacctgaagccctgagaaggagagcttggaaggaggttgagctcttcactgtgtctttccatctgggctctgcagcccagctctgtggcaggaggcctgaccccaccccatcagtccctctcccagcattgctgtgcatggctccctcaggaagaagctctggagtggggccgaggccccagatgctctgctggggtctggggactgagctgcctcctgtctctccactctggagccctgggctcttgcctcctgttgaattgcccctgggcctgcccccggccccatttgtgccataaagggttgcttcattgcaggaggggtggctgaaaccaccatcctgggctgcatctatctccttaaagtccactccttacatcaccgccactactgcagctcagtgcccagcggccgcatgcacacctcccggcccctcctcagcagcgcaggggctgggggcccttcctggcacccttttgcctgacggaccctgttgcctgctcctgggcagtggttttgttgcctgacacagggcctttaacatttctgaggtttggagattaagcgggttctgtgcgatttttagcacatccatatcttttctacgttgaatgtctggatctttcctttgtatgtttgtgtctctgtgtgtgtatgtggccaagcgtctgcaggtgagggtggcacatggaacttcacgggtcactgggggcccactcttccagggtcatcgatgcatcctgggctgtgctgaggcagtgctgtctcgctcagtctttccagaccagcggggcagcacctgggaggcctgtctgaagcatgcagttctgtggtgctgctcggggatggactccatgcacagtccacttcttgacacattctcacactgtggctggagacccattttttccatcccatgtggaatgagaatcttgagttgcccacagacagacttgacctttgtgccagaactgtccagagctgtgagttttgttactgaattgcctgtccctgagcttggcctgctggagcatgatgctggaggctgtgtgcgggcaggcttgtgctccccttggagaagggctgctacttaacaaggaagtcctggccacaggagtcccctactggctgcagaggacgaagcaggaagcatgccgtggatcccacatgcactggggcagggcagccaggttccagagcagcaggcatgtgcattatgggtgccaggtggccagtgagggcccgaggaccacgcagcagagtcccccacgggcctgagcctgagagctcagaggattcctgccaggcctcagaactgtgtgtgcgggacagggtggctggcacgagatgtgtgggactgggacgcttcctttggggaccagaggaacattaggggccggtcagacacgtagggggcagtgaggaaacggggtaaagtgga

SEQ ID NO: 9368 - DNA, 6000 bp, Homo sapiens
cttgggaggctgaggtgggagaatcacttgagcctaggagttcaaagttgcagtgagctatggttgtgtccctgcactccagcctgggtgacagaatgagaactatttctaaaataaataaataaaataagaaaaaaaaaaacaaaaaggcaacccagagaaacaccaccatttcgtccttggctctaagtctctagcttgtctgccttctttgtaacacttagcatcttcttatgtttgctttatttataacatttagggtttttttgtggaaggaatagggaaacatatgtttatctgtcttctaggaagcagaagtctgttttgtctttatttaaaaacattttttttgtttttgttttctgagatggagtctcgccctgtcatgccagctggagtgcagtggtgcaatctcagctcactgcaacctccgtctcctgggttcaagcgattctcctgcctcagcctctcaagtagctggaattacaggcacctgctaccatacatagctaatttttgtatttttagtagagacagggtttcaccatgttggccaggttggtctcaaactcctgacctcaggtgatccacctgtctcagcctcccaaagtgctgggatgacaggcgtgagccaccatacccagctgccttcatttatttttttcaggctcatccatggatgtggtattgccttcatttttggaatacatttttggtgagtatagaatttaggttaaggctgggcgtggtggctcacgctgtaatccgagcactgggattggcaaatggatcacttgagctcaggagtttgagaccagcctgcacaacatggtgaaaccccatcgctacaaaaaatttaaaaaacaaaaataaaataaaataaattagccgggtgtggtggcgcacgcctgtagtcctagctatttgggtgcttgggcggctgaagcgggaggatcccttgaacccggaggctgaggctgcagtgaaccatgtttgtgccgctgcactgcagcctcgatgacaaagtgaaacccggtctaaaaagaaaaaagaaaaagaattttaggttacagggatttttttcttgcagtactttaaagatattgctacactatcttcttgcttgcactgtttccaacaagaaatctccttcttcttgattcctctgcacacaatgtgtctttttcctctccatgcttttttttgttttgttttttagacggagtctcactctgttgcccaggttggagtgcagtgacacaatctcggctcactccaagctccgcctcctgggttcacgccattctcctgcctcagcctcctgagtaggtgggattacaggcgcctgccaccaagcccccggctgattttttgtgtttttagtagagacggggtttctccatgttggtcaggctggtctcgaactcctgacctgaggtgatccgcccgcctcggcctcccaaagtgctgggattacaggcctgagccactgcgcccggcctttcctctccatgcttttaagactttctctttagcaccagttttacgaaatttggtttatgatgtactttggtggacttttttttttttttgagatggagtcttgctgtgttgcccaggatggagtgcaatggcatgatctcggctcactgcaacctctgcctcccaggttcaagggattctcccacctcagctacccgagtaacggattacaggtgcgtgccaccacgcccagctaattttagtatttttagtagagacggggtttcaccgtgttggacaggctggtctcaaactcctgacctcaagtgatccgcccacctcggcctcctgaatggaattacaggcgtgagccactgcgcttggcctggcttgccattctatagaacccttgacccttcgtggatcacaccagagctccctgccccccactccctcacccgctggggaagttaaagccacagtgacctccaattctgactaacagccagcgatgactaccctgaggggtgcggctgaggttggatgagctgtgaaggccctgggagcctgggtggatggcactcaggaaaggcagaagagaaccgggactggcatcggcctcccctgcagcctcgcagcctccaccattggggggcttcgttaccagtgaggaactaaggcagagaggccacctcactagtccagaaagtttcttgcttgcgggagcgaatctgactccatgcctgtgtttaaccacaaagagtaacaacaatgcccgcaaaaccgccgagtctggcactgtccactctggatgctgctcacatcgtcacagccgcccaggggccccacacagggtgcctcgggcacctggtgcagtggtcagggatgcaggaggaccccagctgctgctctcggcctgcaggagtactggcttgtgtcaagaaagagcaccaggccacactgtgcttggaggctctgcaaacatttgcggaaatagaaggacacatccttaactgtttcaaaactgaaagatagaagaaacgctgttcttcacttcccctgaaatcaaatctgttaactaggagtttcccaaacccaaatccccaggaatcttgagcctaaatttagcttatccttggaaggtcacgggattaccctggggcagggtcagccagcagctgctcaagataaacttggcttttctgcagactcaggctcttctcacacacaattaatgagatcctgccattcttcccctgggaaagcagaacaatggctgggggtgagcaggtggccttggccagtgctctgccccaagggccctttaccagagatcaggggtttgtgtccctgcctaaccaggacacctccgatctccacctgcaggccctggaccactgtggcactgtggacacaaggccgcttctgccccttggacgccgagccccttcccacctctgggatcttgcactggctattgcttctgctctgcctggaacttcttccccggatccctgtgaaatgtcacctcttcagagaggccttcaccactgtctttcctgcccagttcttggttgataggttcctgtcagctccttctgggcaggagcttcttgtgctgtgtgctctgcctagagacagtgcttgccacgaagtaggtgagcagaccctccatgagtggcaggaaaggtgggtgcaccctcatgcccctccggagtctggcctgggctactcagaggccagcctccatctgaggtgggtttgtctggggtggcgtcagcccctgcggccctctctgggcctctctgcattggcattgttccactgcagcctggggcctcgaccaacatagtggggtcagggtagaaaccagattgtgaaaggtgaagcctgagactcctctgccacgtccctgagatgctgtgaggctgccgccaaagaaacatgagcttgctggggccaccctagggtgacagctaggagagaagaaaaacaggcagccaggtgagaagggagagccttgggctggctgcagctccaagctggctagagggcaacaggcagcctcctgtgcaggacagacgcatgaagacagccaccctgtggaggttattcctggatactaggtgggaaagtcggcaagcaaaaggacaggtccagctcaagcttctaaaagcaatgctgggggacggtgcagcaaggtgttcctggaaatgacctcggcaacacatcttagaagatgagcaggacccaacctgacagatacacgctgcgggcagaagaggccaaggtaagagacggcccatgtgaggcccataggcaggtaagtctcctggggcagagtgtgtgctcagggccgcaccaagactggtggctggactggccagtcctagcgcatgcaggtacacatcaatccagctgctctgggagtcggctcttcgtccatgggcaatgtgagccatggagggtcttaggtagggtgaggcccaggagaggggcctggtggggtgggtggcctagctgggcaagggcaggtccctgatgacctgaggaggccgcagcagtcatcccaggaagatggtggcatggaagggctgggagtagggggatctggggaagttccctgggcttgggttagggggtagtaagagtgagagggtgggtgggtcagctgtacccctggagtacacagaggaggagatgtccaggagggtctgtagaggaaggggcatggcccatgggtctgcagcaggaggaaggcagtgactaaagtgatagctgggagaaggcagtggtcctcagagccatacctggtggggagaggccacgtggggctgagcaaagagggtatgatttccttccagcctcagggctgggcacacttgccttcagaacctccccacactaggtgagccagacgctggccttatctcatttaccatctcagagccatctgaagggggagaagggaaccgggccccaggagggagaaagtcatcaaacctcccacatctgtgaccagcctcagtgccatactttttctatggagggccctgtccaatggaactgagcacagaccagataaaagaactgggcacccagtggcctcagtccagggcctggagttcaaactttactggaaacaaaggggccgagagagactggggaaagaactactagaaaggggctggtgcccccatggggctgtgggttttggagccgcgtgcccccacctgagcctcagggggcccggagtgtccacaccagtggacctttcgagaaatggctgggccattgtgcagaagaatgcccggaaatcccgcgcctccctcctccagcaaggatgggggctcttcctcctggccaggaaactccaagttggcttccggagggtggcctgggggctggggtgccagggacaccatcgccactggtgggagggcagggcacagcccctccgtgtccctttgtctctcctgtctgaaggccagagcaggctgctaggcctggggccaccactgcccctgggtgctacacccagtgtgctgggtcactgggaacttcctgaagtggtgtcacctgaactgggcccccaaggatggggtgcgggcagtaccgcaggaagaggagcagcccctgtgaagattgagaggtctgggaagcccctgcggcttgggagagtgggggtcgccaggcagggggaaagcccctgtgccaccgctttttgccagagactcaggctccagagaggcagtgagtggcatggggggtgaggctggggccctgggcctgacctccacacgcctgcctggcctctctgtttgccatgggatgagagagacagtgctgggactcagagcggggctggagagtgagagtgcgagaaagggcctgggtggggcttggaccccggggcgggctttctggagagcccccctacgagggcctctacggcggtgacggggtggggggcttctgcaaaccttggtcagggaagtggagctggctcgagtggaagagaccacccggctcagtcggggatgtgggagtggactgggtggtgcagactgggggtcgagcgccttctgaagtgacggggccgggacgcgcagggaggcggcccaagaagcgcgccctaggccagcccagaatgcgctcggccgcgactaggacaacggcgggtggggctgggggcggctgccgggcggggagcggtcccgcgccctcagctacccctcaagagccgttgtttccctaacttcagctgccagaggctctgtgattggctgcggcacgatgacccgcgcacggattggctgcttcgggccggggggccgggcccgggggacagaatccgcccccgaaccttcaaagagggtaccccccggcaggagctggcagacccaggaggtgcgacagacccgcggggcaaacggactggggccaagagccgggagcgcgggcgcaaaggcaccagggcccgcccagggcgccgcgcagcacggccttgggggttct

SEQ ID NO: 9369 - DNA, 6000 bp, Homo sapiens
acccacccaccatcctcagcacaggagaaagaaggctggcccagccgacaggtctgccaccctgatgttagggtaaggcacaccctgcatctctaggaccctgggaacttgggatgcccagggcttccctctataaagaattatctggaggggctcaagggtccaaggagaagtggacctagtatttccagagtggcctgttctgggcctcagactggacaagaaagaatggaggtctgccccaggccctgttctgcatccttacgtgcctcagttcccccatctgaggatatcccggggctccggaaagggagcctctgcagtggacccagctgctgttccctggatgtcctccctcccagccctggctggcctcccccacccgccccaggctcctggcctcccaggaatgtgcttctcagcccccaatctgggcgcctgccttatcggcccccagtcgaaggggagacagacgcccctgtcgacaatgacatcccctcctgttagccccagcctgaccctgagttgagggccggccagcgcctgctaagtgcctggaggaggaatatctccccttccccacgctgacatgaaacccgacctcctgcaccggctcctttgtgcccaccgggcgcccgcccaggcgtcagaggccctgggtccccgccctgctgcacactgtggctgccagggtgggatttgctctgcctggcatgcttccaacatgaccttagcctgctttgctggaaaaccaaggttgtctgcgggggtccgctcaccctgctcccagcccccaacccctcagtgtcttggtccaacccctgctgtatgaggccagaccttctcctcacatccctccagcaaatgcacttccctccagcactccaggctctccccgtcccctccagagcagggaggaaggctcctgaacccactgtcattaggcactggtctcaccccactccccagggaacccctctcagggcccttgtgggaccctcacgctcttgggatccacctgagagccttctcagccagttctccctcttggccagttccagtctcctcgggggacctcagggccctgtccagagcatccctcgttttccacacttccctccaaggctgcactccccttgtttgttaaggcacatccatttgtgtgccttcctctccctcctgcctgccattatcctggttaccaggaaccttggcatggctgcaattcacagtcccttcccgggccacgtctccctggattctcactgcctggctcctgaagccctttcctggctcagcctcccttggcctccccagctggggctgccttccctccctggctactgcaggtcaggctacccaggcctggcctcttttctccatcaacccttgccccttgagcatctcacacacgcccaaagctacaaataccattgatctactactggatgacggcacccacatttagactgtctgctccaacccctaccccaacaccacactcagatttttccaagtgatgtcacacagatgcctcaaattcgatgagtccagaacaggaccctctatgcccctcaccttctccccacgagccctccatctcaacaaagaccaccaccatccaaccactctgcggctcaggcctctgaatccacttggactcccctctcagccctgtcccgtctgtaggcaaacccatatcccacccctccttgtcctccaggttccacctcccagccccgaaagtaatcactgtcccttaaggattccccctgctcaaggattcctctggcagtccactaccctgacagcaaacacagaggtttgttgtttttttttaaattttagtaacatatacacaacataaaatttgtccaaactattttcaagtgttcagttcagtggtattaaacattcttatgcaaccctccccaccatccatctccagaactttttcattttcccaaactggaactgcactcattaaacaataactccctgatcccctctcatataagtggaaccatacagtatttgtctttttgtgactggtttttttttttttgagacggagtctcactctgttgcccaggctggagtgcagtggtgcaatctcggctcaccacaacctccatctcccggattcaagcaattctcctgcctcagcctcccgaatagccaggattacaggtgcccgccaccacgcccagctaatttttgtatttttagtagagacgaggtttcaccatgttggccaggctggtctcgaactcctgacctcaggtgatccacccgcctcggcctcccaaagtgctgggattacaggtgtgagccactgcgcccagccttgtgactggtttatgttactgggtgtaatgtcttcaagggtcatccatgctgcatcatgtatccgaatttcattcctttaaggttgaatggtattgcattgcatgtagacagcacatttcgtctgtctcatcggtgggtgaactgatgtgaaccattgtgaataatggggccatgaacatgggtgtatgaacatctgttcaagtccctgcttttgattcttttgaatgtgtacccacaagcagcattgctggatcatacggtaattctatttttaattttttgagtcatgatcatattgtttttcacagcggatgcaccattttatattcccaccaacggtgcccaagggttccaatttccccatatcctcgccaacacttattttgttttattgttttgcttttcacagttaccatcctgatggacacagggatgcttgcaaagtgacaaactttagaggtatcccaggtcaccccacctggcactgcggacgcccacgtggccccacccctcacttggcaatattctcatcaagtgtcagcactagcttattgtattgactgcctcctggctggactctaagagacagtgtcttttattgcatgctacatccccaacatctagaacagtgtcaggcaaacagttgtttaataaacggtggaaggaaggaagggagggagggagggagggaaggagggaaggaaggtgggtaggttggtttctattttccaccaaaatattgaggacctctcctgcctgtccacttgctctggtgcgcctctcaaccctcgcgccccacctggactcaatcccgcagtcctgcctctccttccttgggcccccggggaagaaccccgacagcggccggcacatttgagtggggccctggacgtttggggaggtttggacacattcccgaatgcctccctgctgtgggttaggtgggcctgtcttgggctggcagcgaggacaacgttgtggctaggtcgtcagttagtgagccagcacggtctgagccgccacactccgcgccccgcccacgcgccccgccctttccagttttgcctcgcctgctcgggtcttcgctcctgtaacccatacgatcttagccccgcccccgtggtgtcgtgggtccacgctactggtcctctcctagaaagccgcgaaatgaccagttcctcattggccacacgttctcccgcgccaccaccgcagccacaacaaccgccacgtgctcaaccttggcgcctgcccattggccaccagcctctacccgcccactctccctttccgcccctaatttccctcttcttccttccattggctgtcgggctcaggggctctcttttcagcctggggcgcgcagcgcctcggatgcggattggccgaaggcggggctgggaggcgggttaaagagcgcgttgctggctgggccacgcgtgcttgagaaggttcaatggcgtggcagggactagcggccgagttcctgcaggtgccggcggtgacgcgggcttacaccgcagcctgtgtcctcaccaccgccgcggtggtaagcggccgggcggaccggacgtcgccttggttacagcctctggcgggaggggtgagggtcgccatggttacggcgtggctcccgggcagctcttgactggcccctggttccacagcagctggagctcctcagcccctttcaactctacttcaacccgcaccttgtgttccggaagttccaggtgaggccgccccgcgccgcgcacctgtgggcccgacccacccaccccgcacctgaccgcccgtcccccgtaggtctggaggctcgtcaccaacttcctcttcttcgggcccctgggattcagcttcttcttcaacatgctcttcgtgtatcctgcgccctgcggacacgggctgggtggagggcaggccggccgggctgggagagaggccgggacggggaaactgaggccccgcctggtggcacttcctataccgacgccgtaggttccgctactgccgcatgctggaagagggctccttccgcggccgcacggccgacttcgtcttcatgtttctcttcgggggcgtccttatgaccgtatccttcccgcaggctctggaacctcgggctagggcgcctcggcgtccagcctgtgttggtcctggggccaacacagccatgccagagagggacacagtcgctgtctccagcttagtatgtgttgagggcccactctgtgctcagctgcaggggtcagggctagatcttcagtgctgtatgcaaaatacaaagccatgcacaaaagagccaggtgggttgtcagggccactagctgagccctgaatgcgagtagccgggagaaactggggcagggacaggcagtggttgggccctgggatgaggctgtaggtgtgcagggcagatttcgtgggacctgaagcccgtggagtgtgtcgcctttattggactggctcatcttgatgagggaatagcacataggggagatgaggggaagaattccagggtcttgggaagtcagaggggccctgggcttgggctgaggcctgcaccggagcaccttgactctggcccagctgctgggactcctgggcagcctgttcttcctgggccaggccctcatggccatgctggtgtacgtgtggagccgccgcagccctcgggtgagggtcaacttcttcggcctgctcactttccaggcaccgttcctgccttgggcgctcatgggcttctcgctgctgctgggcaactccatcctcgtggacctgctgggtgagcctcccggtacatctagtccgccccaggctggccactcccctcaggacacgctgcttatgccctggggcccctctcccatccttgctggagttctcctcacacctggctccatccccatcttcctgccctcccagctgctgtgctcttacagcccctcaagccagccggcccacataatttgcatcgtcaggacggatctactgatgcttgcacggtcctgatgggagtgaggatgggagggtcagggttcctgccccatggctcccactcctccactattctcaggccctcccctccctgggtcctgcctgcttctgggccttttaagcttgtccttcacggccaacccggggctggcactctgtgcaaggctttggggcactcatgctgtggggcctgcagggccaccaggctgtggatgggggcctggggcaggctctgctggtctaggactctgggctgtggagggtgaccccacagtccgtggctgtctcacagggattgcggtgggccatatctactacttcctggaggacgtcttccccaaccagcctggaggcaagaggctcctgcagacccctggcttcctgtgagtgttgagagccctccctccctctccccaccctcagaaggatccccaccgatggggacctgtgctggcctgtgctcaacacgggcccctccccacagaaagctgctcctggatgcccctgcagaagaccccaattacctgcccctccctgaggaacagccaggaccccatctgccacccccgcagcagtgacccccacccagggccaggcctaagaggcttctggcagcttccatcctacccatgacccctacttggggcagaaaaa

SEQ ID NO: 9370 - DNA, 6000 bp, Homo sapiens
ctaattcattgaatcctcaaaacaaacctacgtatgtactattttcatccccatctcacagatgagaaaactgaggcacagagattataaattgtccaaggtcacgcagctgtaaccgtaataaaaggaaagacgacctttaactgagcgcttactataatccacatctttaatgagctcgttacctacgttaactcttcacaataactccttaaagggtgtgcattatatctccactctacagatggggagactgtggctcagaattgcccatgggcgcaaagattccatcagggccgagcctgcactcactcagcctcccagatgcgacgaagcacgactccgctgtcagactcgaactccgcctcggggccccggggcgccgcctctctcccccggggcgccgcctctctcccccggggcgccgcctccctccgccgcggccgtcgagccgcggagcgcctcttccgcggagccgccgcctgccaggattccagcgccgcagctgcggccgcagccattggtctctgacgtcagcggcgtgcggcgcactcggcacgtcatcgccgcgcgccggcttgccaggagctggagggggaggtaggcggggcggcgcgtgacctaaggcctctctgccgcgcgcgcaggtacggggcagaagtcgcaggtacccagctgctgcccacatttctggtccagagtcccgaaccccgagcactgggatgcctggctactccggtgggtgggcggcgctcggagcgcggggataccgaggggcgggcccccagcttagagcgtgacccgaccccgcctaatccttaggcgttcgcccaccatttcccagtcccgtagagctggggccagacaccgcacagccctagtgctgttaccagtcgctgcctgcgccccgggggctgcgcccagcagcttcctggcccttttccagccattagcgtccgttttccagccctgctgccccactgaggccccttcccacagcagtatcaccagccccagccccgcgttgttactattacttcccaggctaccagatccttttctgctcatgttccgacgtctcttcctactccagggccattattggtctcttctggacctttcagagataagagaggacctcggtagtgtagggcccagtcctctgggaacaagggatggggagttttaggctgctgtccttggttccagtaacagagataccccctccacaggcacccaaatatgctccatagaatacaatgagtgtggtcctgtggaggcccaatccaaaatatctagagctgagaagagatagagattttacaggccgtcaaatattcaatgggggtcgtctctagagacttttaacaaactgtattgtgtacccacagattgcagaatggtgagcaaacatttgagaccatgttgctaaagcattaagcttggagaaagtgacagtaagaattagacaatagttttgaagtgaccaagaggttgtcacatggaagaattagaccttgttttgtgttttcctgcagagcgttatccagactagcgagtgggaggcagatgtaaaatctggaacgcagattttagtttgttggaaggagaaatgtaacatagtgaaccacgcatctctggagggtgtaaagcagagacagccaaggtaatttttggaaaagagtgcaggagagtagagtaaacgatgccagggttccttccgactctgaaattccgtgatacactgagctgtctttctcttgtggaagtttgaaagccatttgataaagttctcttcattttttagaaatttgccctgctctggaattctgcatgttcaggttacttttggactgtcaagatgacagttccttaatttgggttccattattaccacagcaactggtttatttgtatagctgtccacacctagagcattttcaccctgtcatttgattttatcttccgtgaagcttgtggtgtgtttcccttaactgttcgagaaactaaagcccttactctgaagtctctgcaagcctccctctttgattttgaagcatgattgtcaccctcacagaaagctcttttgaaatataccattcgtttaatcctgctgggtcacatgctctctcacgagttgctgaaatatctattccttgtgtttatttcagagccaaggcactgatgtttgaactggaaacttcaaaacgtttaataagagtcttcaggatgggtttgaactagacaagctagaaatttctttagaacaccagctctagcatgcatctcccacttttggctttcctggagaggagcttgaagaggtggttctgcagacagccacagtgatacttaggaaaccagaggaatggatttgacttttctgctaggattctctgttatagtttctccctgagttgtaagaggcatggaaatatacatgaaactgaagaacctgcaaggaagggaagtggaactttccatgctgagtgaaaactaaccaagtggcagttgtgactgaaaacactgaaacctaccacgtccagattcactggattgggggatagaggaacggtcacagctagggagaaagaagtgataccggaaaagaaaacctaaatgaagagaatgaggatgactgcacagtagatggccacctctacctccacagaggcaaagtcagcctcgtggtgagtaacaaggcctgccatggcatagcttttgctgggctgttggttagagttttggggttaattgaaaatccccagccagattgtgttaattttattaacataacaataaaaatgccattttcctcagagcagctgaatcaagcacgtgagccatcgctctccaaagctaacatgttttaaccttgcaagcctctcccaatgtttgaatgagtctggcattgctgggagattgtagaaaagatagccacagcctgatcatgcagcgagctttgatgataatgtgaatattgtagtcttcaatttgcagagatgaggtatggttgcatttgagaattacagcatgaggagaggtctggccagactgggtatcaaggggtattactcaatgtctgtctgaaacccagttcccttctcaaccctaaatgcgttaatcctttcccataattaggtttagcaaacatcagtcatagaggagatgaaggtgaaaagcaggtttagctagaattagcaggatttagtgactgattatttatgtggaagtcaaaaagatggagcagttcaaaatgacacccaagttttctttcgtgtgcccgcacaagcagggatgctttcatcaagagaacgtggggacaggggaggatggggtgcacatggagtttctgagttggctttgaaacttttttgaggctttttgatctgagcttaccctgcagccagttgtacatccagccttaggtattgggaaagaggacagtgccaagagaccaagttggtgctttatttatttgtttgtttgtttttgagacagggtcttgctctatcctccaggccagagtgcagtggcatgatctcaggtcactgtagcctcaatcccccaggctcaagtgatcctcctacctcagcatcccaagtaactggaaccagaggcacaccccaccatgcctggctaattttgtctgttttttgtggagatggggtttcacggtgttgcccaggctaatctcgaactcctaagctcaagcagtcctcctacctaggcctctcaaagtgctgggattataggtgtgagccactgtgcccagccaagttggtgctttttcatcaggaaggcagggtgggagccatggagggaggcttcagagagggcatagatccagggaagagagcagatgacacattggtcccattgcttgtttatgctatagcctcataaatgtgttctcagagacttagaagtaaaacaggtccagccaggctcagtagctcacacctgtaattccagcactttgggaggccagggcaggattatttgagtccaggaatttgagaccagcctgggcaatatagtgagactcgtttctataaaaaatttaaaaaaaaatagccgagcatgatggcacactcctgtagtcccatctacttgggaggctgaggcgggaggatggcttgagcctgggagattgagtttgcactgaaccgcaatcgcaccactgcactccagcctacagggctacaaagtgagaccctgtaaaaacaaaacaaaattgaggcctggcctttgaggtgtttgttttatggtcttaaagaggtaatcagataataacattacgtaatatagttatactgcagtgtagtctgtaagagtctttgaggaagaacagagggtcatggaaattcagaacaaagagatatctctgggccgagggaatcaggagacggttaatgaggaagtgtgcttgaatgatacttggtgaggtttggcatggtagagaggagttcagagtttctctgtaaattctcataggcccctgttttttccctgttacgaacttttggactcactatcctgcattgaaactgcgtgtttgctcagcaaccgcggagcacactgtgggccctcagtaaatgtttaagtgaatgcatgaattcctggtagaagggctgtttctggaaatctttgtgctcagcacttatgaggagtgcatctaatacatccctaacttattttgttatcagagccttaaaagacagcgtatcagaccatgtggttgtatagttaaggttcagtgtttcaaataagagcagtcattgtgggcgcctcgtttttttttctagctactcgtgtcttctccggcagatggtctaacggctggatagaggcatatttttagtttgaatttcctgcgcttacagaatggttttatctaatttgtagctactggggttctttattctctggggccacctgaaggctttcaaacacagtaataagccctcctcgggctgggaaacaggaagctgtgttttaaatgccgtgatcactggattaaaggaaacatggctccactctgttctcttgccaggtggaattatttttttctttatgatggttccaaggtaaaggaagaaggcgatccaacaagagctggcatttgttacttttatccttcccaggtaagccacacagcattttattgttcagtgaggatcccagtgcctccaagtggtgacttttcaaaagtatggggtttacattaggacagtttggctaatccagacaatgacatttctactgtcttattcttagttgtactatttcttgttgttctggtcttaaaatttccaggcagctcggcactttcatcgtctttagctttctatttccatcatgatttttgtctgcctccctctacccccaattttttgatcagcttggtttttaaaagttattattctgctgggcacggtagtttatgcctgcagtcccagctctttggcaggctgaggtggatggatcacctgaggtcaggagtttgagaccagcctggccagcatgatgaaaccctgtctctactaaaaatcccaaaattagctgggcgtggtggcacgctcctgtaatcccagctacttgggaggctgaggcacgagaatcgcttgaatccaggaggcagagttgcagtgagcagagactgcgccattgcacaccagcctgggcaataagagtgaaactccatctcaaaaaaaataaataaataagtttgtattcaaacatatacaaaaacagagaggcaagtatcatgaaccctcatatgccatcagtagcttcaacaattatcaatactttgccgatttttttttttttttttttgtgatggaggctcactctgtcacccagggtggagtgcagtggcatgatctctgctcactgcatgctccacctcccgggttcatgccattctcctgcctcaacctcccgagtagttgggactacagtcgcccgctaccacgcccggctaatttttgtatt

SEQ ID NO: 9371 - DNA, 6000 bp, Homo sapiens
gtccttgaagttcctggcgcccaggaccgactagccctgggagagcgccgtcctgcaagtgttgattgaatgaatgcaaagagtcttgtgtgttcctctgcagcagccgggaaaaaaaagtgtgtggggtggagtggggcgggtagcataccccagccagcaacaccattcctcagcatttgacaaagtgtgattaattaatttttttctctctttcttttctttctttctttctttccttctttctttctttctttctgtctttctttctttctttctttctttctttctttctttctttctttctttctttttctttcttttctttctttcttccttttttttttttttttttgacagagtcttgctctgacacccaggctggagtgcagtggcatgatctcggcccactgcaacctccacctcccaggttcaagcagttctccctgcttcagtctcccgagtagctgggattacaggtgcctgcgaccacgcccggctaatttttgtattttttagtagaaacagggttttaccatgttggccaggctggtcttgaactcctgacctcaggtgatcctcctgcctcagcctcccaaagtgctgggattacaggcatgagccaccgtgccaggccattaattttctttttttttaggagacaaagtctctctgttgcccaggctggagtgcagtggtgtaaccatggctcattgcagcctccagctcttggccttgaagtgatcctcttgcctcagcctcccaaagtgttggtgtgagccaccaagcttgctgaaagtgtgattcgttaagactatttttattcaagtctaacgtgtatacagaaaaatgcatatttcatacgcatacagctcaatgaattttcaaaagacgaatgtgtctgtgtgaccagcacctggatcaatagctgaacgtacatagcacccctccctgccccaggacaccttgctccccctgcagttaccccttgccccaccggggtaaccaccatcctgacatctccccctagaatttcacctgtttttgtactttgtatccatggaactgttactggaacggggtcccgatccagaccccaagagagggttcttagacgttgtgcaagaaagaattcagggtgaggctgggcgcggtggctcacacctgtaatcccagcgctttgggaggctgaggcgggcggatcacgaagtcaggagatcgagaccatcctggctaacacagtgaaagcccgtctctactgaaaatacgaaaaattagctgagcgtggtggtgggcgcctgtagtcccagctactcgggaggctgaggcaggagaatggcgtgaacccaggaggcggagcttgcagtgagccgagatcgggccactgcactccagcctgggagacagagcgagatccgtctcaaaaaaaaaaaaaaaaaagaattcagggtgagttcataaagtgaaagcaagtttactaaggaagtaaacaaacaatagaatggctactgcatagacagagcctcccagaggactgctggttggctatatttatggttatttcttgatcatatgctaaataaggggaaaggtgtgggcagttcccagaactgagggttcctcacctttttagaccatatagggtaacttctggcattgctatggcatttgtaaacgtcatggcgctggtggtgggagtgtcttttagcacgctcatgcattataattggcctataatgagcagtgaggatgaccagaggtcacttttgttgccatcttggttttggcggttttgtccggcttctttattgcatcatgttttattaatggggtctttacgacctgtatcttgtgaaagcagtcctgctgacttcctgtctctgtgacaaagaatgcctgacctcttgggaatgcaacccagcaggtctcagcctcatttacccagcccgtactggagagatggagttgctgtggttccagtgcctctgacagaaccacgcgttatggtctttcttgtgctgacttgtttcgctcatcacaggtgttgttattgcgtaaggttctggcttgttctttctcctggctgtttagtatatatctgtttatttgtatttacttgtttatccattctattgccaatgggcatttggatagtgtccagttgggggcaattacgatcatgccaccgggaacattttgatatgtgcccttcggtgaacagttgaatgcatttctcatggatgtataatcagcagtagaaatgctgggttgtagagaaggtgcacattcaggctttgtctcagttaagccagagttttccaaaggggttgaaccaggtttccctcctgccagcagagtatgaaagttctggttgcattacatccttgccaacacttggtatccttttctttttttagttatttagttatgtaatgatcccacaatgtactttaaatttgcatttgtttccccgatggatatgagtttgagcacctttcatatgcttattgaccacttagataacctcttttatgaagtatgtcttcagacgttcccatttttctgttgtgttgcctgtccttttttaaattgatttcacagaactctttatatgttctcagtataaatatttgtttgagatgtattataaatatcttttttcatgcatgacttcatttgatccataagaggaggaaccgggaattttaagcctcaaggtcattggaatccaggacaagcttcacatgtgtgagcctcagtttccctctctaaatcctgtggatattagctcattgactggtgtatagatggaactgtgactgatattagcatcttttgctgggatgaggaagccctgaattaaaatgggcaaaactggccttgcatggctttcaacctaagtcatccctgtttctcaggtctgtataccaacttccaggctaggccttgaaaataaacagtgagcaaggccatttcctacccttggaggggactgcaccagtggtgagcgcagggggctgtgggatcccagcagaaacactaactgggctaaggcattgtggaaagcttcctggaagaggtgagtctcagggtggagtaagcctcttctgttcaggtacaggcttgggcacctttgtgcatcaggcactggacaggtacctgggagatggaaagaatcggcttagtctcaccccctcttaccccgcaatagaccagtgttcttgatggggatgactgcacccccagggggcagtcagcaatgcctggggacatttttggttgtcaggactcagggaggggatgctactggcatctccttggtagaggccggggatgcggctaaacatcctacaatgcatgggacagccccaccccatactaccacaaagaatgatctggtccaaatgtctatagtgcagagactgagaaactccaagatggacaattacaatacgatatgagcgggggaagagaggagagcagagggattgggagtgttgtcctggccttaaggagtttgtttgtttgtttgtttgtttatttactgactttgagacagagtcttactctgtcatctaggccggagtgcagtggctcaatctcggctcactgcaaactccgcctcctgggttcaagtgattcttctgcctcagcctcctgagcagctgggattacaggcgcctgctaccatgcccagctgatttttgtatttttttttctttttctttttctttgtctttttctttttttttgagacagagtcttgctctgtcaccaagttggagttcagtggcgcgatctcagcttactgcaacctctgcctcccaggttcaagtgattctcctgcctcagcctcccgggagtagctgggactacaggtgcgtgtcactacgcctggctgatttttgtatttttaatagagacggggtttcactatgttggccaggatggtctcgatctcttgaccttgtgatccgccttcctcggccccccaaagtgctgggattacaggcgtgagccaccgcacccagcctaatttttgtatttttaatagagacagggtttcaccacgttgtccaggctggtctctaactcctgacctcaggtaatctgcctgcctcagcctcccgacgtgctgggattacaggcatgagccaccgtgcctggccaggagtttattaaccttcatgcccaccacgtcaaccacaaaccacgtgtggctgcagagccctcgaaatgtggctgctgtggctgaggaactgaatttcaagtctttatctattttaatttcagaacagatactcattcccattcttggaaaacttttaagtgtgtgtacaacagtttgggtgtgtggatatactttgttcaactatcaattttatgaaatctctgtacagattagccatttctactgagaatttagcatccaaattgagatgtgctgaaagtagttttaccctgggtttcaaggactaagtaattaaaaaaaaaagactataaactatctcagtaatgtttatattgattgatgataatattttatatatattgagttaaataaaatgttattaaatttacttctgtaacatagctactggaaaactgagaatttgaagtgtgtctcacactgcatttctattgggtggcgctgttacaaactacaggaaggagctagaattctgtggaaggttttaggcaggggctgacatcctctggccaaaatgacaagagggaattccagagaccagggcaagtctggccacagggagactgcatggcctaggagacctgagccacagccgccaagagaagccctgattccccagagaggaggtgcccgctgccagtccacaggtgagcaacaagactggatccagaagagggaggagcctttaggagaggcaggcccatcgcaaggctgactgatccttcaaaggagcctcccagctaaaagccagcaggagagagaccttggccaccaagggtctgccagctcctggtggtccccactccagccacctgccagctcgagcctgaccctcgcctccaccctggctgctgcctgtaccgctctcaggtttgaaacctcatctcttgctgcttggctctgctctctactacttaccagctgtgtcaactagagcaagtggctttccctctctgggggctaccagctttgcatggcctggcccatgttgcagctagagctcaggaaagatcagagatgcccacaggtgacaggtcttcctgggctgggtgttttggaggtggcattatgaagtctcagtggggggtctgcagacagtattctctgtttgcagatggcttcccctctccactctgtgtgttacgtcctcatttcactgctgagaaagtggaggctcagagaggtgaagcagtttgcccagggccacacagctccacagaggcagaattcagatgagtaatgctgactttgcaggtccaaggataccccttccatggctataactcagtgttcgatcaagggcagagcactgcacctctctgggcctcaatttccccatttgtcaaatggggagaataacagtgccagtcagctgctgtgaggctatagtaagttgaataaaagtaacagagcaccggcccaaggcaaggcttcaggtggtggctgctgtttgttgactgatctgtgcataagtgttcactgcagccttctgcagtgagtggtaggagcccatttttaggggaggaaactgaggctaagatgtgcaactggtgagagcaaagttggggactcatctggcttcttggccctggagcactttccctcctctgctcggccctccggcgttacctgttattcatgacggggcaaggcttgcgctgtccccagcctggtcctccgtcctgcatgactggacatgaaggggcatagcagcagccttgccagtggcgctcacagatgtccagcccactaagcctgctccctccctcaggaactctgcttcctttgct

SEQ ID NO: 9372 - DNA, 6000 bp, Homo sapiens
gcaagtctcgaactcctgggctcaagcaatctgcctgtcttggcctccccaaaatgctgggtggcgcacgccaccgtgcccggctggggaatggtttatgggggaatagcggtgctgcaaactctgatacagccctagctgccctgttttgtctccttagggagctcttcttcaccctgctccgtaagcacaggctccctgtccttcctcacccttccctggtgactctagttattcctatggcctcaattcccactttggtgcccagctccccgcctacctctttccctcccccaagacccccctctttgctcctactgctcttcaggcattctatgatcatcccaaacatccctcagactcagagtattctaaacagaaccagacaccacctgcttcacccagcattcaacctggccctttctcagcctcccagactcagggactagctctacctccagccagccagtcacccaacagcaactcttccctcctctcctccatacctgctgccaataggatgctacctttgcatggtctacagacagctctggtacttccccagccttcttgttccaggtcacacctgcacagctgtaacaactactatggaggtcggcctgctcctccctctccttccccatccctacagttcatttcttacccagtagcccaatgggaatcccatctgctccctcctctgctgaagaccctcctgtgggtctgtccctacagcccacaggatctaggtgagactcagtagcatgcttcctgaaagccctgcatgtccctctttttttttttttttttttttgagatggagtctcgctctgttgcccaggctggagtgcagtggcgcgatctctgctcactgcaaactctgcctcccaggttcaagcgattatcctgcctcagcctcccgagtagctggtattacatgcgcctgccatcacgcccggctaatttctgtatttttagtacagacggggtttcaccatgttggccaggctggtctcggacccctaacctcaggtgatctgcccgccttagcctcccaaagtgctggtattacaggcgtgagccactgcgccaggcctctgcatgtccctcttaaccctgccctagtttctggctgtctctgtagtctctcccctgcccacccagcctattacacgcaaacacaccaaacactccagccaggtggaaagtttgtttctcaattgccctgggcctttgcatgtgcttttctctctgtgtggctcattctagggtaacaggcatattagttaatgctagctgctgtaacagacaaacctgaagttctaaaaggcttaatacagttctcgttttcttgaaatccagtcagtgtctggtgggtggagatgcaaagacctaggctcctcccagctccgcccatgcccagatccttggagaccaccccgttcatccagtaaatgggaaaggagaccacagaaaaggtccacccacttaacctcatcagctggcattctgttcacatatcattggccaggacccagttatgtgaggacactgaactgcaagggcgcatgggaaatatagtctagctgtgctgccgtggaaaaaaggggactgtctttggaaattggagaccacacaacagcttctgccaccagaggcccctaccccaggaagccttcctgatactgctgtctccgccccaaggctggatcaggtgttttcttcgtgcttctgcaagcctcagacaatccgttgtccatcacacgcctcacagctgtgtgttcctgtgtctccccagttaggactgtgagccctgagttctctgcaccgggttatcatgaactctagtcctggagtgcaggtgcccagtaaatacctgtgggatggatcaatttaaaactatcacgggctgggcgcggtggctcacgtctgtaatcccagcactttgggaggctgaggcaggtggatcacttgaggtcagaagtttgagaccagcctgcccaaggtggtgaaaccctgtctctactaaaaatacaaaattagctgggtgtggtggcgggtgcccgtaatcccagctacttggaagggtgaggcaggagaattgcttgaacccagggggcagaggttgcagtgggccgagattgccccagtgcactccagcatgggtgacaagagtgcaactctgtctcaaacaacaacaacaacaaaaaacaaccaaacaaaaaactatcgtggctgcaagatgtccacaatttatcgataggtgggaaaaaagcaagttaacaaaatatgtccccaaagaagcacgtgcatctgggctccatggctcacacctgtaatcccagcacttggggaggctgaggcaggagggccacttgagcccaggagttcaagaccagcctggacaacatagcaagaccccatctctacaaaaaatcaaaatgccaaaattagccaggcgtggtggtgcgtacctgtagtcccagctacctgggaggctgaggtggaagggtctcttgagcccaggagtttgaggctgcagtgagtcatgatcacgccactgtactccagcctgggtgacagagcaagaccttgtgtcaaaaaaacaaaaacagtttccattccatcatctatataaatatatggccagaaatcctgtgatggtgatgacctctggggttggggttcttttaatcatcttctttatactcttctgtattgtttgaatttttttttcagtatactgcttttatcattgaaaaagtttttgctgggcaccatggtgcatgtctgtaatcccagctacttgggtggctgaggcaggagaattgcttgaacccaaggggcagaggttgcagtgagccaagatcttgccactacactccagcctgggcaacagagtgagaccctgtctcaaataaaataaaataaaataaaaatttcctgggggtgggggtagagaaccagccaaagatgtcatcggctgggcgtggtggctcacgcctgtaatcccagcactttgggaggctaaggtgggcagatcatgaggtcaggagatcgagaccatcctggctaacacggtgaaaccccgtctctactaaaaatacaaaaaattagccgagcatggtggagggtgcctgtagtcccagctactcaggaggctgaggcaggagaataacatgaacctgggaggtggagtttgcagtgagctgagatggcgccactgcactccagcctaggcgacagagcgagactctgtctcaagaaaaaaaaaaagatgttatcatcaatactctggaaagagacccctctggcagggctggaagcacaggtctaccatcagtgctccctactctggaaatctttgcttcccttggctagttgctcacctcctcagccacgatctcacttcttgttcaaaagcctgcacttcactctcacctagatgaagttctcactcctctataaaatggaggtgataacaagagctccccagagaggactatgaggctgcatgatgcatgacaggtcccaagcacagaagtggaccgtgttgggttcagagtccacgctaataaactacagcccctgcggtttgatgccagctccgccctgactcaccgtcagaaagctgtcttcattctagctcagctcaaaaggcagaaggtcaatgggatgttaggctggataaaacaactccataccatgtcccaaacctggttccagtacctagagagaaggcgactctggtctgccttgtggcagtttaagctctggtgtttcgtgggtgcttgggggctgctcccagactggtgaggctttgagggaaagggggactcagagcaagtgaggatgcctgctgttccctgggagaggctggcagctgcttagcctatgaaagtgcttagtgtgggatgaatgactgtcacaataatgatcattattaattgatggtggcacctgggtccctaaatggtgacacctgcctggtccatgatggggttctaggcagcagtgctgaagggaggatggaggaggcatttctgggcacaaggagaccctctgcccatgggcaaagctgagacaactgacctgaacctaagattcaagtgcctgaactgagtcctagggttcctggggcttagggccagggcacctagaactgcctcttctgccaaggccttggggaagatctgcatctccaatcagcccaaatcctgcagagctggtcgagtgtctgggtatcaccattcctcacccagggatagaggcaggacaccctctctgatgaaagatttagagctcaggaagtgaaatcttgccagactcatcttctgagccctggtcagatgctctgcctcctggaagccttccaggctgagttagttgttcattcttctgggttcccacagattttagataaaccttggtccctggttgtgtctcagcatctttaagccctggagtttggcaagtctgcgtatgtactccagctctgtctgccctctactagctgcgtgaccttgggcaggtgacgttacctctctgagctttggtttctttaccaggagggtagactaacaggggtgcttgatgcatcagctgtgagacttaaatgaaatgcaataggtggggcaattagccctctggcaccccagcccacctgcacctctctgtccctcactcagccttagagcctgttctgggctctctgcaggcgtctgcggttgctgtgtccttggcccaaggatacctggaatctttctgtgcccttggatgaaagagctgcttgcttgttggggtccaaagagaggtgaggactggccagagctgtccagtggaggcagaaggcctgggcaacacctgcagggtactggggtgtgccacctgctatccccaggaagcaaactcatgaatattcacaccactggagtgggagggagccagccagcttgctgctgggtgtcattggagcattcctgtctcccagtgatcgcagaggcagcctgggagttggacgtggctcaggcagtgggtagaaaggggcagccagccacagcccgaggtgagtgtgtctcttttgctccaccacaggggttacagggaaagtaggataccctgagacctgactggtggtgatgctctaagccagaaggtttaccatcctgggctgagtttccctttgtgcatgatgtgggggaataagtcctgtttctccttcattccctggagggcatcagttcagctaaacaggaggatggctgggcctggcctgctgccagctgcctgcactgatgcaggccaatgtgatgggcgtaatctagaagggcaggaatagatggagtgggctggtgacggggggaccgtccatcctgagtgcctgcagttgtcactactgtgggtggaggaggtgggagacccaggttctagtcctgtctctgctgctgctgggctgtgttaccccaaaggtatccttgccctctctgagtctgagcctccctgcctctttgtcttctgaccctgaggctaggagtctctggctacattgagatcatccctggacttggctgcctgcaagcctccatcgtgggccagtgggcacacactttgatggggttgtggctgggaccctgggaacgtaatgatgataatgatgataacaatgatggcaggccctgctgagtgactgtctgctctgcaccagcctcgggctgggtgctttccctgtggaatgcagaggatctgcacagcaccctgtgatggagggtcagctggtacaggttgagtatcccttatccgaaatgcttgggaccagaagtgtttcggatttcagatttttcagattttgaaatatatgcatatatgtaatgagatatcttggagatggaacccaagtctaaacatttaagtttagaaagaatttatgtttctttctttcttattgattttattgtttaagcttttttttttttttgagacggggtctcgctctgtcgccca

SEQ ID NO: 9373 - DNA, 6000 bp, Homo sapiens
tgcattttaacaagattccccaggtgatctggctacacagtaaactttgagatgttctgcctcatagctcttttaaacagagggaggagaaaacagaaactgataaaaacacaccctttaaacagggcttcacactaaagagctccaaaaggtatatgtcataatgtttcatttcaggactctggtgcttttaccaatgtttaaattttttgttttcatttttgtcttgaggatcttatggcccactagcttgagctcccctttccttgagaagaaaagctccctttgtcctttgagttgacctctttggcactgatttttttctttctgtctctagaggggctttgactccccagttcagcattttatcataaggtggtcagagagccaatacctgacaaagtcctactctgacggactttcacagctggcgagtgaataaaccctctctcctaaaagacaatgggattctctatctacagccaaatttgttctaattagctggctctcagctttgcaggggcaagtcttctggaggttaataatgctattttgagcatacctgtatctcgcctgttaatgaacatgatgatgtcagcataaaatagtttcattccacaaagaaagactttatccccattccctgtctcatgtctccattctggacttgcttgtttttacttaaattatgttcaaatcacacttccattagtgttaatttggtggcttttgcaatgttttttcattctttacctaacaggtgatttcttctttgcttagcccggatggagacatttgttttgttcagcaatgtcttttgattattggcctaaataaaagagcaatgtttcatgcccggtgcttaaatttttgcttgaagtgtgtcaggacagagcatctttggcagatatttatctagcattggtttaaggaaaactaggctttttcaaacctgtgctatctgaatgctgtttgattcttgactctcataaaggacatcttaactttacctactggtaagatatggaaaaaatactatgtgactgctaaggatctggaagccatgaaaatttaattgctagttaaaaattttaggcagctttctgtaggatcagacccgacatttagatgttttgataaatataacattaattaagatactgcaatccttccatactggctaagtagcccttggagtaatcacccctccactaccactggctgccattcccactataccctgtctcctcacccctgctgcaggaaccactccttcctcccaacatcaacaccaccatttcaccagaacccagcactaaagaataaatgtctggcctagcagaagccttcaggactcagctctaatgctagtgcccctgtggctggcttgacttcaattaagttggcaggtgggtgccctgctgtacaggttgcttaatcttttaaatatcctctttgtgagaattcaatcgtcttgttatgtagctcttgaagaatgtgcaaaacattcagaaaacagtcctcaaatctttgaaagaacgtcctgtttggaatggcaaacataattgtgccgactttgagacagttaagagtatttggtaaccctcctctcaaggatacaatatttcctttcttggaggtgagaaaagagttgagaaactaaattgacttaggagtcaaaattggactcaggtcatttattacataaaactagatttgcctccaaactttgcactatgtttttgtttgtttgttttgagatggagttttgcttttgtcgcccaggctggagtgcgatctcggctcactgcaacctccgcctccccggttgaagcaattctcctgcctcagcctcctgagtagctgggattacaggcgcccaccaacacgcccggaacattttaccatttttagtagagtcggggtttcgccatgttggccaggctggtctctaacttctgacttcatgtgatccgcccgcctcagcctcccaaagtgctgggactacagtgcactgtgttcttaacgtgcctttagattccccagttcctaatatcaggcacacagaaaaacggaggtgagagtgtttcctggcttcctctttgagatgcctttagggccccctagtggctgctttaagacctcaggtttcttaggattcggtctccttgaccctaataaaaaataagagacctttccgaatctcttcagtgacaggtacaataactgtgtggagataaacagataacagttggtttagatagctcatttttttttttcatttttcagttctcagcaaaagctgcgctcattctttacaaataacagatatatcactttacatattttattctgcattctcatactatatcgtagcggaaatccttttaagacatttgtatcttggttgtgtcaaaaggctataattcctggtaactacatcctacttcagggtttccatgtatatgtatatacatatttagttgcttggactggggagttgaggagctttacaattttccaacgtaatactttaaacctggggcttgatgtactaaccagaggactcagtatgtggcacatttcagtctgacaacattaatatcatttagagcattagctatgccactgactgcaggcacttgcaaccttgatttgataaaacaaagcttttccacatttaaggtgcttattgaccaatgcaagtacactttgtgaaatccactaataaggcattatgtcttcaacgtgccttactgaccagcgtgaacattgctagctcccacaccatggtcacatttttctttcttagattccatctagagaatgtactacacttgagtcattataatggagatgtttctttcccggaagcttatcttttagtttctgatgttattcaactatttctccttcgcttgtaaatttcaggtcttttcctttcctcagtcacgttacctttattaatatgctaatgtgctgtaataatgcattttacaccactaatgaagtgaagcaaagcaaaacgtaaaaagaaagtacaaattctccctttaactttacccggttccggggagggggtaggggtgagagaggaggaagagagtaggaaggaaggacattcgggcggcaaaaaaataaaaatgatccccttgttttcagcgcgttctggaacagagctgcacgtcagaggaagaactgagcagccttcgagctaaaagacttggcattaaactttgacactttaatggtctctaggatattagatagtattttttcatataatgttcttctccgacacggtaatggcatcagaaacagaatctgctatgcctgccaacgtgcacggtgaggctcatcgccgcagaggtaagacagcaggaccccagcttcgcagttaacttatcccgaagctccaaagcaaacgtcttttacttcttcgccggggacgctgctgtaccaccgctgcctccctttcgcattctgctgggctcggtcagccgctgagattaggtaaacagcgctccggagccggggcaaagcgggcgctgctgctgctggtgggggtcgttgtttcacgaggctggagggaagggggatgggagaagggtcccagctcggtaaagccaaaggccgagagtgtggttaccgaggcgggagccaggtccggagccaagcaggggccaagcctccgaagcccttgccgccccacccccccagcccgacctcgaggagtggggtcagctgggcaacccaagctcggcggccctttcccgcgcgccccctccccagcccatccttcccctgccccttccaagaactagggtgggcttcccgctgcctcgctcgagtcctggagagcggagaggcgcgcagagggaaggcaaagacccggcggcccgcccggctggggagaggtggagacccggggggaaggggaccccagaagccctgggaccgagctgcggaaaaacccgggagctggatcgcgcgcccggagctccggtctccgagtccgagttgtgcagctctcggcgtcctctttctctccctgcctctctgctttcgcctcctctgggtcttctctcgagggcatcctccttccatccattctcacacccccgctcctgtgccccgacccatttcacccacttctcctgtggctcgggaggactctccgtacccccaccctggtccctagaactgggaggctggaagtccattcaagggatgttgcgcgccgggttcttatgccaagagggaaagagcgagaataaaatcagcaggggaggggcgtgttgtgcgtgcatggggtgtgtgtttggggtggaggaaaaagaaatgtagtttcctcagaggaagaggaagccttggacaggattcttggataccgatcccagaaagatgccgtcagagcccttcggcggggctcctcacagactccggctgccccacagcatgcccacctccgagagaagctgcgacccgaggcggggaaacttcctacttctcacgacggctgttttgtgcaatttggggagcaggctgcatggtcctgcaagcctgcgagcctctctaccacggcagctgcgggcccgtcccgcttcccttccccctttttccgcgaggcacgccaagcccgaggcggccgggagccgccggggttgggggaagaagggcggggagctcccagcttgcaccctttcatcccgacccggcccgggatcccggctccgggtgttgcttccgcctgcctgccagccagcgagctgaagaagcaccggggcggagtctcgccggggggcggagcctgtgcgggggcgaactctcggtccgcgcggctgcggcgcttgccattggccggccgctcggtcacggggtcgggggcgggcgccgacgcgggcgccggccccgcccccgctcggaacccagccccggctcgcggtcccccccggctgcacagacatgacacagacacacagtcactgcagctgctgagcgagtccggcgctctgggcacgcggaggcggcggggccagcccggagcccggaccccagcgcccgcccctgccggttcccgcgcggcggcccactcctggccgggcgcgggaggcggggatcgcgcgccggctccggccagcggcgcccggctgcccgcggcggctgcagcggccgcccagctccgagcgccgggcgctccgggaagccggcgcatctcggaggcggcggcggcggccaaggccggcgagcgctcccggcggcgggggccgcccgcctcggctccccgcacccaccgcgccgcgatccactcgccgcgcctccgctcccgtgaccttcccggggcgcctcccctagccccgcgcccccggccccgcgccccaggccggggcgaggccttttccggcgcttctttcccgcggagccgcgggcgggcggcgcaggccctgggggagagcgcgccgcggccggttgcagccccccccgcgccgccgcgttcggcgcccggcccggccagtctgctcctgccccgccgccgcgccggagcccgggcgcccgaagctgggggcgcggccgcgctcgtctcgccgggctgttcgcgggcaggccctgccctgaagggacgaatcggcttggagcgcgggaggtggagtcggccccggcggtcgctccctggacccaacccgaggctgacccaggcccctgcccatgcggggcgcccctggctcggaagagtcccccgggccgggagcagctccaggcagcggccccggaggaagaggaagaagggacagtgctcagcttgggggacccggaccctcgccgcggcatttggagccgggggcagtcccgaactctgtgcttggcaccgccgctccgagtagggcagcgcctgccgggaccctgacccggaccccctgcgcctcgtaggcggcggcgccgccgcgccaccctgttcttccgtgtctccctctgcctggcggcagtcacggccaaggtaag

SEQ ID NO: 9374 - DNA, 6000 bp, Homo sapiens
catcattgtgatcgactgtgtggagggcccagctgtcaaaatccttactgtgttatcatcaaaggagttaacagtaactgtcatttgttcactcaacaaatatttattcctcctgtgtgccaggcactgttctaggctaagagtgttgagggagtgggaccgacaacttgcaagattgagaaatcttcatgggactcacagtcaaaagggggtggggagaatagggaaagaaacaagtagaccccaaactggaaaatttcggagaacaagtgctgtgacttgggggtttgtgtataagagctgggttgttgtgttcttgcttctagggctttctctgagctcagacaaggttacccccaattccgctctgcctgagcgtccactccatggcttaaggcatcacatggcctgaaggctcctgataaaaatacagatatcttggctcttcagtctcttcagtggacaatgagtgagcgcctgctgttcgcaggagcccgggaggaagctagacacaggaacaggctttgcatagcatttacctaatactagtgcaatgggcattgtattcgttggctagggctgccttcacatgaccccacacctgaagggcttgaacgacagaaatgtgtctcacagttctgggggctggagtccaagatccaggtgtcggccggcttggttccttctgaaggtatgaggaagagtgttccaggcttctctcttggcgtctgatgtcttgctggcaatcagtggggttccttggcttatagaagcaatgccacgttctctgcctttaccttcacggcattccctctgtaggcgtgcgtctctgtctctatatttcccttttggataaggacaccaatcatacggacgaggagcccaccctacattttttttttttttttggcctacaacaaccagctttatcacccaccatccgtaggccatgaagtggtagcttggggacatcttgtgggtcaccaacacgtggagggactgggattttggctgggtctgcccactctccagcaccccgctggatcttggtcacctgagtgtggtgggcacaccgaggcctgctctgccctgtcctgctgggtcaggcctgtgttcctcgctgtccggcccccaccatgcccagccttcaagcctcccctcatcccctcaccaggcctcccggaggcttctttttccttggggaccaaggaggctgaggctcagtgttaggaatgcagattcccagagcaacaaggcttccgttccatctatgtgaacgtgtctctttgctgcgaggacaagagtgtcccttgttgacagaggaaatccctgactccttggcaggctgtcccctacccccacggctttctgggacccttgtctgtgcttttctcttctcttctttcctctccttttctctttcttttcaagacagggtcttgctctgtcacccaggctggagtgcagcagcacagttatggctcactacagcctccaactccagggctcaagtgatcctcccacctcagcctccctagtagtgggatctgcaggtgtgcaccactatgcccagctaattaaaaaaaatttttttttgtacaaacagggtctcactatgttgactaggctggtctcaaactcctgggctgaagggatcctccctccttggcgtcccaaagtgctgggattacaggtgtgggggtaagccactgcacccagccacgtctgtgctttcaaacacctctctcagcattttgctgctgcttgcttattgccagcccctccccccaggccatgtcggatcgatggccaggtggccgccaggtctagaggacgtcgattgtgcaagatcggcttttcagactgtcgggctagcagcctgggctgggggcctgggccttttgaccttccaaaggacaggatggggtacagaggctaggatcggggtgtcttcaccccctacacaaacacactatccctgctctgtctcaagcatctgtccctcaggaagtttgcaaggtggggcccagggcctgggaagaggggagtttatggggaggaggcagagttgttggggctgggacgagggacagtgggcagggctatggtgttcggtctcagggtcagggtcaggcccatgggcaggggccaggactctggggagggccacaggagaaggtgagggaaggtaccccctaacccagaatcctaaccagcctgacagtgcgccctcctgccctggcccagccctggctctgcctggagatggtgctgtactgagctcatgcccagcccccatgggcaggggccttcacaccttaggacacaggggtgccccccacgcacatgtcagggaggtacctgcctactgctacaggcccccttagggagcacacgccagagagcatggggcatctacgtgcttgagacatgcgtgaggggccacacaggtaggcaccacacacatgccacctgtcattgcctggacttcagtgcacaggcacacctggccccgacacaccagcgtgtcaccatgagaagaggagaaacccgctctcggcgccccccacagtgctgggccttcgcacacgttgtttcccgttcatcaagaaggggcgaatttttttcattcgacagatggaagaagcaccgctcagaagtcagggaatctgcccaggttcctacaactaaaagggagccaggtagggctgaaaaccggcggtcacggcaaagcccgggcgcggggccctgtcccatcccagccaatccataagcatctcacacttcacacccgctgcacactccactcacacgcctcacactccacacatgcctcacgctccacacacacctcacactccacacacgtctcacactacacacacgcttcacactccacacatgcttcacactacatacaccttacactacacacacacctcacactatgcacacacctcacactaaacacatgcctcatattccacacatactgtgagcatgcacacacacacacacacagctgcacacacctctcatgctccatacacacctcacaccatacgtacctcaaagacacacacaccttacactgcacattcccagcacccacactgcacacacatgcacagtccatatgcccacacaacacacttcacacaccccccaccccacaccatacaaacctcacagacacacctctcacacaaatcttataccccacacacaatccctacgctccacacacacacacacacacacacacgcacattctacacatacataatctacacacacaaattccagactgtctctcttacacacacactctgggacccatatgcccacagcacacagcatctcaggcgtgcaccccgcattctggcctcaggatgtagactcgctgaaagtcagccttgtctgagacagacgcccgctgccctgcacgcaccctagaaagccctggctcccatccggcacttcggcacgcatatggctcaaacccatctccacagcaacgctgttccatagaacaacaacgcaggtcacacttgtgacttaacctgtctaatatccacatgcaacaaggggtgtggtggcccgcgcctgtaatcccagctacttgggaggctgaagcaggaggatcatgtgggcccaggagctccagaccagcctggcaacctaatgagaccctgtctctgaaaaaaaaaaaaacaagagagccagaagaaaattgcttttaataatacattttatttatcccatgatcaccagtgttatttcaacataaaatcaatataaaaattgttatcgcgttggttgacatcctgtttgcacttggccttggaaacctggtgtgcgtctcccccgtgcagcttttctcagttcagactgactcaagagccacgggtgaccagcggctaccgtcatggacagcacagcgctacggaaccaggtaggaattcatgctgcgtgcggtcgctcatgcctgtaatcctagcgttttgggaggtcgaggtgggtggaatcacttgaggtcaggagttcgagaccagcctggctaacatggtgaaaccccatctcttctaaaattatgaaaattagccgggcatggtggtgggcgctgtaatcccagctacctgggaggctgaggcaggagaattgcttgaacccgggaggcggaggttgcagtgagccgaaatcacaccactgcactctagcctgggtgacggagtgagactccatcttaaaaaaaaaaaaaaaaaaaaaaaagaacgaggtaggaattcaaataattcccagctaaacagaaaatagcatcaaaccccacccctgcctcccctttctcctctccagtccccagagtatatgggcccagcctccttttctctctctcaggccagcagctcctttagtctcgcctgtccaggtaagcacctggactcacccttgtgagcccctgcactcacctgcaccggcctctgcacagtccccagtccttggctgtccctacctcatgctctcggggaccaggggctgtaaccaggcaggcatgtcaccaggcaacgggcctcgggggagagctcagatctcccgcacctgcctgccagcctctggggtgcccatgcgggggtgggggaagatggggcggggcaggcactgccttctcctacctcctgcctgtttacctgtacttagtcacagtgctgtccaggacccagcaggaggagttccatggagcctgaggccacaggccacaggggacaagggccagacaccctggtcatggctctaggccattgatccagcctgggctggctgggtgggggtggggaggccttggcctggacaaacagaggctcctgaggcctgtgtgcaggcccggcacctatctgccgctcccaaaggtaagcgggggcctccaggacaggggaccgggatctataaatgacctagtgacagtgtccaccctaagagctgggcctggctccctgcagcctgagccacctaccctgctccgaggccaggcctgcagggcctcatcggccagagggtgatcagtgagcagaaggtgaggggcccacagagctggggaggggagggaccacgcagggtgacaccaggtgtgtggacaggcacagcatcagtgctgggtggttggtggcctgggattcaggtggcagggacaggaggaagggagaggccaccctacccctgcctcgcaggactggacatgctgccccctccacacccggtaccccacctgggccttctggtgtaggagacaggcccggagccccacattgcacctatgtactgacttaagcccaggaccctgggctcacaggctcagagttggcatgtatgtgtatgtgtgttcgtgtgtgtgtctgtgtaggaagggcgtgcatctatgaatttttgtgtcatgaatagatgtgcgtatatccctccgcgtgtctccatctgtgtacatctgtgggtctgtgagtgtgtttatatgtgtggaagggacccccacccagtcccccacactctcaggactctagggcctaatggtttcactgaaagatgcccctatggccctagcccagagtccctgctctgctctgctctgccctggctgagggacctcgggtaagtcatgttacctctctctacctcagtttccccagccattaaatagagtcagcaaagtaggcaccccaggctgttggaggctgcagtggagtttgcagcactgcccagcacagggctggcacatggtaggagttcatacgcagtggttgaatccggatctgcattgctgggggagtcgcggccccgccccaaggagctcagcctccagcaggcagacccgagaccctccaatggccagaagggcaggagggagtgaggagcaggtgccagggtggggtccatggtgctcagagctgggggactgcttcaggcccctgtggcaattggagcacagtccccgcttccaggagttcaatgtga
